United States Patent Application Publication US 2011/0183924 A1 - sequence listing, part 169

SEQ ID NO: 428275 - DNA, 6525 bp, Homo sapiens
gataaggtggcggcggcgaaggcagcggcaggtcgggagcaagatggcgctgcggccaggagctggttctggtggcggcggggccgcgggagctggcgcggggtccgccgggggaggcggcttcatgtttcctgttgcaggtgggataagaccccctcaagcaggcctgatgccgatgcagcaacaaggatttcctatggtctctgtcatgcagcctaatatgcaaggcattatgggaatgaattacagctctcagatgtcccaaggacctattgctatgcaggcaggaataccaatgggaccaatgccagcagcgggaatgccttacctaggacaagcacccttcctgggcatgcgtcctccaggcccacagtacactccagacatgcagaagcagtttgccgaagagcagcagaaacgatttgaacagcagcaaaaactcttagaagaagaaagaaaaagacgccagtttgaagagcagaagcaaaagctcagacttttgagcagtgtgaaacccaagacaggagagaagagtagagatgatgctttggaagccataaaaggaaatttagatgggttttccagagatgcaaaaatgcaccctactccagcatcgcaccccaagaaaccaggcccttccttggaggagaagttcctagtatcttgtgatataagtacatctgggcaggaacaaattaaattaaatacttctgaagttggccacaaagccctaggcccaggttccagtaagaagtatcccagtttaatggccagtaacggggttgctgtagatggatgtgtaagtggtaccaccactgcagaggcagaaaatacttcagatcaaaacctgtcaattgaagagagtggtgtgggagtatttccctcacaggatcctgctcagcccagaatgcctccttggatttacaatgagagtttggttccagatgcctataagaaaatcttagaaaccacaatgactccaactggaatagatactgccaaactgtatcccattctgatgtcatctgggcttcccagggaaactcttggacagatatgggccttagctaatcgaactacacctggcaaacttacaaaagaagaactttataccgttctagccatgatagcggtaacacagaggggcgttcctgcaatgagtcctgatgctttaaaccagttcccagcagctcctattccaactttaagtggcttttctatgactctgcctacaccggtgagtcagccaactgtgataccttcaggtcctgcgggctccatgcccctcagccttggacagccagtcatgggcattaaccttgttggaccagtgggtggagctgcagcccaggcttctagtggtttcataccaacctaccctgcaaatcaggtagtaaagccagaagaagatgacttccaggattttcaagatgcttctaagtcaggatcccttgatgactcattcagtgatttccaagagttgcctgcttcttcaaaaacaagtaactcccagcatggaaacagtgccccttctttgttgatgccacttcctggaactaaagcattgccttcaatggacaaatatgctgtgtttaaaggaattgcagctgacaagtcctctgaaaatactgttccacctggagatcctggtgataaatatagtgctttcagagaacttgaacagacagcagagaataaacctttaggagaaagctttgcagaattcagatctgcaggaactgatgatggtttcaccgattttaaaacagccgatagtgtatcaccactagagccaccaacaaaagacaaaacttttccaccatccttcccctcaggaactatacaacagaaacaacaaacacaagtgaaaaaccctctgaacttagcagacctagatatgttttcctcagttaattgcagcagcgagaaaccattgtctttttcagctgtgtttagcacatcaaaatcagtttctacaccacagtcaacaggttctgctgctactatgacagcattggcagcaacaaaaacttctagtttggctgatgattttggagaattcagcctttttggggaatattctggtctagcacctgttggggagcaggatgactttgcagattttatggctttcagtaatagctctatttcatctgagcaaaagccggatgacaaatatgatgcccttaaagaggaagccagtcctgttcctctaaccagcaacgtgggcagcacagtgaagggtggacaaaactcgactgctgcgtctaccaagtacgatgtcttcagacaactttctctggaagggtctggactaggtgttgaagacctgaaagataacactccttcaggaaaaagtgatgatgattttgctgacttccactccagtaaattttcttccataaactcggacaaatccctgggagagaaagcagtggctttcagacacaccaaagaagactctgcatcagtgaagtccttagatctcccttccattggtggcagcagtgttggcaaggaggactctgaagatgcactctctgttcagtttgacatgaaattggctgatgtgggaggagatcttaagcatgtcatgtctgatagctctttggatttaccaacagttagtggccagcatcctcctgctgcagatatagaggacttaaaatatgctgcttttggaagctacagtagcaattttgcagtgagcacacttacaagctatgactggtcagacagggatgatgcaactcagggcagaaaactctctccatttgtcctctcagcaggaagtggatccccctcagccacctcaattcttcaaaagaaagagacttcatttggcagttctgaaaacatcaccatgacatctctctccaaagtaacgacctttgtaagtgaagatgctcttccagagaccaccttcccagctcttgccagttttaaagacacgattcctcagaccagtgagcaaaaggaatatgaaaacagagactataaagatttcacaaaacaggacctgcctacggctgaacggagccaggaggccacgtgtcccagcccagcgtccagtggtgcctctcaagaaaccccgaacgaatgttcggatgactttggagagtttcaaagtgaaaagcccaaaatcagcaaatttgacttcttagtagccacttcacaaagcaaaatgaaatccagtgaagaaatgatcaaaagtgagctggcaacctttgacctttctgttcaaggatcacacaagaggagtttgagccttggtgataaagaaataagccgttcttctccttctccagctttggagcagcctttcagagaccgttccaatactctgaatgagaagcccgccctgcccgtcatccgagacaagtacaaagacctgacgggagaggtggaggaaaatgagagatatgcatatgaatggcagagatgcctggggagtgccctgaatgtcattaagaaggcaaatgataccttaaatggaatcagtagtagttctgtttgcacagaagtaattcagtcagctcaaggcatggaatatttattaggtgttgttgaagtgtacagggtaaccaagcgtgtggagctggggataaaagccactgcagtgtgcagtgagaaactccagcagttgctgaaggacatcgataaagtatggaataacctaatcggcttcatgtcactcgccacactcacaccagatgaaaactcgctggatttttcctcctgtatgttacggcctgggattaaaaatgctcaggagcttgcctgtggagtgtgcctcttgaatgtggactcgaggagccggaaagaagagaagcctgcagaagaacatcctaaaaaagcattcaactcagaaacagacagtttcaagctggcctatggagggcaccagtatcacgccagctgtgccaacttctggatcaactgtgtcgaaccaaagcctcctggcctcgtcctgcctgacctgctctgaacaactcctctgtgaagcattgacttttttttttctgtgacaccccacggggtgacagggaccaataaatagaatgcgagcactgcacagttcgcttccctgaatcgatatgaagaacaccgcaagggacggggcccccgtcatccccacggccagtctgcaggacttcaggtaaaattgtcccacccaaactgcacgtggcaccagaagcttgctcacttatctctacttaagattttctgaaatacggaccacggctttcttgatctaaggaagaacttgctgctgcagtattgaaactgtgaagaactgacatttgaagaaaaatagattaccgttgcgggactagaatgggcgactgcttggagccagtgcttgtttttatctaggacacttactgtcctgtgaagtagaatacatttatctgcatttagtttgttaatgtctgaaatgaataaaaagaggaaattgcgattaaactgatgttctgctttttatggagaagattctgcccatctcccctggacagtagcaggcaggtgagggcagattttacccacttggttgtcacaactgaaccagttctctactccttcccttcacttctgtccactctcaagactttttcccaaaacatgcctgggcactctgcagccgtgaagaatgctcattttgacagaggcccaaatcctgtgtattaggataatatccttccccccgggagccttcgctgcaaacctgttctgccgcatgcaaagactgtgaccatggagttttctcagacaagatttggaaaggcagtggaatgaaatctctttgcagtggcctctctccaaatttccaaagatgactgcatagggaccaacactgcctgactttgcagtatctgtgagaaaaacctgaaaattaattcagggtgaaaatgtggagctctcggcctagtgtaaagtatcaagatgtatatttatgggatagatacatgacttagaagaagtagaagaaaattgtccagaaacagtactgaattttagatagaaaaggctcatgcttcctggagtagggaattgtctttgccatttaatgtgaatgcataaaattaggggaaaaacccaagtggctaagagctgtgttattcctgggaagaactaccaatctagggcacacgtctctctgaattgttgattatgcgctttatgaagagatttttcaatctcgtgtgctttactttgtgtggtttagaccctctgacctagacttttatttttaaactgaaaaagttggtcttgtctatataattgctgcttttacataatttattttcccctctcaggacaaattctgtcttgctccatcttacagcttttccatgttctccaagaatggtgtggaacattttcattaaacagctgttgctgaggcttctgcttgaccttctgcgtgcccgaatgcacagagaggcaccgaggagagaaaggcttttctcactcgctcccgatgataccgtctctggccattcctgactgaggcagctcactctgaatgggcacctttggagcttttgcccaccacaaggctagtggggtgtttctaacaacacaagtgggacagcttttggcaggcttttcctgaggcctcggcgcttccatcctggacagcaccacttccacatggagctggaatgcaagcaggctgctaattggccttaaaaattctttgtttttttttgagatggagtttcactcttgttgcccaggagaattgcttgaaccagagaggcggaggttgcagtgagccgagatcgcgccactgcactccagcctgggcaacaagagcgaaactctgtctcaaaaataaaaaattccctttaacaccttcaaggtcaaatgcctgcctttgtgaacagttaataaactttgacattttcagacatttgccattcagaagggagcattgtagcctgctgtagaccattccagcaaatgtcagaatgcagggcaagatgtgtgtcgactatgttttttatgtttaagttacttacttatttcttcaggtaagtgtgtaccaaataacaatactgaaaagccctccccttgccaggccgaggaaataaagcttaagtgaaacagctcttgggggaaaaatgccactttacaaatacttttctaacaaaatagcattataatgaagtttttacttaattccattatttatatgttgacgtgaatgtaagtggttaaaaagtattcatgtgggacatctcattactttgtagctgtggctttattaaccagtgaatgctgtggcccttagcgaaatgcgttgtcttctgcgtgatgtggaattcgcgcctgtattttaaaagatggtgtggtttctcccttgtttgtattttaataaacaactgctctaattgatgtgtttagacattataaagctttacctttaaaatattttcagggtctgttctgaaatcaccccttgttaaacttctctaaccaaaatacaagtgtagaagaatgtcaggctactaagccttt

SEQ ID NO: 428276 - DNA, 6622 bp, Homo sapiens
gataaggtggcggcggcgaaggcagcggcaggtcgggagcaagatggcgctgcggccaggagctggttctggtggcggcggggccgcgggagctggcgcggggtccgccgggggaggcggcttcatgtttcctgttgcaggtgggataagaccccctcaagcaggcctgatgccgatgcagcaacaaggatttcctatggtctctgtcatgcagcctaatatgcaaggcattatgggaatgaattacagctctcagatgtcccaaggacctattgctatgcaggcaggaataccaatgggaccaatgccagcagcgggaatgccttacctaggacaagcacccttcctgggcatgcgtcctccaggcccacagtacactccagacatgcagaagcagtttgccgaagagcagcagaaacgatttgaacagcagcaaaaactcttagaagaagaaagaaaaagacgccagtttgaagagcagaagcaaaagctcagacttttgagcagtgtgaaacccaagacaggagagaagagtagagatgatgctttggaagccataaaaggaaatttagatgggttttccagagatgcaaaaatgcaccctactccagcatcgcaccccaagaaaccaggcccttccttggaggagaagttcctagtatcttgtgatataagtacatctgggcaggaacaaattaaattaaatacttctgaagttggccacaaagccctaggcccaggttccagtaagaagtatcccagtttaatggccagtaacggggttgctgtagatggatgtgtaagtggtaccaccactgcagaggcagaaaatacttcagatcaaaacctgtcaattgaagagagtggtgtgggagtatttccctcacaggatcctgctcagcccagaatgcctccttggatttacaatgagagtttggttccagatgcctataagaaaatcttagaaaccacaatgactccaactggaatagatactgccaaactgtatcccattctgatgtcatctgggcttcccagggaaactcttggacagatatgggccttagctaatcgaactacacctggcaaacttacaaaagaagaactttataccgttctagccatgatagcggtaacacagaggggcgttcctgcaatgagtcctgatgctttaaaccagttcccagcagctcctattccaactttaagtggcttttctatgactctgcctacaccggtgagtcagccaactgtgataccttcaggtcctgcgggctccatgcccctcagccttggacagccagtcatgggcattaaccttgttggaccagtgggtggagctgcagcccaggcttctagtggtttcataccaacctaccctgcaaatcaggtagtaaagccagaagaagatgacttccaggattttcaagatgcttctaagtcaggatcccttgatgactcattcagtgatttccaagagttgcctgcttcttcaaaaacaagtaactcccagcatggaaacagtgccccttctttgttgatgccacttcctggaactaaagcattgccttcaatggacaaatatgctgtgtttaaaggaattgcagctgacaagtcctctgaaaatactgttccacctggagatcctggtgataaatatagtgctttcagagaacttgaacagacagcagagaataaacctttaggagaaagctttgcagaattcagatctgcaggaactgatgatggtttcaccgattttaaaacagccgatagtgtatcaccactagagccaccaacaaaagacaaaacttttccaccatccttcccctcaggaactatacaacagaaacaacaaacacaagtgaaaaaccctctgaacttagcagacctagatatgttttcctcagttaattgcagcagcgagaaaccattgtctttttcagctgtgtttagcacatcaaaatcagtttctacaccacagtcaacaggttctgctgctactatgacagcattggcagcaacaaaaacttctagtttggctgatgattttggagaattcagcctttttggggaatattctggtctagcacctgttggggagcaggatgactttgcagattttatggctttcagtaatagctctatttcatctgagcaaaagccggatgacaaatatgatgcccttaaagaggaagccagtcctgttcctctaaccagcaacgtgggcagcacagtgaagggtggacaaaactcgactgctgcgtctaccaagtacgatgtcttcagacaactttctctggaagggtctggactaggtgttgaagacctgaaagataacactccttcaggaaaaagtgatgatgattttgctgacttccactccagtaaattttcttccataaactcggacaaatccctgggagagaaagcagtggctttcagacacaccaaagaagactctgcatcagtgaagtccttagatctcccttccattggtggcagcagtgttggcaaggaggactctgaagatgcactctctgttcagtttgacatgaaattggctgatgtgggaggagatcttaagcatgtcatgtctgatagctctttggatttaccaacagttagtggccagcatcctcctgctgcagatatagaggacttaaaatatgctgcttttggaagctacagtagcaattttgcagtgagcacacttacaagctatgactggtcagacagggatgatgcaactcagggcagaaaactctctccatttgtcctctcagcaggaagtggatccccctcagccacctcaattcttcaaaagaaagagacttcatttggcagttctgaaaacatcaccatgacatctctctccaaagtaacgacctttgtaagtgaagatgctcttccagagaccaccttcccagctcttgccagttttaaagacacgattcctcagaccagtgagcaaaaggaatatgaaaacagagactataaagatttcacaaaacaggacctgcctacggctgaacggagccaggaggccacgtgtcccagcccagcgtccagtggtgcctctcaagaaaccccgaacgaatgttcggatgactttggagagtttcaaagtgaaaagcccaaaatcagcaaatttgacttcttagtagccacttcacaaagcaaaatgaaatccagtgaagaaatgatcaaaagtgagctggcaacctttgacctttctgttcaaggatcacacaagaggagtttgagccttggtgataaagaaataagccgttcttctccttctccagctttggagcagcctttcagagaccgttccaatactctgaatgagaagcccgccctgcccgtcatccgagacaagtacaaagacctgacgggagaggtggaggaaaatgagagatatgcatatgaatggcagagatgcctggggagtgccctgaatgtcattaagaaggcaaatgataccttaaatggaatcagtagtagttctgtttgcacagaagtaattcagtcagctcaaggcatggaatatttattaggtgttgttgaagtgtacagggtaaccaagcgtgtggagctggggataaaagccactgcagtgtgcagtgagaaactccagcagttgctgaaggacatcgataaagtatggaataacctaatcggcttcatgtcactcgccacactcacaccagatgaaaactcgctggatttttcctcctgtatgttacggcctgggattaaaaatgctcaggagcttgcctgtggagtgtgcctcttgaatgtggactcgaggagccggaaagaagagaagcctgcagaagaacatcctaaaaaagcattcaactcagaaacagacagtttcaagctggcctatggagggcaccagtatcacgccagctgtgccaacttctggatcaactgtgtcgaaccaaagcctcctggcctcgtcctgcctgacctgctctgaacaactcctctgtgaagcattgacttttttttttctgtgacaccccacggggtgacagggaccaataaatagaatgcgagcactgcacagttcgcttccctgaatcgatatgaagaacaccgcaagggacggggcccccgtcatccccacggccagtctgcaggacttcaggtaaaattgtcccacccaaactgcacgtggcaccagaagcttgctcacttatctctacttaagattttctgaaatacggaccacggctttcttgatctaaggaagaacttgctgctgcagtattgaaactgtgaagaactgacatttgaagaaaaatagattaccgttgcgggactagaatgggcgactgcttggagccagtgcttgtttttatctaggacacttactgtcctgtgaagtagaatacatttatctgcatttagtttgttaatgtctgaaatgaataaaaagaggaaattgcgattaaactgatgttctgctttttatggagaagattctgcccatctcccctggacagtagcaggcaggtgagggcagattttacccacttggttgtcacaactgaaccagttctctactccttcccttcacttctgtccactctcaagactttttcccaaaacatgcctgggcactctgcagccgtgaagaatgctcattttgacagaggcccaaatcctgtgtattaggataatatccttccccccgggagccttcgctgcaaacctgttctgccgcatgcaaagactgtgaccatggagttttctcagacaagatttggaaaggcagtggaatgaaatctctttgcagtggcctctctccaaatttccaaagatgactgcatagggaccaacactgcctgactttgcagtatctgtgagaaaaacctgaaaattaattcagggtgaaaatgtggagctctcggcctagtgtaaagtatcaagatgtatatttatgggatagatacatgacttagaagaagtagaagaaaattgtccagaaacagtactgaattttagatagaaaaggctcatgcttcctggagtagggaattgtctttgccatttaatgtgaatgcataaaattaggggaaaaacccaagtggctaagagctgtgttattcctgggaagaactaccaatctagggcacacgtctctctgaattgttgattatgcgctttatgaagagatttttcaatctcgtgtgctttactttgtgtggtttagaccctctgacctagacttttatttttaaactgaaaaagttggtcttgtctatataattgctgcttttacataatttattttcccctctcaggacaaattctgtcttgctccatcttacagcttttccatgttctccaagaatggtgtggaacattttcattaaacagctgttgctgaggcttctgcttgaccttctgcgtgcccgaatgcacagagaggcaccgaggagagaaaggcttttctcactcgctcccgatgataccgtctctggccattcctgactgaggcagctcactctgaatgggcacctttggagcttttgcccaccacaaggctagtggggtgtttctaacaacacaagtgggacagcttttggcaggcttttcctgaggcctcggcgcttccatcctggacagcaccacttccacatggagctggaatgcaagcaggctgctaattggccttaaaaattctttgtttttttttgagatggagtttcactcttgttgcccaggcttgagtgcagtggcacaatctcggctcagtgcaacctccgcctcccgggttcaagcgattctcctgcctcagcctcgtgagtagctgggattacaggcgtgcaccaccacgcccagctaattttgtatttttggtagaggcagggtttctccatgttggccaggcttgaactccggacctcgggcgatccgcccgcctcagcctcccaaagtaccgggattacaggcgtgagccactgcgcctggcctaaatttcataacagaaccatgacagcagaatctacctttgcaataagaatgtttcccaggagttagagaccagccctgggcatgatggtaaagaccccagctaattatacaaaaaataattagccgggtaggtggagtgcatctgtggacattcgtggtcccagctactaggtaagctgaggcgggagatcacaagtccaggagtttgaggctgcacgtgacagcgtaggtgatgacagagcgagacactgtctcttaaaaaaaaaaaaaaaaaagtttcccagtttgaatttgtattgctgaagcatttttttgaaatgctatatagatgcctgtcatgtcacagtggcccaggtgcttcagaagtcctcgtactctagaagcacgtgggggaaacagggtatactacattttgaacatagtgatgaaatttgtcctaattttaaagatgagcctcattacaagttcacatatgactaaagacaatgaagacacagagggcaaaaggaaggaaaacgagggagaacgaggaagaagaaagcacttgtagtgagcagtttacagaaagaaactcacaatggaccctatgaaaagatcctcacccagagggaaagtacatttttaacttacc

SEQ ID NO: 428277 - DNA, 6351 bp, Homo sapiens
gataaggtggcggcggcgaaggcagcggcaggtcgggagcaagatggcgctgcggccaggagctggttctggtggcggcggggccgcgggagctggcgcggggtccgccgggggaggcggcttcatgtttcctgttgcaggtgggataagaccccctcaagcaggcctgatgccgatgcagcaacaaggatttcctatggtctctgtcatgcagcctaatatgcaaggcattatgggaatgaattacagctctcagatgtcccaaggacctattgctatgcaggcaggaataccaatgggaccaatgccagcagcgggaatgccttacctaggacaagcacccttcctgggcatgcgtcctccaggcccacagtacactccagacatgcagaagcagtttgccgaagagcagcagaaacgatttgaacagcagcaaaaactcttagaagaagaaagaaaaagacgccagtttgaagagcagaagcaaaagctcagacttttgagcagtgtgaaacccaagacaggagagaagagtagagatgatgctttggaagccataaaaggaaatttagatgggttttccagagatgcaaaaatgcaccctactccagcatcgcaccccaagaaaccaggcccttccttggaggagaagttcctagtatcttgtgatataagtacatctgggcaggaacaaattaaattaaatacttctgaagttggccacaaagccctaggcccaggttccagtaagaagtatcccagtttaatggccagtaacggggttgctgtagatggatgtgtaagtggtaccaccactgcagaggcagaaaatacttcagatcaaaacctgtcaattgaagagagtggtgtgggagtatttccctcacaggatcctgctcagcccagaatgcctccttggatttacaatgagagtttggttccagatgcctataagaaaatcttagaaaccacaatgactccaactggaatagatactgccaaactgtatcccattctgatgtcatctgggcttcccagggaaactcttggacagatatgggccttagctaatcgaactacacctggcaaacttacaaaagaagaactttataccgttctagccatgatagcggtaacacagaggggcgttcctgcaatgagtcctgatgctttaaaccagttcccagcagctcctattccaactttaagtggcttttctatgactctgcctacaccggtgagtcagccaactgtgataccttcaggtcctgcgggctccatgcccctcagccttggacagccagtcatgggcattaaccttgttggaccagtgggtggagctgcagcccaggcttctagtggtttcataccaacctaccctgcaaatcaggtagtaaagccagaagaagatgacttccaggattttcaagatgcttctaagtcaggatcccttgatgactcattcagtgatttccaagagttgcctgcttcttcaaaaacaagtaactcccagcatggaaacagtgccccttctttgttgatgccacttcctggaactaaagcattgccttcaatggacaaatatgctgtgtttaaaggaattgcagctgacaagtcctctgaaaatactgttccacctggagatcctggtgataaatatagtgctttcagagaacttgaacagacagcagagaataaacctttaggagaaagctttgcagaattcagatctgcaggaactgatgatggtttcaccgattttaaaacagccgatagtgtatcaccactagagccaccaacaaaagacaaaacttttccaccatccttcccctcaggaactatacaacagaaacaacaaacacaagtgaaaaaccctctgaacttagcagacctagatatgttttcctcagttaattgcagcagcgagaaaccattgtctttttcagctgtgtttagcacatcaaaatcagtttctacaccacagtcaacaggttctgctgctactatgacagcattggcagcaacaaaaacttctagtttggctgatgattttggagaattcagcctttttggggaatattctggtctagcacctgttggggagcaggatgactttgcagattttatggctttcagtaatagctctatttcatctgagcaaaagccggatgacaaatatgatgcccttaaagaggaagccagtcctgttcctctaaccagcaacgtgggcagcacagtgaagggtggacaaaactcgactgctgcgtctaccaagtacgatgtcttcagacaactttctctggaagggtctggactaggtgttgaagacctgaaagataacactccttcaggaaaaagtgatgatgattttgctgacttccactccagtaaattttcttccataaactcggacaaatccctgggagagaaagcagtggctttcagacacaccaaagaagactctgcatcagtgaagtccttagatctcccttccattggtggcagcagtgttggcaaggaggactctgaagatgcactctctgttcagtttgacatgaaattggctgatgtgggaggagatcttaagcatgtcatgtctgatagctctttggatttaccaacagttagtggccagcatcctcctgctgcaggaagtggatccccctcagccacctcaattcttcaaaagaaagagacttcatttggcagttctgaaaacatcaccatgacatctctctccaaagtaacgacctttgtaagtgaagatgctcttccagagaccaccttcccagctcttgccagttttaaagacacgattcctcagaccagtgagcaaaaggaatatgaaaacagagactataaagatttcacaaaacaggacctgcctacggctgaacggagccaggaggccacgtgtcccagcccagcgtccagtggtgcctctcaagaaaccccgaacgaatgttcggatgactttggagagtttcaaagtgaaaagcccaaaatcagcaaatttgacttcttagtagccacttcacaaagcaaaatgaaatccagtgaagaaatgatcaaaagtgagctggcaacctttgacctttctgttcaaggatcacacaagaggagtttgagccttggtgataaagaaataagccgttcttctccttctccagctttggagcagcctttcagagaccgttccaatactctgaatgagaagcccgccctgcccgtcatccgagacaagtacaaagacctgacgggagaggtggaggaaaatgagagatatgcatatgaatggcagagatgcctggggagtgccctgaatgtcattaagaaggcaaatgataccttaaatggaatcagtagtagttctgtttgcacagaagtaattcagtcagctcaaggcatggaatatttattaggtgttgttgaagtgtacagggtaaccaagcgtgtggagctggggataaaagccactgcagtgtgcagtgagaaactccagcagttgctgaaggacatcgataaagtatggaataacctaatcggcttcatgtcactcgccacactcacaccagatgaaaactcgctggatttttcctcctgtatgttacggcctgggattaaaaatgctcaggagcttgcctgtggagtgtgcctcttgaatgtggactcgaggagccgggcattcaactcagaaacagacagtttcaagctggcctatggagggcaccagtatcacgccagctgtgccaacttctggatcaactgtgtcgaaccaaagcctcctggcctcgtcctgcctgacctgctctgaacaactcctctgtgaagcattgacttttttttttctgtgacaccccacggggtgacagggaccaataaatagaatgcgagcactgcacagttcgcttccctgaatcgatatgaagaacaccgcaagggacggggcccccgtcatccccacggccagtctgcaggacttcaggtaaaattgtcccacccaaactgcacgtggcaccagaagcttgctcacttatctctacttaagattttctgaaatacggaccacggctttcttgatctaaggaagaacttgctgctgcagtattgaaactgtgaagaactgacatttgaagaaaaatagattaccgttgcgggactagaatgggcgactgcttggagccagtgcttgtttttatctaggacacttactgtcctgtgaagtagaatacatttatctgcatttagtttgttaatgtctgaaatgaataaaaagaggaaattgcgattaaactgatgttctgctttttatggagaagattctgcccatctcccctggacagtagcaggcaggtgagggcagattttacccacttggttgtcacaactgaaccagttctctactccttcccttcacttctgtccactctcaagactttttcccaaaacatgcctgggcactctgcagccgtgaagaatgctcattttgacagaggcccaaatcctgtgtattaggataatatccttccccccgggagccttcgctgcaaacctgttctgccgcatgcaaagactgtgaccatggagttttctcagacaagatttggaaaggcagtggaatgaaatctctttgcagtggcctctctccaaatttccaaagatgactgcatagggaccaacactgcctgactttgcagtatctgtgagaaaaacctgaaaattaattcagggtgaaaatgtggagctctcggcctagtgtaaagtatcaagatgtatatttatgggatagatacatgacttagaagaagtagaagaaaattgtccagaaacagtactgaattttagatagaaaaggctcatgcttcctggagtagggaattgtctttgccatttaatgtgaatgcataaaattaggggaaaaacccaagtggctaagagctgtgttattcctgggaagaactaccaatctagggcacacgtctctctgaattgttgattatgcgctttatgaagagatttttcaatctcgtgtgctttactttgtgtggtttagaccctctgacctagacttttatttttaaactgaaaaagttggtcttgtctatataattgctgcttttacataatttattttcccctctcaggacaaattctgtcttgctccatcttacagcttttccatgttctccaagaatggtgtggaacattttcattaaacagctgttgctgaggcttctgcttgaccttctgcgtgcccgaatgcacagagaggcaccgaggagagaaaggcttttctcactcgctcccgatgataccgtctctggccattcctgactgaggcagctcactctgaatgggcacctttggagcttttgcccaccacaaggctagtggggtgtttctaacaacacaagtgggacagcttttggcaggcttttcctgaggcctcggcgcttccatcctggacagcaccacttccacatggagctggaatgcaagcaggctgctaattggccttaaaaattctttgtttttttttgagatggagtttcactcttgttgcccaggagaattgcttgaaccagagaggcggaggttgcagtgagccgagatcgcgccactgcactccagcctgggcaacaagagcgaaactctgtctcaaaaataaaaaattccctttaacaccttcaaggtcaaatgcctgcctttgtgaacagttaataaactttgacattttcagacatttgccattcagaagggagcattgtagcctgctgtagaccattccagcaaatgtcagaatgcagggcaagatgtgtgtcgactatgttttttatgtttaagttacttacttatttcttcaggtaagtgtgtaccaaataacaatactgaaaagccctccccttgccaggccgaggaaataaagcttaagtgaaacagctcttgggggaaaaatgccactttacaaatacttttctaacaaaatagcattataatgaagtttttacttaattccattatttatatgttgacgtgaatgtaagtggttaaaaagtattcatgtgggacatctcattactttgtagctgtggctttattaaccagtgaatgctgtggcccttagcgaaatgcgttgtcttctgcgtgatgtggaattcgcgcctgtattttaaaagatggtgtggtttctcccttgtttgtattttaataaacaactgctctaattgatgtgtttagacattataaagctttacctttaaaatattttcagggtctgttctgaaatcaccccttgttaaacttctctaaccaaaatacaagtgtagaagaatgtcaggctactaagccttt

SEQ ID NO: 428278 - DNA, 5831 bp, Homo sapiens
acacagcctctccctccaagtcagagtccagtgccttttgccttacatggcgtccctgggcaaattccttacttctctactgcttcagcctcacacagtgtaccagaagcaggcccttccttggaggagaagttcctagtatcttgtgatataagtacatctgggcaggaacaaattaaattaaatacttctgaagttggccacaaagccctaggcccaggttccagtaagaagtatcccagtttaatggccagtaacggggttgctgtagatggatgtgtaagtggtaccaccactgcagaggcagaaaatacttcagatcaaaacctgtcaattgaagagagtggtgtgggagtatttccctcacaggatcctgctcagcccagaatgcctccttggatttacaatgagagtttggttccagatgcctataagaaaatcttagaaaccacaatgactccaactggaatagatactgccaaactgtatcccattctgatgtcatctgggcttcccagggaaactcttggacagatatgggccttagctaatcgaactacacctggcaaacttacaaaagaagaactttataccgttctagccatgatagcggtaacacagaggggcgttcctgcaatgagtcctgatgctttaaaccagttcccagcagctcctattccaactttaagtggcttttctatgactctgcctacaccggtgagtcagccaactgtgataccttcaggtcctgcgggctccatgcccctcagccttggacagccagtcatgggcattaaccttgttggaccagtgggtggagctgcagcccaggcttctagtggtttcataccaacctaccctgcaaatcaggtagtaaagccagaagaagatgacttccaggattttcaagatgcttctaagtcaggatcccttgatgactcattcagtgatttccaagagttgcctgcttcttcaaaaacaagtaactcccagcatggaaacagtgccccttctttgttgatgccacttcctggaactaaagcattgccttcaatggacaaatatgctgtgtttaaaggaattgcagctgacaagtcctctgaaaatactgttccacctggagatcctggtgataaatatagtgctttcagagaacttgaacagacagcagagaataaacctttaggagaaagctttgcagaattcagatctgcaggaactgatgatggtttcaccgattttaaaacagccgatagtgtatcaccactagagccaccaacaaaagacaaaacttttccaccatccttcccctcaggaactatacaacagaaacaacaaacacaagtgaaaaaccctctgaacttagcagacctagatatgttttcctcagttaattgcagcagcgagaaaccattgtctttttcagctgtgtttagcacatcaaaatcagtttctacaccacagtcaacaggttctgctgctactatgacagcattggcagcaacaaaaacttctagtttggctgatgattttggagaattcagcctttttggggaatattctggtctagcacctgttggggagcaggatgactttgcagattttatggctttcagtaatagctctatttcatctgagcaaaagccggatgacaaatatgatgcccttaaagaggaagccagtcctgttcctctaaccagcaacgtgggcagcacagtgaagggtggacaaaactcgactgctgcgtctaccaagtacgatgtcttcagacaactttctctggaagggtctggactaggtgttgaagacctgaaagataacactccttcaggaaaaagtgatgatgattttgctgacttccactccagtaaattttcttccataaactcggacaaatccctgggagagaaagcagtggctttcagacacaccaaagaagactctgcatcagtgaagtccttagatctcccttccattggtggcagcagtgttggcaaggaggactctgaagatgcactctctgttcagtttgacatgaaattggctgatgtgggaggagatcttaagcatgtcatgtctgatagctctttggatttaccaacagttagtggccagcatcctcctgctgcaggaagtggatccccctcagccacctcaattcttcaaaagaaagagacttcatttggcagttctgaaaacatcaccatgacatctctctccaaagtaacgacctttgtaagtgaagatgctcttccagagaccaccttcccagctcttgccagttttaaagacacgattcctcagaccagtgagcaaaaggaatatgaaaacagagactataaagatttcacaaaacaggacctgcctacggctgaacggagccaggaggccacgtgtcccagcccagcgtccagtggtgcctctcaagaaaccccgaacgaatgttcggatgactttggagagtttcaaagtgaaaagcccaaaatcagcaaatttgacttcttagtagccacttcacaaagcaaaatgaaatccagtgaagaaatgatcaaaagtgagctggcaacctttgacctttctgttcaaggatcacacaagaggagtttgagccttggtgataaagaaataagccgttcttctccttctccagctttggagcagcctttcagagaccgttccaatactctgaatgagaagcccgccctgcccgtcatccgagacaagtacaaagacctgacgggagaggtggaggaaaatgagagatatgcatatgaatggcagagatgcctggggagtgccctgaatgtcattaagaaggcaaatgataccttaaatggaatcagtagtagttctgtttgcacagaagtaattcagtcagctcaaggcatggaatatttattaggtgttgttgaagtgtacagggtaaccaagcgtgtggagctggggataaaagccactgcagtgtgcagtgagaaactccagcagttgctgaaggacatcgataaagtatggaataacctaatcggcttcatgtcactcgccacactcacaccagatgaaaactcgctggatttttcctcctgtatgttacggcctgggattaaaaatgctcaggagcttgcctgtggagtgtgcctcttgaatgtggactcgaggagccgggcattcaactcagaaacagacagtttcaagctggcctatggagggcaccagtatcacgccagctgtgccaacttctggatcaactgtgtcgaaccaaagcctcctggcctcgtcctgcctgacctgctctgaacaactcctctgtgaagcattgacttttttttttctgtgacaccccacggggtgacagggaccaataaatagaatgcgagcactgcacagttcgcttccctgaatcgatatgaagaacaccgcaagggacggggcccccgtcatccccacggccagtctgcaggacttcaggtaaaattgtcccacccaaactgcacgtggcaccagaagcttgctcacttatctctacttaagattttctgaaatacggaccacggctttcttgatctaaggaagaacttgctgctgcagtattgaaactgtgaagaactgacatttgaagaaaaatagattaccgttgcgggactagaatgggcgactgcttggagccagtgcttgtttttatctaggacacttactgtcctgtgaagtagaatacatttatctgcatttagtttgttaatgtctgaaatgaataaaaagaggaaattgcgattaaactgatgttctgctttttatggagaagattctgcccatctcccctggacagtagcaggcaggtgagggcagattttacccacttggttgtcacaactgaaccagttctctactccttcccttcacttctgtccactctcaagactttttcccaaaacatgcctgggcactctgcagccgtgaagaatgctcattttgacagaggcccaaatcctgtgtattaggataatatccttccccccgggagccttcgctgcaaacctgttctgccgcatgcaaagactgtgaccatggagttttctcagacaagatttggaaaggcagtggaatgaaatctctttgcagtggcctctctccaaatttccaaagatgactgcatagggaccaacactgcctgactttgcagtatctgtgagaaaaacctgaaaattaattcagggtgaaaatgtggagctctcggcctagtgtaaagtatcaagatgtatatttatgggatagatacatgacttagaagaagtagaagaaaattgtccagaaacagtactgaattttagatagaaaaggctcatgcttcctggagtagggaattgtctttgccatttaatgtgaatgcataaaattaggggaaaaacccaagtggctaagagctgtgttattcctgggaagaactaccaatctagggcacacgtctctctgaattgttgattatgcgctttatgaagagatttttcaatctcgtgtgctttactttgtgtggtttagaccctctgacctagacttttatttttaaactgaaaaagttggtcttgtctatataattgctgcttttacataatttattttcccctctcaggacaaattctgtcttgctccatcttacagcttttccatgttctccaagaatggtgtggaacattttcattaaacagctgttgctgaggcttctgcttgaccttctgcgtgcccgaatgcacagagaggcaccgaggagagaaaggcttttctcactcgctcccgatgataccgtctctggccattcctgactgaggcagctcactctgaatgggcacctttggagcttttgcccaccacaaggctagtggggtgtttctaacaacacaagtgggacagcttttggcaggcttttcctgaggcctcggcgcttccatcctggacagcaccacttccacatggagctggaatgcaagcaggctgctaattggccttaaaaattctttgtttttttttgagatggagtttcactcttgttgcccaggagaattgcttgaaccagagaggcggaggttgcagtgagccgagatcgcgccactgcactccagcctgggcaacaagagcgaaactctgtctcaaaaataaaaaattccctttaacaccttcaaggtcaaatgcctgcctttgtgaacagttaataaactttgacattttcagacatttgccattcagaagggagcattgtagcctgctgtagaccattccagcaaatgtcagaatgcagggcaagatgtgtgtcgactatgttttttatgtttaagttacttacttatttcttcaggtaagtgtgtaccaaataacaatactgaaaagccctccccttgccaggccgaggaaataaagcttaagtgaaacagctcttgggggaaaaatgccactttacaaatacttttctaacaaaatagcattataatgaagtttttacttaattccattatttatatgttgacgtgaatgtaagtggttaaaaagtattcatgtgggacatctcattactttgtagctgtggctttattaaccagtgaatgctgtggcccttagcgaaatgcgttgtcttctgcgtgatgtggaattcgcgcctgtattttaaaagatggtgtggtttctcccttgtttgtattttaataaacaactgctctaattgatgtgtttagacattataaagctttacctttaaaatattttcagggtctgttctgaaatcaccccttgttaaacttctctaaccaaaatacaagtgtagaagaatgtcaggctactaagccttt

SEQ ID NO: 428279 - DNA, 5062 bp, Homo sapiens
gataaggtggcggcggcgaaggcagcggcaggtcgggagcaagatggcgctgcggccaggagctggttctggtggcggcggggccgcgggagctggcgcggggtccgccgggggaggcggcttcatgtttcctgttgcaggtgggataagaccccctcaagcaggcctgatgccgatgcagcaacaaggatttcctatggtctctgtcatgcagcctaatatgcaaggcattatgggaatgaattacagctctcagatgtcccaaggacctattgctatgcaggcaggaataccaatgggaccaatgccagcagcgggaatgccttacctaggacaagcacccttcctgggcatgcgtcctccaggcccacagtacactccagacatgcagaagcagtttgccgaagagcagcagaaacgatttgaacagcagcaaaaactcttagaagaagaaagaaaaagacgccagtttgaagagcagaagcaaaagctcagacttttgagcagtgtgaaacccaagacaggagagaagagtagagatgatgctttggaagccataaaaggaaatttagatgggttttccagagatgcaaaaatgcaccctactccagcatcgcaccccaagaaaccaggcccttccttggaggagaagttcctagtatcttgtgatataagtacatctgggcaggaacaaattaaattaaatacttctgaagttggccacaaagccctaggcccaggttccagtaagaagtatcccagtttaatggccagtaacggggttgctgtagatggatgtgtaagtggtaccaccactgcagaggcagaaaatacttcagatcaaaacctgtcaattgaagagagtggtgtgggagtatttccctcacaggatcctgctcagcccagaatgcctccttggatttacaatgagagtttggttccagatgcctataagaaaatcttagaaaccacaatgactccaactggaatagatactgccaaactgtatcccattctgatgtcatctgggcttcccagggaaactcttggacagatatgggccttagctaatcgaactacacctggcaaacttacaaaagaagaactttataccgttctagccatgatagcggtaacacagaggggcgttcctgcaatgagtcctgatgctttaaaccagttcccagcagctcctattccaactttaagtggcttttctatgactctgcctacaccggtgagtcagccaactgtgataccttcaggtcctgcgggctccatgcccctcagccttggacagccagtcatgggcattaaccttgttggaccagtgggtggagctgcagcccaggcttctagtggtttcataccaacctaccctgcaaatcaggtagtaaagccagaagaagatgacttccaggattttcaagatgcttctaagtcaggatcccttgatgactcattcagtgatttccaagagttgcctgcttcttcaaaaacaagtaactcccagcatggaaacagtgccccttctttgttgatgccacttcctggaactaaagcattgccttcaatggacaaatatgctgtgtttaaaggaattgcagctgacaagtcctctgaaaatactgttccacctggagatcctggtgataaatatagtgctttcagagaacttgaacagacagcagagaataaacctttaggagaaagctttgcagaattcagatctgcaggaactgatgatggtttcaccgattttaaaacagccgatagtgtatcaccactagagccaccaacaaaagacaaaacttttccaccatccttcccctcaggaactatacaacagaaacaacaaacacaagtgaaaaaccctctgaacttagcagacctagatatgttttcctcagttaattgcagcagcgagaaaccattgtctttttcagctgtgtttagcacatcaaaatcagtttctacaccacagtcaacaggttctgctgctactatgacagcattggcagcaacaaaaacttctagtttggctgatgattttggagaattcagcctttttggggaatattctggtctagcacctgttggggagcaggatgactttgcagattttatggctttcagtaatagctctatttcatctgagcaaaagccggatgacaaatatgatgcccttaaagaggaagccagtcctgttcctctaaccagcaacgtgggcagcacagtgaagggtggacaaaactcgactgctgcgtctaccaagtacgatgtcttcagacaactttctctggaagggtctggactaggtgttgaagacctgaaagataacactccttcaggaaaaagtgatgatgattttgctgacttccactccagtaaattttcttccataaactcggacaaatccctgggagagaaagcagtggctttcagacacaccaaagaagactctgcatcagtgaagtccttagatctcccttccattggtggcagcagtgttggcaaggaggactctgaagatgcactctctgttcagtttgacatgaaattggctgatgtgggaggagatcttaagcatgtcatgtctgatagctctttggatttaccaacagttagtggccagcatcctcctgctgcagatatagaggacttaaaatatgctgcttttggaagctacagtagcaattttgcagtgagcacacttacaagctatgactggtcagacagggatgatgcaactcagggcagaaaactctctccatttgtcctctcagcaggaagtggatccccctcagccacctcaattcttcaaaagaaagagacttcatttggcagttctgaaaacatcaccatgacatctctctccaaagtaacgacctttgtaagtgaagatgctcttccagagaccaccttcccagctcttgccagttttaaagacacgattcctcagaccagtgagcaaaaggaatatgaaaacagagactataaagatttcacaaaacaggacctgcctacggctgaacggagccaggaggccacgtgtcccagcccagcgtccagtggtgcctctcaagaaaccccgaacgaatgttcggatgactttggagagtttcaaagtgaaaagcccaaaatcagcaaatttgacttcttagtagccacttcacaaagcaaaatgaaatccagtgaagaaatgatcaaaagtgagctggcaacctttgacctttctgttcaaggatcacacaagaggagtttgagccttggtgataaagaaataagccgttcttctccttctccagctttggagcagcctttcagagaccgttccaatactctgaatgagaagcccgccctgcccgtcatccgagacaagtacaaagacctgacgggagaggtggaggaaaatgagagatatgcatatgaatggcagagatgcctggggagtgccctgaatgtcattaagaaggcaaatgataccttaaatggaatcagtagtagttctgtttgcacagaagtaattcagtcagctcaaggcatggaatatttattaggtgttgttgaagtgtacagggtaaccaagcgtgtggagctggggataaaagccactgcagtgtgcagtgagaaactccagcagttgctgaaggacatcgataaagtatggaataacctaatcggcttcatgtcactcgccacactcacaccagatgaaaactcgctggatttttcctcctgtatgttacggcctgggattaaaaatgctcaggagcttgcctgtggagtgtgcctcttgaatgtggactcgaggagccgggcattcaactcagaaacagacagtttcaagctggcctatggagggcaccagtatcacgccagctgtgccaacttctggatcaactgtgtcgaaccaaagcctcctggcctcgtcctgcctgacctgctctgaacaactcctctgtgaagcattgacttttttttttctgtgacaccccacggggtgacagggaccaataaatagaatgcgagcactgcacagttcgcttccctgaatcgatatgaagaacaccgcaagggacggggcccccgtcatccccacggccagtctgcaggacttcaggtaaaattgtcccacccaaactgcacgtggcaccagaagcttgctcacttatctctacttaagattttctgaaatacggaccacggctttcttgatctaaggaagaacttgctgctgcagtattgaaactgtgaagaactgacatttgaagaaaaatagattaccgttgcgggactagaatgggcgactgcttggagccagtgcttgtttttatctaggacacttactgtcctgtgaagtagaatacatttatctgcatttagtttgttaatgtctgaaatgaataaaaagaggaaattgcgattaaactgatgttctgctttttatggagaagattctgcccatctcccctggacagtagcaggcaggtgagggcagattttacccacttggttgtcacaactgaaccagttctctactccttcccttcacttctgtccactctcaagactttttcccaaaacatgcctgggcactctgcagccgtgaagaatgctcattttgacagaggcccaaatcctgtgtattaggataatatccttccccccgggagccttcgctgcaaacctgttctgccgcatgcaaagactgtgaccatggagttttctcagacaagatttggaaaggcagtggaatgaaatctctttgcagtggcctctctccaaatttccaaagatgactgcatagggaccaacactgcctgactttgcagtatctgtgagaaaaacctgaaaattaattcagggtgaaaatgtggagctctcggcctagtgtaaagtatcaagatgtatatttatgggatagatacatgacttagaagaagtagaagaaaattgtccagaaacagtactgaattttagatagaaaaggctcatgcttcctggagtagggaattgtctttgccatttaatgtgaatgcataaaattaggggaaaaacc

SEQ ID NO: 428280 - DNA, 957 bp, Homo sapiens
gataaggtggcggcggcgaaggcagcggcaggtcgggagcaagatggcgctgcggccaggagctggttctggtggcggcggggccgcgggagctggcgcggggtccgccgggggaggcggcttcatgtttcctgttgcaggtgggataagaccccctcaagcaggcctgatgccgatgcagcaacaaggatttcctatggtctctgtcatgcagcctaatatgcaaggcattatgggaatgaattacagctctcagatgtcccaaggacctattgctatgcaggcaggaataccaatgggaccaatgccagcagcgggaatgccttacctaggacaagcacccttcctgggcatgcgtcctccaggcccacagtacactccagacatgcagaagcagtttgccgaagagcagcagaaacgatttgaacagcagcaaaaactcttagaagaagaaagaaaaagacgccagtttgaagagcagaagcaaaagctcagacttttgagcagtgtgaaacccaagacaggagagaagagtagagatgatgctttggaagccataaaaggaaatttagatgggttttccagagatgcaaaaatgcaccctactccagcatcgcaccccaagaaaccaggtagttttaagaggcattatatttttcttttctgggaaggtgatttatgtagtccctgtttctttacctcgccattatatgtgtgtgtgaaaagtcaatgtagaactcttccttcaagctaagtacagatttggatgttctcaaatatacagtggcttaagagctctggtctggataacaactgtcttgggaggaaaaaacctctttgtcttctaagtaaatatcagtatgacaatttcacctgtaagttttctgtatataaatatgttaacattagtaaaatctattcactcagagcaaatgtaataaaggagtttaccattta

SEQ ID NO: 428281 - DNA, 2464 bp, Homo sapiens
  misc_feature (74)..(74): n is a, c, g, or t
  misc_feature (77)..(77): n is a, c, g, or t
  misc_feature (80)..(80): n is a, c, g, or t
taggtttggggttggagcggctggtcacgtggctggcccgcggcggtgcgcggcgttgggtcagcgggtctggnacnggnggcaccggcggcggcgtaggacggaggcgtcgctaggcagcttcgaaccagtgcaatgacgatgccagtcaacggggcccacaaggatgctgacctgtggtcctcacatgacaagatgctggcacaacccctcaaagacagtgatgttgaggtttacaacatcattaagaaggagagtaaccggcagagggttggattggagctgattgcctcggagaatttcgccagccgagcagttttggaggccctaggctcttgcttaaataacaaatactctgaggggtacccgggccagagatactatggcgggactgagtttattgatgaactggagaccctctgtcagaagcgagccctgcaggcctataagctggacccacagtgctggggggtcaacgtccagccctactcaggctcccctgcaaactttgctgtgtacactgccctggtggaaccccatgggcgcatcatgggcctggaccttccggatgggggccacctgacccatgggttcatgacagacaagaagaaaatctctgccacgtccatcttctttgaatctatgccctacaaggtgaacccagatactggctacatcaactatgaccagctggaggagaacgcacgcctcttccacccgaagctgatcatcgcaggaaccagctgctactcccgaaacctggaatatgcccggctacggaagattgcagatgagaacggggcgtatctcatggcggacatggctcacatcagcgggctggtggcggctggcgtggtgccctccccatttgaacactgccatgtggtgaccaccaccactcacaagaccctgcgaggctgccgagctggcatgatcttctacaggaaaggagtgaaaagtgtggatcccaagactggcaaagagattctgtacaacctggagtctcttatcaattctgctgtgttccctggcctgcagggaggtccccacaaccacgccattgctggggttgctgtggcactgaagcaagctatgactctggaatttaaagtttatcaacaccaggtggtggccaactgcagggctctgtctgaggccctgacggagctgggctacaaaatagtcacaggtggttctgacaaccatttgatccttgtggatctccgttccaaaggcacagatggtggaagggctgagaaggtgctagaagcctgttctattgcctgcaacaagaacacctgtccaggtgacagaagcgctctgcggcccagtggactgcggctggggaccccagcactgacgtcccgtggacttttggaaaaagacttccaaaaagtagcccactttattcacagagggatagagctgaccctgcagatccagagcgacactggtgtcagagccaccctgaaagagttcaaggagagactggcaggggataagtaccaggcggccgtgcaggctctccgggaggaggttgagagcttcgcctctctcttccctctgcctggcctgcctgacttctaaaggagcgggcccactctggacccacctggcgccacagaggaagctgcctgccggaggacccccacctgagagatggatgagctgctccaaaggggaactgttgacactcgggccctttgagggggtttcttttggacttttttcatgttttcttcacaaatcaaaatttgtttaagtctcattgttagtaattctgggacaggttattaaaggatttaaatttgaacctggctttctcacagctggacataattctaggaaaataaaatactatgtcgccacttggtcataatcatttagatggtggtgtagggcaaagctgttagaaagattgtagcgttttactctccctgggctttcctccgccttgctgcaacagagaggaaatgcccatgtccacagcttgtacacactgccccctcactatcttgttatccagtggcatgccaaaggagaactgaattagcttctgaggcttctgctgtaaatcagaagtgtatgttagtcaagagtaaacaagatgcacccagtatggtgggagggttttgctgtcagtagctcaaagtatggtgtagaaatggcctcctccctccatcctgggaagtcccagtcccatcctggtgtgagaatcaaccaggctttcctgctccacctgagataaccaactccctcccgtaatcaggaagccaaatgtcaccttcccaaagaaattttattttcacgtagctgaagtgcaaaacatagatgaccatttttaataagcacaatcaaatttttaaccacagaatgtctacaagaattatagctttaaaaaatacaaccaatttttatatttcaaaaatatttgaactcaaataaattaatttcttaaaaagta

SEQ ID NO: 428282 - DNA, 6043 bp, Homo sapiens
  misc_feature (74)..(74): n is a, c, g, or t
  misc_feature (77)..(77): n is a, c, g, or t
  misc_feature (80)..(80): n is a, c, g, or t
taggtttggggttggagcggctggtcacgtggctggcccgcggcggtgcgcggcgttgggtcagcgggtctggnacnggnggcaccggcggcggcgtaggacggaggcgtcgctaggcagcttcgaaccagtgcaatgacgatgccagtcaacggggcccacaaggatgctgacctgtggtcctcacatgacaagatgctggcacaacccctcaaagacagtgatgttgaggtttacaacatcattaagaaggagagtaaccggcagagggttggattggagctgattgcctcggagaatttcgccagccgagcagttttggaggccctaggctcttgcttaaataacaaatactctgaggggtacccgggccagagatactatggcgggactgagtttattgatgaactggagaccctctgtcagaagcgagccctgcaggcctataagctggacccacagtgctggggggtcaacgtccagccctactcaggctcccctgcaaactttgctgtgtacactgccctggtggaaccccatgggcgcatcatgggcctggaccttccggatgggggccacctgacccatgggttcatgacagacaagaagaaaatctctgccacgtccatcttctttgaatctatgccctacaaggtgaacccagatactggctacatcaactatgaccagctggaggagaacgcacgcctcttccacccgaagctgatcatcgcaggaaccagctgctactcccgaaacctggaatatgcccggctacggaagattgcagatgagaacggggcgtatctcatggcggacatggctcacatcagcgggctggtggcggctggcgtggtgccctccccatttgaacactgccatgtggtgaccaccaccactcacaagaccctgcgaggctgccgagctggcatgatcttctacaggaaaggagtgaaaagtgtggatcccaagactggcaaagagattctgtacaacctggagtctcttatcaattctgctgtgttccctggcctgcagggaggtccccacaaccacgccattgctggggttgctgtggcactgaagcaagctatgactctggaatttaaagtttatcaacaccaggtggtggccaactgcagggctctgtctgaggccctgacggagctgggctacaaaatagtcacaggtggttctgacaaccatttgatccttgtggatctccgttccaaaggcacagatggtggaagggctgagaaggtgctagaagcctgttctattgcctgcaacaagaacacctgtccaggtgacagaagcgctctgcggcccagtggactgcggctggggaccccagcactgacgtcccgtggacttttggaaaaagacttccaaaaagtagcccactttattcacagagggatagagctgaccctgcagatccagagcgacactggtgtcagagccaccctgaaagagttcaaggagagactggcaggggataagtaccaggcggccgtgcaggctctccgggaggaggttgagagcttcgcctctctcttccctctgcctggcctgcctgacttctaaaggagcgggcccactctggacccacctggcgccacagaggaagctgcctgccggaggacccccacctgagagatggatgagctgctccaaaggggaactgttgacactcgggccctttgagggggtttcttttggacttttttcatgttttcttcacaaatcaaaatttgtttaagtctcattgttagtaattctgggacaggttattaaaggatttaaatttgaacctggctttctcacagctggacataattctaggaaaataaaatactatgtcgccacttggtcataatcatttagatggtggtgtagggcaaagctgttagaaagattgtagcgttttactctccctgggctttcctccgccttgctgcaacagagaggaaatgcccatgtccacagcttgtacacactgccccctcactatcttgttatccagtggcatgccaaaggagaactgaattagcttctgaggcttctgctgtaaatcagaagtgtatgttagtcaagagtaaacaagatgcacccagtatggtgggagggttttgctgtcagtagctcaaagtatggtgtagaaatggcctcctccctccatcctgggaagtcccagtcccatcctggtgtgagaatcaaccaggctttcctgctccacctgagataaccaactccctcccgtaatcaggaagccaaatgtcaccttcccaaagaaattttattttcacgtagctgaagtgcaaaacatagatgaccatttttaataagcacaatcaaatttttaaccacagaatgtctacaagaattatagctttaaaaaatacaaccaatttttatatttcaaaaatatttgaactcaaataaattaatttcttaaaaagtacacttctcatactatgtgtttggcattgactctggttaactcttgtgcagcaacacctacgagatgctatcacacacgcgccagctgcactcctgcaccagccgctgcaacgactgcacctcacgtggtggcggggactcacattcacaagacgggacgggaacatgcagtaataaaatagctttttaaaaaataacacatataaattcatcacataggattatgcttttcactgcaaccttgaaggtggcatttatctcaatctgtgactccagctatttagtggcagacaatcccggtgaggcagcctgtggtcccaccttgtaggtggcagcccctgcaatctggggtctacctgtcggcgtttgctttattgtgggtggagcagctgctgcagaatctgtgagttgactcaccagtccctacagttctgctaccaaagtggtcttcaatttaggggcctgacccctccccagctggagacaagctgccatctccagggctcgctgtaaacagcctccactcttgggctgaataagcactcccaagaagctgggcccctaccaacagattaatcggctgcagagtgctcatcccctccccacacccccatccacccctgcctcctcctcctttccactgctttaaccaaaccttaatgaggtaaggccaggctaggtcagggctcaaaggaaaatgggctcaggaaaacttagtttgcccagccttgtcagctgagattggttttgctttccagccagaagtagaaacttgatgctttttcctttttgcagtgttaaaaaccatatctccagttttattatgttccatcacagttttggggcaaagccagaaagctgacttgtttgcttcaaaacacaaaccaaggcactgtcttctgtgcttttcagggaggtgggaaggtaaaggagactgcccactataggggctcagttcccccaaaggccttgcacaccttctgataaaccccctggctgaggcaatcctactggctgtgcagacaaagatgtgacagcagcactagatgctgacccaacaagcagtgctgggcctgggcggtggggcatgttcagcactgcgggcagcagtcagcacatgcaagacattcagtgagcagagggctgccctcggcctccaactgcagccgccctggcgcgtgaaatgaaattggtgggccttcctaggattgtaaaatgggacttgtcatttgtgtgaggttgaaatctactatactttgaatatggcaactgttttcaaccactgaagcaaagaaggtaaaggccagatggggaatgaaaggtaaggtactgtggtctatttccaaatttgggagcaatgtgtgtaacttcaactgttggagtaaatgagttatggaaaagccacaatttctaaaatcccaaggttctaccaaaggagtgaggttcctggggaaacaggcatgaggcagcagctcaggctgatgtgtcctgtgcgatataaaaagctgtggcctgatctctaaagtggggcttttgaaaatcaccagtccacaactacctgcctggctagtttaacctagactgcttcagaagcaagggagggggataatggactggagaaaaagctgacacaaaactcaagacaaccagtttcagtacctgggccctcaaagcaatagtgaggactgagaaagtagcaaggggcactgatgtcatctattttctgggaagtgtaatttttaatggtttcattaaaaacttactaaccttctactggaagaatacctcaaatgaaaaattttttttttttgagacagttttcgctcttgttgcccagggtggagtgcagtggcgcgatctcggctcactgtaacctctgcctcctgggttcaagtgattctcctgcctcagcctcccgagtaagtgggattacaggcacgcaccaccagacctggctaactttctttgtatttttagtagagatggggtttcaccatgttggccaggctggtctccaactcctgacctcaggtgatccgcccacctcggcctcccaaagtgttgggattacaggcgtgagccactgcgcccggcctcaactgaaaattcttgatgagattagtcccactgcataggtctcagcactgaggtttagagatgtgagactcagagtaggtttcagttccccggagtgaagggggcatagggaggggcagggcttcccagtgttaactgcctctgcccaaatcatgactcagtcctggtaccacgtcaagatccctttgaaaggaaacatactttgcatcaagtaatcctttgaaactgccacattgaaaagttagtttttaacccaaatataaatctgggagctaaacactagtcacgaagccatctttacttaatgaagaaccaccttgagggagaccagccctgcttgccacttacatggctgcccctgagacggtctgttctgttcatgccccagcagccttttgccttaggtttcaggaccttctgaaccacccttgagggtgtgtgccagcaaatacctcaagtggacttctacttaggaccacttgagtgcacaacttcagcttctagaaggccaagtgtggctgcaattcaggatctgccccaaactcatcagcccttcccaagtttcccaggtgagaacagtatgagctgtgaatttctgtgttggtgtgacaggaatgccacagtggtggtgccagtgatcactttctgaccttccttccttctcagataaaatgttgcacagttatggccttggaggcctaagtagacagcaattaaccagccagtgagaaaacgaatcagcatctagaacaggaggggagggaaccgtaacagataagggagcccacgattagaagcaggctccctgcacagcctctgcctccagcgcaagtaacagacgtttcacatttaaaggctgccaaggtattgctggcgactctcctgtctgtgaacatgcgcaacgggcacaggtacagagaaccaatgagatgtaggcagcaccatctgccacaaaaggttctccatcgcagccccaggagcaaaatcaaacacctctgatgggagcaaggaccctgaacagaagccaacggctggagccaacgggccatgcccttaaaacgaggacttggacaaggagggaaccactggagtgacgtgatgcaagccctcttcggtcactcttggcttccaccaggggtctctgcctccttgatgagaagagaagctggctggctccatgatgacctcgatggcgtactacaggccgatgggcaggccgggcctcagcagcaggcgccaacagaagcacacccagggctgattcaggtccatttcagcataatttttgtggaacaaattaaagaagcagtaataccagagctgtccccacttagggaataaaattttcaaggctgcaagaaactctctgtctacaaaccagtggccattgcctaaggaggctcggggagccaggggatcactatcagtgggataggtgctggcggaaccagcctctccgaattcacccccgcctctcttagcc

SEQ ID NO: 428283 - DNA, 2410 bp, Homo sapiens
  misc_feature (74)..(74): n is a, c, g, or t
  misc_feature (77)..(77): n is a, c, g, or t
  misc_feature (80)..(80): n is a, c, g, or t
taggtttggggttggagcggctggtcacgtggctggcccgcggcggtgcgcggcgttgggtcagcgggtctggnacnggnggcaccggcggcggcgtaggacggaggcgtcgctaggcagcttcgaaccagtgcaatgacgatgccagtcaacggggcccacaaggatgctgacctgtggtcctcacatgacaagatgctggcacaacccctcaaagacagtgatgttgaggtttacaacatcattaagaaggagagtaaccggcagagggttggattggagctgattgcctcggagaatttcgccagccgagcagttttggaggccctaggctcttgcttaaataacaaatactctgaggggtacccgggccagagatactatggcgggactgagtttattgatgaactggagaccctctgtcagaagcgagccctgcaggcctataagctggacccacagtgctggggggtcaacgtccagccctactcaggctcccctgcaaactttgctgtgtacactgccctggtggaaccccatgggcgcatcatgggcctggaccttccggatgggggccacctgacccatgggttcatgacagacaagaagaaaatctctgccacgtccatcttctttgaatctatgccctacaaggtgaacccagatactggctacatcaactatgaccagctggaggagaacgcacgcctcttccacccgaagctgatcatcgcaggaaccagctgctactcccgaaacctggaatatgcccggctacggaagattgcagatgagaacggggcgtatctcatggcggacatggctcacatcagcgggctggtggcggctggcgtggtgccctccccatttgaacactgccatgtggtgaccaccaccactcacaagaccctgcgaggctgccgagctggcatgatcttctacaggaaaggagtgaaaagtgtggatcccaagactggcaaagagattctgtacaacctggagtctcttatcaattctgctgtgttccctggcctgcagggaggtccccacaaccacgccattgctggggttgctgtggcactgaagcaagctatgactctggaatttaaagtttatcaacaccaggtggtggccaactgcagggctctgtctgaggccctgacggagctgggctacaaaatagtcacaggtggttctgacaaccatttgatccttgtggatctccgttccaaaggcacagatggtggaagggctgagaaggtgctagaagcctgttctattgcctgcaacaagaacacctgtccaggtgacagaagcgctctgcggcccagtggactgcggctggggaccccagcactgacgtcccgtggacttttggaaaaagacttccaaaaagtagcccactttattcacagagggatagagctgaccctgcagatccagagcgacactggtgtcagagccaccctgaaagagttcaaggagagactggcaggggataagtaccaggcggccgtgcaggctctccgggaggaggttgagagcttcgcctctctcttccctctgcctggcctgcctgacttctaaaggagcgggcccactctggacccacctggcgccacagaggaagctgcctgccggaggacccccacctgagagatggatgagctgctccaaaggggaactgttgacactcgggccctttgagggggtttcttttggacttttttcatgttttcttcacaaatcaaaatttgtttaagtctcattgttagtaattctgggacaggttattaaaggatttaaatttgaacctggctttctcacagctggacataattctaggaaaatactgttagaaagattgtagcgttttactctccctgggctttcctccgccttgctgcaacagagaggaaatgcccatgtccacagcttgtacacactgccccctcactatcttgttatccagtggcatgccaaaggagaactgaattagcttctgaggcttctgctgtaaatcagaagtgtatgttagtcaagagtaaacaagatgcacccagtatggtgggagggttttgctgtcagtagctcaaagtatggtgtagaaatggcctcctccctccatcctgggaagtcccagtcccatcctggtgtgagaatcaaccaggctttcctgctccacctgagataaccaactccctcccgtaatcaggaagccaaatgtcaccttcccaaagaaattttattttcacgtagctgaagtgcaaaacatagatgaccatttttaataagcacaatcaaatttttaaccacagaatgtctacaagaattatagctttaaaaaatacaaccaatttttatatttcaaaaatatttgaactcaaataaattaatttcttaaaaagta

SEQ ID NO: 428284 - DNA, 2347 bp, Homo sapiens
  misc_feature (74)..(74): n is a, c, g, or t
  misc_feature (77)..(77): n is a, c, g, or t
  misc_feature (80)..(80): n is a, c, g, or t
taggtttggggttggagcggctggtcacgtggctggcccgcggcggtgcgcggcgttgggtcagcgggtctggnacnggnggcaccggcggcggcgtaggacggaggcgtcgctaggcagcttcgaaccagtgcaatgacgatgccagtcaacggggcccacaaggatgctgacctgtggtcctcacatgacaagatgctggcacaacccctcaaagacagtgatgttgaggtttacaacatcattaagaaggagagtaaccggcagagggttggattggagctgattgcctcggagaatttcgccagccgagcagttttggaggccctaggctcttgcttaaataacaaatactctgaggggtacccgggccagagatactatggcgggactgagtttattgatgaactggagaccctctgtcagaagcgagccctgcaggcctataagctggacccacagtgctggggggtcaacgtccagccctactcaggctcccctgcaaactttgctgtgtacactgccctggtggaaccccatgggcgcatcatgggcctggaccttccggatgggggccacctgacccatgggttcatgacagacaagaagaaaatctctgccacgtccatcttctttgaatctatgccctacaaggtgaacccagatactggctacatcaactatgaccagctggaggagaacgcacgcctcttccacccgaagctgatcatcgcaggaaccagctgctactcccgaaacctggaatatgcccggctacggaagattgcagatgagaacggggcgtatctcatggcggacatggctcacatcagcgggctggtggcggctggcgtggtgccctccccatttgaacactgccatgtggtgaccaccaccactcacaagaccctgcgaggctgccgagctggcatgatcttctacaggaaaggggttgctgtggcactgaagcaagctatgactctggaatttaaagtttatcaacaccaggtggtggccaactgcagggctctgtctgaggccctgacggagctgggctacaaaatagtcacaggtggttctgacaaccatttgatccttgtggatctccgttccaaaggcacagatggtggaagggctgagaaggtgctagaagcctgttctattgcctgcaacaagaacacctgtccaggtgacagaagcgctctgcggcccagtggactgcggctggggaccccagcactgacgtcccgtggacttttggaaaaagacttccaaaaagtagcccactttattcacagagggatagagctgaccctgcagatccagagcgacactggtgtcagagccaccctgaaagagttcaaggagagactggcaggggataagtaccaggcggccgtgcaggctctccgggaggaggttgagagcttcgcctctctcttccctctgcctggcctgcctgacttctaaaggagcgggcccactctggacccacctggcgccacagaggaagctgcctgccggaggacccccacctgagagatggatgagctgctccaaaggggaactgttgacactcgggccctttgagggggtttcttttggacttttttcatgttttcttcacaaatcaaaatttgtttaagtctcattgttagtaattctgggacaggttattaaaggatttaaatttgaacctggctttctcacagctggacataattctaggaaaataaaatactatgtcgccacttggtcataatcatttagatggtggtgtagggcaaagctgttagaaagattgtagcgttttactctccctgggctttcctccgccttgctgcaacagagaggaaatgcccatgtccacagcttgtacacactgccccctcactatcttgttatccagtggcatgccaaaggagaactgaattagcttctgaggcttctgctgtaaatcagaagtgtatgttagtcaagagtaaacaagatgcacccagtatggtgggagggttttgctgtcagtagctcaaagtatggtgtagaaatggcctcctccctccatcctgggaagtcccagtcccatcctggtgtgagaatcaaccaggctttcctgctccacctgagataaccaactccctcccgtaatcaggaagccaaatgtcaccttcccaaagaaattttattttcacgtagctgaagtgcaaaacatagatgaccatttttaataagcacaatcaaatttttaaccacagaatgtctacaagaattatagctttaaaaaatacaaccaatttttatatttcaaaaatatttgaactcaaataaattaatttcttaaaaagta

SEQ ID NO: 428285 - DNA, 2654 bp, Homo sapiens
  misc_feature (74)..(74): n is a, c, g, or t
  misc_feature (77)..(77): n is a, c, g, or t
  misc_feature (80)..(80): n is a, c, g, or t
taggtttggggttggagcggctggtcacgtggctggcccgcggcggtgcgcggcgttgggtcagcgggtctggnacnggnggcaccggcggcggcgtaggacggaggcgtcgctaggcagcttcgaaccagtgcaatgacgatgccagtcaacggggcccacaaggatgctgacctgtggtcctcacatgacaagatgctggcacaacccctcaaagacagtgatgttgaggtttacaacatcattaagaaggagagtaaccggcagagggttggattggagctgattgcctcggagaatttcgccagccgagcagttttggaggccctaggctcttgcttaaataacaaatactctgaggggtacccgggccagagatactatggcgggactgagtttattgatgaactggagaccctctgtcagaagcgagccctgcaggcctataagctggacccacagtgctggggggtcaacgtccagccctactcaggctcccctgcaaactttgctgtgtacactgccctggtggaaccccatgggcgcatcatgggcctggaccttccggatgggggccacctgacccatgggttcatgacagacaagaagaaaatctctgccacgtccatcttctttgaatctatgccctacaaggtgaacccagatactggctacatcaactatgaccagctggaggagaacgcacgcctcttccacccgaagctgatcatcgcaggaaccagctgctactcccgaaacctggaatatgcccggctacggaagattgcagatgagaacggggcgtatctcatggcggacatggctcacatcagcgggctggtggcggctggcgtggtgccctccccatttgaacactgccatgtggtgaccaccaccactcacaagaccctgcgaggctgccgagctggcatgatcttctacaggaaaggagtgaaaagtgtggatcccaagactggcaaagagattctgtacaacctggagtctcttatcaattctgctgtgttccctggcctgcagggaggtccccacaaccacgccattgctggggttgctgtggcactgaagcaagctatgactctggaatttaaagtttatcaacaccaggtggtggccaactgcagggctctgtctgaggccctgacggagctgggctacaaaatagtcacaggtggttctgacaaccatttgatccttgtggatctccgttccaaaggcacagatggtggaagggctgagaaggtgctagaagcctgttctattgcctgcaacaagaacacctgtccaggtgacagaagcgctctgcggcccagtggactgcggctggggaccccagcactgacgtcccgtggacttttggaaaaagacttccaaaaagtagcccactttattcacagagggatagagctgaccctgcagatccagagcgacactggtgtcagagccaccctgaaagagttcaaggagagactggcaggggataagtaccaggcggccgtgcaggctctccgggaggaggttgagagcttcgcctctctcttccctctgcctggcctgcctgacttctaaaggagcgggcccactctggacccacctggcgccacagaggaagctgcctgccggaggacccccacctgagagatggatgagctgctccaaaggggaactgttgacactcgggccctttgagggggtttcttttggacttttttcatgttttcttcacaaatcaaaatttgtttaagtctcattgttagtaattctgggacaggttattaaaggatttaaatttgaacctggctttctcacagctggacataattctaggaaaataaaatactatgtcgccacttggtcataatcatttagatggtggtgtagggcaaagctgttagaaagattgtagcgttttactctccctgggctttcctccgccttgctgcaacagagaggaaatgcccatgtccacagcttgtacacactgccccctcactatcttgttatccagtggcatgccaaaggagaactgaattagcttctgaggcttctgctgtaaatcagaagtgtatgttagtcaagagtaaacaagatgcacccagtatggtgggagggttttgctgtcagtagctcaaagtatggtgtagaaatggcctcctccctccatcctgggaagtcccagtcccatcctggtgtgagaatcaaccaggctttcctgctccacctgagataaccaactccctcccgtaatcaggaagccaaatgtcaccttcccaaagaaattttattttcacgtagctgaagtgcaaaacatagatgaccatttttaataagcacaatcaaatttttaaccacagaatgtctacaagaattatagctttaaaaaatacaaccaatttttatatttcaaatttgacgtctgaatattatttcttaaaggtctaacaaactaggggggcggactaaagattcccagtgagcaagtattacgtcaccgctcgtataaggacccttgtgaggtataaagagcaggacgtacaacgggggaacagcaggttatatacaattttggtggtttgaacatatatagataattgtgtcagttggtaatatattaaacatagaatatataatagaaa

SEQ ID NO: 428286 - DNA, 1355 bp, Homo sapiens
ctcgttcgtgatgagtagctgagaccctgccactgaaagacaattctgcaccaaggctgagtgttggggtgggagacagcaaaaaacacatgtaaatcaccttgtctgagagggttataaatttgggctgcccaggacatctgtccaagggtgggtgcatctcagagtaattgaggtaagcatggagaccttgtgccctgccacactccccagctgggggacattctgacatttgtgcctcggcccccagccattgtaccccctttggtgtgtagtgtggggtgactcatttgtgtcttgtggcacagggatagagctgaccctgcagatccagagcgacactggtgtcagagccaccctgaaagagttcaaggagagactggcaggggataagtaccaggcggccgtgcaggctctccgggaggaggttgagagcttcgcctctctcttccctctgcctggcctgcctgacttctaaaggagcgggcccactctggacccacctggcgccacagaggaagctgcctgccggaggacccccacctgagagatggatgagctgctccaaaggggaactgttgacactcgggccctttgagggggtttcttttggacttttttcatgttttcttcacaaatcaaaatttgtttaagtctcattgttagtaattctgggacaggttattaaaggatttaaatttgaacctggctttctcacagctggacataattctaggaaaataaaatactatgtcgccacttggtcataatcatttagatggtggtgtagggcaaagctgttagaaagattgtagcgttttactctccctgggctttcctccgccttgctgcaacagagaggaaatgcccatgtccacagcttgtacacactgccccctcactatcttgttatccagtggcatgccaaaggagaactgaattagcttctgaggcttctgctgtaaatcagaagtgtatgttagtcaagagtaaacaagatgcacccagtatggtgggagggttttgctgtcagtagctcaaagtatggtgtagaaatggcctcctccctccatcctgggaagtcccagtcccatcctggtgtgagaatcaaccaggctttcctgctccacctgagataaccaactccctcccgtaatcaggaagccaaatgtcaccttcccaaagaaattttattttcacgtagctgaagtgcaaaacatagatgaccatttttaataagcacaatcaaatttttaaccacagaatgtctacaagaattatagctttaaaaaatacaaccaatttttatatttcaaaaatatttgaactcaaataaattaatttcttaaaaagta

SEQ ID NO: 428287 - DNA, 1264 bp, Homo sapiens
gcgctctgcggcccagtggactgcggctggggaccccagcactgacgtcccgtggacttttggaaaaagacttccaaaaagtagcccactttattcacagagggaggtccccacaaccacgccattgctggggttgctgtggcactgaagcaagctatgactctggaatttaaagtttatcaacaccaggtggtggccaactgcagggctctgtctgaggccctgacggagctgggctacaaaatagtcacaggtgtcagagccaccctgaaagagttcaaggagagactggcaggggataagtaccaggcggccgtgcaggctctccgggaggaggttgagagcttcgcctctctcttccctctgcctggcctgcctgacttctaaaggagcgggcccactctggacccacctggcgccacagaggaagctgcctgccggaggacccccacctgagagatggatgagctgctccaaaggggaactgttgacactcgggccctttgagggggtttcttttggacttttttcatgttttcttcacaaatcaaaatttgtttaagtctcattgttagtaattctgggacaggttattaaaggatttaaatttgaacctggctttctcacagctggacataattctaggaaaataaaatactatgtcgccacttggtcataatcatttagatggtggtgtagggcaaagctgttagaaagattgtagcgttttactctccctgggctttcctccgccttgctgcaacagagaggaaatgcccatgtccacagcttgtacacactgccccctcactatcttgttatccagtggcatgccaaaggagaactgaattagcttctgaggcttctgctgtaaatcagaagtgtatgttagtcaagagtaaacaagatgcacccagtatggtgggagggttttgctgtcagtagctcaaagtatggtgtagaaatggcctcctccctccatcctgggaagtcccagtcccatcctggtgtgagaatcaaccaggctttcctgctccacctgagataaccaactccctcccgtaatcaggaagccaaatgtcaccttcccaaagaaattttattttcacgtagctgaagtgcaaaacatagatgaccatttttaataagcacaatcaaatttttaaccacagaatgtctacaagaattatagctttaaaaaatacaaccaatttttatatttcaaaaatatttgaactcaaataaattaatttcttaaaaagta

SEQ ID NO: 428288 - DNA, 2411 bp, Homo sapiens
  misc_feature (74)..(74): n is a, c, g, or t
  misc_feature (77)..(77): n is a, c, g, or t
  misc_feature (80)..(80): n is a, c, g, or t
taggtttggggttggagcggctggtcacgtggctggcccgcggcggtgcgcggcgttgggtcagcgggtctggnacnggnggcaccggcggcggcgtaggacggaggcgtcgctaggcagcttcgaaccagtgcaatgacgatgccagtcaacggggcccacaaggatgctgacctgtggtcctcacatgacaagatgctggcacaacccctcaaagacagtgatgttgaggtttacaacatcattaagaaggagagtaaccggcagagggttggattggagctgattgcctcggagaatttcgccagccgagcagttttggaggccctaggctcttgcttaaataacaaatactctgaggggtacccgggccagagatactatggcgggactgagtttattgatgaactggagaccctctgtcagaagcgagccctgcaggcctataagctggacccacagtgctggggggtcaacgtccagccctactcaggctcccctgcaaactttgctgtgtacactgccctggtggaaccccatgggcgcatcatgggcctggaccttccggatgggggccacctgacccatgggttcatgacagacaagaagaaaatctctgccacgtccatcttctttgaatctatgccctacaaggtgaacccagatactggctacatcaactatgaccagctggaggagaacgcacgcctcttccacccgaagctgatcatcgcaggaaccagctgctactcccgaaacctggaatatgcccggctacggaagattgcagatgagaacggggcgtatctcatggcggacatggctcacatcagcgggctggtggcggctggcgtggtgccctccccatttgaacactgccatgtggtgaccaccaccactcacaagaccctgcgaggctgccgagctggcatgatcttctacaggaaaggagtgaaaagtgtggatcccaagactggcaaagagattctgtacaacctggagtctcttatcaattctgctgtgttccctggcctgcagggaggtccccacaaccacgccattgctggggttgctgtggcactgaagcaagctatgactctggaatttaaagtttatcaacaccaggtggtggccaactgcagggctctgtctgaggccctgacggagctgggctacaaaatagtcacaggtggttctgacaaccatttgatccttgtggatctccgttccaaaggcacagatggtggaagggctgagaaggtgctagaagcctgttctattgcctgcaacaagaacacctgtccaggtgacagaagcgctctgcggcccagtggactgcggctggggaccccagcactgacgtcccgtggacttttggaaaaagacttccaaaaagtagcccactttattcacagagggatagagctgaccctgcagatccagagcgacactggtgtcagagccaccctgaaagagttcaaggagagactggcaggggataagtaccaggcggccgtgcaggctctccgggaggaggttgagagcttcgcctctctcttccctctgcctggcctgcctgacttctaaaggagcgggcccactctggacccacctggcgccacagaggaagctgcctgccggaggacccccacctgagagatggatgagctgctccaaaggggaactgttgacactcgggccctttgagggggtttcttttggacttttttcatgttttcttcacaaatcaaaattttgaacctggctttctcacagctggacataattctaggaaaataaaatactatgtcgccacttggtcataatcatttagatggtggtgtagggcaaagctgttagaaagattgtagcgttttactctccctgggctttcctccgccttgctgcaacagagaggaaatgcccatgtccacagcttgtacacactgccccctcactatcttgttatccagtggcatgccaaaggagaactgaattagcttctgaggcttctgctgtaaatcagaagtgtatgttagtcaagagtaaacaagatgcacccagtatggtgggagggttttgctgtcagtagctcaaagtatggtgtagaaatggcctcctccctccatcctgggaagtcccagtcccatcctggtgtgagaatcaaccaggctttcctgctccacctgagataaccaactccctcccgtaatcaggaagccaaatgtcaccttcccaaagaaattttattttcacgtagctgaagtgcaaaacatagatgaccatttttaataagcacaatcaaatttttaaccacagaatgtctacaagaattatagctttaaaaaatacaaccaatttttatatttcaaaaatatttgaactcaaataaattaatttcttaaaaagta

SEQ ID NO: 428289 - DNA, 760 bp, Homo sapiens
agagaactagtctcgagtttttttttcatgttttcttcacaaatcaaaatttgtttaagtctcattgttagtaattctgggacaggttattaaaggatttaaatttgaacctggctttctcacagctggacataattctaggaaaataaaatactatgtcgccacttggtcataatcatttagatggtggtgtagggcaaagctgttagaaagattgtagcgttttactctccctgggctttcctccgccttgctgcaacagagaggaaatgcccatgtccacagcttgtacacactgccccctcactatcttgttatccagtggcatgccaaaggagaactgaattagcttctgaggcttctgctgtaaatcagaagtgtatgttagtcaagagtaaacaagatgcacccagtatggtgggagggttttgctgtcagtagctcaaagtatggtgtagaaatggcctcctccctccatcctgggaagtcccagtcccatcctggtgtgagaatcaaccaggctttcctgctccacctgagataaccaactccctcccgtaatcaggaagccaaatgtcaccttcccaaagaaattttattttcacgtagctgaagtgcaaaacatagatgaccatttttaataagcacaatcaaatttttaaccacagaatgtctacaagaattatagctttaaaaaatacaaccaatttttatatttcaaaaatatttgaactcaaataaattaatttcttaaaaagta

SEQ ID NO: 428290 - DNA, 706 bp, Homo sapiens
agagaactagtctcgagtttttttttcatgttttcttcacaaatcaaaatttgtttaagtctcattgttagtaattctgggacaggttattaaaggatttaaatttgaacctggctttctcacagctggacataattctaggaaaatactgttagaaagattgtagcgttttactctccctgggctttcctccgccttgctgcaacagagaggaaatgcccatgtccacagcttgtacacactgccccctcactatcttgttatccagtggcatgccaaaggagaactgaattagcttctgaggcttctgctgtaaatcagaagtgtatgttagtcaagagtaaacaagatgcacccagtatggtgggagggttttgctgtcagtagctcaaagtatggtgtagaaatggcctcctccctccatcctgggaagtcccagtcccatcctggtgtgagaatcaaccaggctttcctgctccacctgagataaccaactccctcccgtaatcaggaagccaaatgtcaccttcccaaagaaattttattttcacgtagctgaagtgcaaaacatagatgaccatttttaataagcacaatcaaatttttaaccacagaatgtctacaagaattatagctttaaaaaatacaaccaatttttatatttcaaaaatatttgaactcaaataaattaatttcttaaaaagta

SEQ ID NO: 428291 - DNA, 2651 bp, Homo sapiens
  misc_feature (1)..(1): n is a, c, g, or t
  misc_feature (157)..(157): n is a, c, g, or t
  misc_feature (201)..(201): n is a, c, g, or t
  misc_feature (520)..(520): n is a, c, g, or t
nttttttttcagatggagtctcgctctgttgcccaggctggagtgctggagtgcagtggcacaatctcggctcactgcaagctccacctcccgggttcacgccattctcctgcctcagcctcccaagtagctgggattacaggcgcccgccaccatntctggctaattttttgcatttttagtagagacggggtttcaccntgttagccaggatggtctcgatctcctgacctcatgatctgcccgtctcagcctcccaaagtgctgggattacaggtgtgagccaccgcgcccagcccctacttcttgtttttcaatgttgtatccagtgaccttgctaaatttgcttattctaacagttggcccctagcatcttgattttctaggtatattgtgttgtctgtgtgtaatgtcagtttttaaatttcttctttcctaatcgttatgccttttgtttctttttcttgcctcattatacttggaatagaagtagtattagcaggcattttggtcttgttcntgaaggtaaccattttggtttccattgtgtggtcccgtcacatttgtttcattctgcaggtgctttttggttccttctcagcaggtagtgccccagcagcagggctcactacaaccctggactcctcaggactcctgggtctgtgagccatacttggttgagcaggctgaacacaccagtatccatcctgtctcaccctcaagtcctcatctaggacatcattcctcttgtcatggtgggtggagccagttcaagtgggaggacaggaggcaggtgtggttggaggaagcagcctgaacctgcctccctgacattccacaggtgaacccagatactggctacatcaactatgaccagctggaggagaacgcacgcctcttccacccgaagctgatcatcgcaggaaccagctgctactcccgaaacctggaatatgcccggctacggaagattgcagatgagaacggggcgtatctcatggcggacatggctcacatcagcgggctggtggcggctggcgtggtgccctccccatttgaacactgccatgtggtgaccaccaccactcacaagaccctgcgaggctgccgagctggcatgatcttctacaggaaaggagtgaaaagtgtggatcccaagactggcaaagagattctgtacaacctggagtctcttatcaattctgctgtgttccctggcctgcagggaggtccccacaaccacgccattgctggggttgctgtggcactgaagcaagctatgactctggaatttaaagtttatcaacaccaggtggtggccaactgcagggctctgtctgaggccctgacggagctgggctacaaaatagtcacaggtggttctgacaaccatttgatccttgtggatctccgttccaaaggcacagatggtggaagggctgagaaggtgctagaagcctgttctattgcctgcaacaagaacacctgtccaggtgacagaagcgctctgcggcccagtggactgcggctggggaccccagcactgacgtcccgtggacttttggaaaaagacttccaaaaagtagcccactttattcacagagggatagagctgaccctgcagatccagagcgacactggtgtcagagccaccctgaaagagttcaaggagagactggcaggggataagtaccaggcggccgtgcaggctctccgggaggaggttgagagcttcgcctctctcttccctctgcctggcctgcctgacttctaaaggagcgggcccactctggacccacctggcgccacagaggaagctgcctgccggaggacccccacctgagagatggatgagctgctccaaaggggaactgttgacactcgggccctttgagggggtttcttttggacttttttcatgttttcttcacaaatcaaaatttgtttaagtctcattgttagtaattctgggacaggttattaaaggatttaaatttgaacctggctttctcacagctggacataattctaggaaaataaaatactatgtcgccacttggtcataatcatttagatggtggtgtagggcaaagctgttagaaagattgtagcgttttactctccctgggctttcctccgccttgctgcaacagagaggaaatgcccatgtccacagcttgtacacactgccccctcactatcttgttatccagtggcatgccaaaggagaactgaattagcttctgaggcttctgctgtaaatcagaagtgtatgttagtcaagagtaaacaagatgcacccagtatggtgggagggttttgctgtcagtagctcaaagtatggtgtagaaatggcctcctccctccatcctgggaagtcccagtcccatcctggtgtgagaatcaaccaggctttcctgctccacctgagataaccaactccctcccgtaatcaggaagccaaatgtcaccttcccaaagaaattttattttcacgtagctgaagtgcaaaacatagatgaccatttttaataagcacaatcaaatttttaaccacagaatgtctacaagaattatagctttaaaaaatacaaccaatttttatatttcaaaaatatttgaactcaaataaattaatttcttaaaaagta

SEQ ID NO: 428292 - DNA, 5014 bp, Homo sapiens
  misc_feature (74)..(74): n is a, c, g, or t
  misc_feature (77)..(77): n is a, c, g, or t
  misc_feature (80)..(80): n is a, c, g, or t
taggtttggggttggagcggctggtcacgtggctggcccgcggcggtgcgcggcgttgggtcagcgggtctggnacnggnggcaccggcggcggcgtaggacggaggcgtcgctaggcagcttcgaaccagtgcaatgacgatgccagtcaacggggcccacaaggatgctgacctgtggtcctcacatgacaagatgctggcacaacccctcaaagacagtgatgttgaggtttacaacatcattaagaaggagagtaaccggcagagggttggattggagctgattgcctcggagaatttcgccagccgagcagttttggaggccctaggctcttgcttaaataacaaatactctgaggggtacccgggccagagatactatggcgggactgagtttattgatgaactggagaccctctgtcagaagcgagccctgcaggcctataagctggacccacagtgctggggggtcaacgtccagccctactcaggctcccctgcaaactttgctgtgtacactgccctggtggaaccccatgggcgcatcatgggcctggaccttccggatgggggccacctgacccatgggttcatgacagacaagaagaaaatctctgccacgtccatcttctttgaatctatgccctacaaggtgaacccagatactggctacatcaactatgaccagctggaggagaacgcacgcctcttccacccgaagctgatcatcgcaggaaccagctgctactcccgaaacctggaatatgcccggctacggaagattgcagatgagaacggggcgtatctcatggcggacatggctcacatcagcgggctggtggcggctggcgtggtgccctccccatttgaacactgccatgtggtgaccaccaccactcacaagaccctgcgaggctgccgagctggcatgatcttctacaggaaaggagtgaaaagtgtggatcccaagactggcaaagagattctgtacaacctggagtctcttatcaattctgctgtgttccctggcctgcagggaggtccccacaaccacgccattgctggggttgctgtggcactgaagcaagctatgactctggaatttaaagtttatcaacaccaggtggtggccaactgcagggctctgtctgaggccctgacggagctgggctacaaaatagtcacaggtggttctgacaaccatttgatccttgtggatctccgttccaaaggcacagatggtggaagggctgagaaggtgctagaagcctgttctattgcctgcaacaagaacacctgtccaggtgacagaagcgctctgcggcccagtggactgcggctggggaccccagcactgacgtcccgtggacttttggaaaaagacttccaaaaagtagcccactttattcacagagggatagagctgaccctgcagatccagagcgacactggtgtcagagccaccctgaaagagttcaaggagagactggcaggggataagtaccaggcggccgtgcaggctctccgggaggaggttgagagcttcgcctctctcttccctctgcctggcctgcctgacttctaaaggagcgggcccactctggacccacctggcgccacagaggaagctgcctgccggaggacccccacctgagagatggatgagctgctccaaaggggaactgttgacactcgggccctttgagggggtttcttttggacttttttcatgttttcttcacaaatcaaaatttgtttaagtctcattgttagtaattctgggacaggttattaaaggatttaaatttgaacctggctttctcacagctggacataattctaggaaaataaaatactatgtcgccacttggtcataatcatttagatggtggtgtagggcaaagctgttagaaagattgtagcgttttactctccctgggctttcctccgccttgctgcaacagagaggaaatgcccatgtccacagcttgtacacactgccccctcactatcttgttatccagtggcatgccaaaggagaactgaattagcttctgaggcttctgctgtaaatcagaagtgtatgttagtcaagagtaaacaagatgcacccagtatggtgggagggttttgctgtcagtagctcaaagtatggtgtagaaatggcctcctccctccatcctgggaagtcccagtcccatcctggtgtgagaatcaaccaggctttcctgctccacctgagataaccaactccctcccgtaatcaggaagccaaatgtcaccttcccaaagaaattttattttcacgtagctgaagtgcaaaacatagatgaccatttttaataagcacaatcaaatttttaaccacagaatgtctacaagaattatagctttaaaaaatacaaccaatttttatatttcaaaaatatttgaactcaaataaattaatttcttaaaaagtacacttctcatactatgtgtttggcattgactctggttaactcttgtgcagcaacacctacgagatgctatcacacacgcgccagctgcactcctgcaccagccgctgcaacgactgcacctcacgtggtggcggggactcacattcacaagacgggacgggaacatgcagtaataaaatagctttttaaaaaataacacatataaattcatcacataggattatgcttttcactgcaaccttgaaggtggcatttatctcaatctgtgactccagctatttagtggcagacaatcccggtgaggcagcctgtggtcccaccttgtaggtggcagcccctgcaatctggggtctacctgtcggcgtttgctttattgtgggtggagcagctgctgcagaatctgtgagttgactcaccagtccctacagttctgctaccaaagtggtcttcaatttaggggcctgacccctccccagctggagacaagctgccatctccagggctcgctgtaaacagcctccactcttgggctgaataagcactcccaagaagctgggcccctaccaacagattaatcggctgcagagtgctcatcccctccccacacccccatccacccctgcctcctcctcctttccactgctttaaccaaaccttaatgaggtaaggccaggctaggtcagggctcaaaggaaaatgggctcaggaaaacttagtttgcccagccttgtcagctgagattggttttgctttccagccagaagtagaaacttgatgctttttcctttttgcagtgttaaaaaccatatctccagttttattatgttccatcacagttttggggcaaagccagaaagctgacttgtttgcttcaaaacacaaaccaaggcactgtcttctgtgcttttcagggaggtgggaaggtaaaggagactgcccactataggggctcagttcccccaaaggccttgcacaccttctgataaaccccctggctgaggcaatcctactggctgtgcagacaaagatgtgacagcagcactagatgctgacccaacaagcagtgctgggcctgggcggtggggcatgttcagcactgcgggcagcagtcagcacatgcaagacattcagtgagcagagggctgccctcggcctccaactgcagccgccctggcgcgtgaaatgaaattggtgggccttcctaggattgtaaaatgggacttgtcatttgtgtgaggttgaaatctactatactttgaatatggcaactgttttcaaccactgaagcaaagaaggtaaaggccagatggggaatgaaaggtaaggtactgtggtctatttccaaatttgggagcaatgtgtgtaacttcaactgttggagtaaatgagttatggaaaagccacaatttctaaaatcccaaggttctaccaaaggagtgaggttcctggggaaacaggcatgaggcagcagctcaggctgatgtgtcctgtgcgatataaaaagctgtggcctgatctctaaagtggggcttttgaaaatcaccagtccacaactacctgcctggctagtttaacctagactgcttcagaagcaagggagggggataatggactggagaaaaagctgacacaaaactcaagacaaccagtttcagtacctgggccctcaaagcaatagtgaggactgagaaagtagcaaggggcactgatgtcatctattttctgggaagtgtaatttttaatggtttcattaaaaacttactaaccttctactggaagaatacctcaaatgaaaaattttttttttttgagacagttttcgctcttgttgcccagggtggagtgcagtggcgcgatctcggctcactgtaacctctgcctcctgggttcaagtgattctcctgcctcagcctcccgagtaagtgggattacaggcacgcaccaccagacctggctaactttctttgtatttttagtagagatggggtttcaccatgttggccaggctggtctccaactcctgacctcaggtgatccgcccacctcggcctcccaaagtgttgggattacaggcgtgagccactgcgcccggcctcaactgaaaattcttgatgagattagtcccactgcataggtctcagcactgaggtttagagatgtgagactcagagtaggtttcagttccccggagtgaagggggcatagggaggggcagggcttcccagtgttaactgcctctgcccaaatcatgactcagtcctggtaccacgtcaagatccctttgaaaggaaacatactttgcatcaagtaatcctttgaaactgccacattgaaaagttagtttttaacccaaatataaatctgggagctaaacactagtcacgaagccatctttacttaatgaagaaccaccttgagggagaccagccctgcttgccacttacatggctgcccctgagacggtctgttctgttcatgccccagcagccttttgccttaggttcgttttcttaccccaaatgttccttgctgctttgcacatgcaccact

SEQ ID NO: 428293 - DNA, 2726 bp, Homo sapiens
  misc_feature (74)..(74): n is a, c, g, or t
  misc_feature (77)..(77): n is a, c, g, or t
  misc_feature (80)..(80): n is a, c, g, or t
taggtttggggttggagcggctggtcacgtggctggcccgcggcggtgcgcggcgttgggtcagcgggtctggnacnggnggcaccggcggcggcgtaggacggaggcgtcgctaggcagcttcgaaccagtgcaatgacgatgccagtcaacggggcccacaaggatgctgacctgtggtcctcacatgacaagatgctggcacaacccctcaaagacagtgatgttgaggtttacaacatcattaagaaggagagtaaccggcagagggttggattggagctgattgcctcggagaatttcgccagccgagcagttttggaggccctaggctcttgcttaaataacaaatactctgaggggtacccgggccagagatactatggcgggactgagtttattgatgaactggagaccctctgtcagaagcgagccctgcaggcctataagctggacccacagtgctggggggtcaacgtccagccctactcaggctcccctgcaaactttgctgtgtacactgccctggtggaaccccatgggcgcatcatgggcctggaccttccggatgggggccacctgacccatgggttcatgacagacaagaagaaaatctctgccacgtccatcttctttgaatctatgccctacaaggtgaacccagatactggctacatcaactatgaccagctggaggagaacgcacgcctcttccacccgaagctgatcatcgcaggaaccagctgctactcccgaaacctggaatatgcccggctacggaagattgcagatgagaacggggcgtatctcatggcggacatggctcacatcagcgggctggtggcggctggcgtggtgccctccccatttgaacactgccatgtggtgaccaccaccactcacaagaccctgcgaggctgccgagctggcatgatcttctacaggaaaggagtgaaaagtgtggatcccaagactggcaaagagattctgtacaacctggagtctcttatcaattctgctgtgttccctggcctgcagggaggtccccacaaccacgccattgctggggttgctgtggcactgaagcaagctatgactctggaatttaaagtttatcaacaccaggtggtggccaactgcagggctctgtctgaggccctgacggagctgggctacaaaatagtcacaggtggttctgacaaccatttgatccttgtggatctccgttccaaaggcacagatggtggaagggctgagaaggtgctagaagcctgttctattgcctgcaacaagaacacctgtccaggtgacagaagcgctctgcggcccagtggactgcggctggggaccccagcactgacgtcccgtggacttttggaaaaagacttccaaaaagtagcccactttattcacagagggatagagctgaccctgcagatccagagcgacactggtgtcagagccaccctgaaagagttcaaggagagactggcaggggataagtaccaggcggccgtgcaggctctccgggaggaggttgagagcttcgcctctctcttccctctgcctggcctgcctgacttctaaaggagcgggcccactctggacccacctggcgccacagaggaagctgcctgccggaggacccccacctgagagatggatgagctgctccaaaggggaactgttgacactcgggccctttgagggggtttcttttggacttttttcatgttttcttcacaaatcaaaatttgtttaagtctcattgttagtaattctgggacaggttattaaaggatttaaatttgaacctggctttctcacagctggacataattctaggaaaataaaatactatgtcgccacttggtcataatcatttagatggtggtgtagggcaaagctgttagaaagattgtagcgttttactctccctgggctttcctccgccttgctgcaacagagaggaaatgcccatgtccacagcttgtacacactgccccctcactatcttgttatccagtggcatgccaaaggagaactgaattagcttctgaggcttctgctgtaaatcagaagtgtatgttagtcaagagtaaacaagatgcacccagtatggtgggagggttttgctgtcagtagctcaaagtatggtgtagaaatggcctcctccctccatcctgggaagtcccagtcccatcctggtgtgagaatcaaccaggctttcctgctccacctgagataaccaactccctcccgtaatcaggaagccaaatgtcaccttcccaaagaaattttattttcacgtagctgaagtgcaaaacatagatgaccatttttaataagcacaatcaaatttttaaccacagaatgtctacaagaattatagctttaaaaaatacaaccaatttttatatttcaaaaatatttgaactcaaataaattaatttcttaaaaagtacacttctcatactatgtgtttggcattgactctggttaactcttgtgcagcaacacctacgagatgctatcacacacgcgccagctgcactcctgcaccagccgctgcaacgactgcacctcacgtggtggcggggactcacattcacaagacgggacgggaacatgcagtaataaaatagctttttaaaaaatacaaccaatttttatatttcaaaaatatttgaactcaaataaattaatttcttaaaaagtacacttct

SEQ ID NO: 428294 - DNA, 2402 bp, Homo sapiens
  misc_feature (74)..(74): n is a, c, g, or t
  misc_feature (77)..(77): n is a, c, g, or t
  misc_feature (80)..(80): n is a, c, g, or t
taggtttggggttggagcggctggtcacgtggctggcccgcggcggtgcgcggcgttgggtcagcgggtctggnacnggnggcaccggcggcggcgtaggacggaggcgtcgctaggcagcttcgaaccagtgcaatgacgatgccagtcaacggggcccacaaggatgctgacctgtggtcctcacatgacaagatgctggcacaacccctcaaagacagtgatgttgaggtttacaacatcattaagaaggagagtaaccggcagagggttggattggagctgattgcctcggagaatttcgccagccgagcagttttggaggccctaggctcttgcttaaataacaaatactctgaggggtacccgggccagagatactatggcgggactgagtttattgatgaactggagaccctctgtcagaagcgagccctgcaggcctataagctggacccacagtgctggggggtcaacgtccagccctactcaggctcccctgcaaactttgctgtgtacactgccctggtggaaccccatgggcgcatcatgggcctggaccttccggatgggggccacctgacccatgggttcatgacagacaagaagaaaatctctgccacgtccatcttctttgaatctatgccctacaaggtgaacccagatactggctacatcaactatgaccagctggaggagaacgcacgcctcttccacccgaagctgatcatcgcaggaaccagctgctactcccgaaacctggaatatgcccggctacggaagattgcagatgagaacggggcgtatctcatggcggacatggctcacatcagcgggctggtggcggctggcgtggtgccctccccatttgaacactgccatgtggtgaccaccaccactcacaagaccctgcgaggctgccgagctggcatgatcttctacaggaaaggagtgaaaagtgtggatcccaagactggcaaagagattctgtacaacctggagtctcttatcaattctgctgtgttccctggcctgcagggaggtccccacaaccacgccattgctggggttgctgtggcactgaagcaagctatgactctggaatttaaagtttatcaacaccaggtggtggccaactgcagggctctgtctgaggccctgacggagctgggctacaaaatagtcacaggtggttctgacaaccatttgatccttgtggatctccgttccaaaggcacagatggtggaagggctgagaaggtgctagaagcctgttctattgcctgcaacaagaacacctgtccaggtgacagaagcgctctgcggcccagtggactgcggctggggaccccagcactgacgtcccgtggacttttggaaaaagacttccagtgtcagagccaccctgaaagagttcaaggagagactggcaggggataagtaccaggcggccgtgcaggctctccgggaggaggttgagagcttcgcctctctcttccctctgcctggcctgcctgacttctaaaggagcgggcccactctggacccacctggcgccacagaggaagctgcctgccggaggacccccacctgagagatggatgagctgctccaaaggggaactgttgacactcgggccctttgagggggtttcttttggacttttttcatgttttcttcacaaatcaaaatttgtttaagtctcattgttagtaattctgggacaggttattaaaggatttaaatttgaacctggctttctcacagctggacataattctaggaaaataaaatactatgtcgccacttggtcataatcatttagatggtggtgtagggcaaagctgttagaaagattgtagcgttttactctccctgggctttcctccgccttgctgcaacagagaggaaatgcccatgtccacagcttgtacacactgccccctcactatcttgttatccagtggcatgccaaaggagaactgaattagcttctgaggcttctgctgtaaatcagaagtgtatgttagtcaagagtaaacaagatgcacccagtatggtgggagggttttgctgtcagtagctcaaagtatggtgtagaaatggcctcctccctccatcctgggaagtcccagtcccatcctggtgtgagaatcaaccaggctttcctgctccacctgagataaccaactccctcccgtaatcaggaagccaaatgtcaccttcccaaagaaattttattttcacgtagctgaagtgcaaaacatagatgaccatttttaataagcacaatcaaatttttaaccacagaatgtctacaagaattatagctttaaaaaatacaaccaatttttatatttcaaaaatatttgaactcaaataaattaatttcttaaaaagta

SEQ ID NO: 428295 - DNA, 2477 bp, Homo sapiens
  misc_feature (74)..(74): n is a, c, g, or t
  misc_feature (77)..(77): n is a, c, g, or t
  misc_feature (80)..(80): n is a, c, g, or t
taggtttggggttggagcggctggtcacgtggctggcccgcggcggtgcgcggcgttgggtcagcgggtctggnacnggnggcaccggcggcggcgtaggacggaggcgtcgctaggcagcttcgaaccagtgcaatgacgatgccagtcaacggggcccacaaggatgctgacctgtggtcctcacatgacaagatgctggcacaacccctcaaagacagtgatgttgaggtttacaacatcattaagaaggagagtaaccggcagagggttggattggagctgattgcctcggagaatttcgccagccgagcagttttggaggccctaggctcttgcttaaataacaaatactctgaggggtacccgggccagagatactatggcgggactgagtttattgatgaactggagaccctctgtcagaagcgagccctgcaggcctataagctggacccacagtgctggggggtcaacgtccagccctactcaggctcccctgcaaactttgctgtgtacactgccctggtggaaccccatgggcgcatcatgggcctggaccttccggatgggggccacctgacccatgggttcatgacagacaagaagaaaatctctgccacgtccatcttctttgaatctatgccctacaaggtgaacccagatactggctacatcaactatgaccagctggaggagaacgcacgcctcttccacccgaagctgatcatcgcaggaaccagctgctactcccgaaacctggaatatgcccggctacggaagattgcagatgagaacggggcgtatctcatggcggacatggctcacatcagcgggctggtggcggctggcgtggtgccctccccatttgaacactgccatgtggtgaccaccaccactcacaagaccctgcgaggctgccgagctggcatgatcttctacaggaaaggagtgaaaagtgtggatcccaagactggcaaagagattctgtacaacctggagtctcttatcaattctgctgtgttccctggcctgcagggaggtccccacaaccacgccattgctggggttgctgtggcactgaagcaagctatgactctggaatttaaagtttatcaacaccaggtggtggccaactgcagggctctgtctgaggccctgacggagctgggctacaaaatagtcacaggtggttctgacaaccatttgatccttgtggatctccgttccaaaggcacagatggtggaagggctgagaaggtgctagaagcctgttctattgcctgcaacaagaacacctgtccaggtgacagaagcgctctgcggcccagtggactgcggctggggaccccagcactgacgtcccgtggacttttggaaaaagacttccaaaaagtagcccactttattcacagagggatagagctgaccctgcagatccagagcgacactggtgtcagagccaccctgaaagagttcaaggagagactggcaggggataagtaccaggcggccgtgcaggctctccgggaggaggttgagagcttcgcctctctcttccctctgcctggcctgcctgacttctaaaggagcgggcccactctggacccacctggcgccacagaggaagctgcctgccggaggacccccacctgagagatggatgagctgctccaaaggggaactgttgacactcgggccctttgagggggtttcttttggacttttttcatgttttcttcacaaatcaaaatttgtttaagtctcattgttagtaattctgggacaggttattaaaggatttaaatttgaacctggctttctcacagctggacataattctaggaaaataaaatactatgtcgccacttggtcataatcatttagatggtggtgtagggcaaagctgttagaaagattgtagcgttttactctccctgggctttcctccgccttgctgcaacagagaggaaatgcccatgtccacagcttgtacacactgccccctcactatcttgttatccagtggcatgccaaaggagaactgaattagcttctgaggcttctgctgtaaatcagaagtgtatgttagtcaagagtaaacaagatgcacccagtatggtgggagggttttgctgtcagtagctcaaagtatggtgtagaaatggcctcctccctccatcctgggaagtcccagtcccatcctggtgtgagaatcaaccaggctttcctgctccacctgagataaccaactccctcccgtaatcaggaagcaatgtacttccaagaattatttcacgtactgaatggaacttgatgccttttattagccaccaatttacccgatgtcagatttgttaaatcaccctttttcacaattggcccatatttttaggaacaaaaggggggattcgggcatgcctttaggccaggagtaacgggcggagggggacgggccaacaattgtggttagtgtc

SEQ ID NO: 428296 - DNA, 348 bp, Homo sapiens
gcgtccggactagttctagcccacgcgtccgatttattatgaagaccagtgaattacgataattaagttctctcactttaaatatcgtaattcactggtcttcataataaataattataataatatataaaaggagacagtggcctgaattacgatatttaaagtgagagaacttaattatttgcaaaggtaagttacagcttgttttttgagagaatcaaatgagtttacttttgttcctgttgtttttaactagctttaagtttaaagatggaagctaagcaatggaaatgctatacgtttttgacatttattaaatggtaccaataaagtattttattaccaaaa

SEQ ID NO: 428297 - DNA, 3810 bp, Homo sapiens
gatcagtgcctccacttgatgctgagtatgtggggtggcaatgggcagttttcccccaacagaggagagatttatattccttaagacggggagaagagtcctaggcattcagagcacttggagtccactccatgcactatttgagcctttgttccatctctccattacccattctgtactgttgtaagtgtaatcctcctaaaatgttacttttttgattaggctgcaccctagtgcagtgagtgattctccagcttcagtgccagagtcaccaggaggacttgtgaaaatgtagaggcttctctccagccctagcatctgattcagtgggtctggctgtagtctgagagtttgcttctctaacatgttaacacaggaagctgatgctgtgggtttgggggcctcactgtgagaaccactgccctagcagaaaagtcctgctgattctctttgcctttaggatactgaccaatttctttaaccttgcatgggaggtactcttcactctgacccttctctcattgttcccattttaagattccgttgacccttatctcactgttcccattttagggtccttttctaccaatctgatttgtctgatcccttttctctaaaatgctttctacattcttacctctttgcctttgagaataattattttgaatgacctttacactcaccactgaattcaacattttaaccaaggcataactcacgttccacttctaacatcttctctaactactccagacatgagcgatgtatttttcagaactgctgttcattcattcattcagcaaatatttattgaactcctactctatcaggggacactgcatccatagtaatgaacaaaacaaaatccctgctcccacagagtgggagagacactggaacaaatatgtctagcaatatgaaggaaaacagctgaggaagaggatggagatgaaggagtgggaggtggcagctgcttctcaagtagtattagggaggatccctctgataaggcgacatgtgtgcaaagacctaacggatgcaagaggagagtgatctttgtgtgtgttatccatttagaatgcattattaacagacattacagctatttttccatttgtgtatttttcaactccccaaaaggtgtttaagattccaaaggtcagtggccactttaacacttttggagcctcataccaccaacatgtgcctcaaattgggcatttggtgaatatctctccctgatgataatcatacacatgaagctgggattttctttccctttgtgaatgtagaaccaatataatcaaatatttgaagtgtaaaacatattttgtaagctgtgttgaaggaagaaaattggtaactttaagtgggacttatcatttgttgtgtgtgctttcctcatagtgagtctaattttcacaattacaccttggtctcattgaatgaagaatttaatcgtggacgaggactaaatgtgggtgcccgagcttgggacaagggagaggtcttgatgtttttctgtgatgttgatatctatttctcagccgaattccttaacagctgccggttaaatgctgagccaggtaagaaggtgttttaccctgtggtgttcagtctttacaatcctgccattgtttatgccaaccaggaagtgccaccacctgtggagcagcagctggttcacaaaaaggattctggcttttggcgagattttggctttggaatgacttgtcagtatcgttcagatttcctgaccattggtggatttgacatggaagtgaaaggttggggtggagaagatgttcatctttatcgaaaatacttacatggtgacctcattgtgattcggactccggttcctggtcttttccacctctggcatgaaaagcgctgtgctgatgagctgacccccgagcagtaccgcatgtgcatccagtctaaagccatgaatgaggcctctcactcccacctgggaatgctggtcttcagggaggaaatagagacgcatcttcataaacaggcatacaggacaaacagtgaagctgttggttgaaatcataattaatgcgttactgtatgaaccacaaaacagcactatttatttagccttacttctacttccagatgcagtgcctcttttggagaagacatgtttatttttcatgttctttctgacattactttagcaattcaacttgatgtgagaagaaaaaacaaatgtttcaacacaaaatctctgttttgtgagaatactgcactatggaataattgacaaattgaaatctcatatttgtcccaaaagttgttttgagttagttctacctggtgcccatgttctgattgtgtgtgggattgcatggtgtcctgattgcatctaggtggagcggatggaatgtgctgggccactgttgggtggagagcagcacattcttacagaggagatggagcgttatgagcatagtatgtggataggtatcttcacctgcccgcccctgagtcagcctccttgacttgatagcttgaagaatccttttccactgaaatagaggataattaattgacacatctgaaatccccaatcaatcaatcaagagaaaggtagaactaaaaactccttaacttactgttgcttacacccctgaaagtctgtttttaagcaaatgggtaatagtagaaaataggttagaatctatggcttgattaaaaatatgttattacattatcatgttcaggattaggattagtagtcagttgctgtaaactattttgaacaaacagaaaagaacacggaaacatttttaacagagcatttaattatgttggaatacaggatcctagctctgtctgggaacattagcttatgtgagccagctctatcagggtcttcccatggtggttcagaatagatgagcatagcatggttttgtttgtttttgctttcaattttctaatttggcatggatccatatgtatttactatcctttttctaatatattaatatatgctacatttgtatttgcattactataatactttgagttgaaaaagagtttcattgtggagagaaaaagcaaatggtatgccacaagatcactctgatttgagaaaagggaggaggggaagatagtctgaatggaaatctgaaatacggaatgttttagagaaatatgtcacttgcatatagaatgttttaattgaggtataaattaatgagacaaagtgaaaaagaaattatattcagataggactgcactacattatttgtcacacatggatctgttaccatcaggtcaattcctagtatgcataaattttttaacccttttaaaagagacctatgttgaaaacccctgaaaattcactgaagaaaaatcattactctttttctcagtaaatcatatcatctgaaatattacaaatttcaaatttctaggtgctatattaattcaatattacaataactcttacctaattattcttacaagttttaagttgtggtagtttagtgatttttttaaaagatgtgtgaaatgttctctgcaaaataattcaggccactgtctccttttatatattattataattatttattatgaagaccagtgaattacgatatttaaagtgagagaacttaattatttgcaaaggtaagttacagcttgttttttgagagaatcaaatgagtttacttttgttcctgttgtttttaactagctttaagtttaaagatggaagctaagcaatggaaatgctatacgtttttgacatttattaaatggtaccaataaagtattttattaccaaaa

SEQ ID NO: 428298 - DNA, 2809 bp, Homo sapiens
aaccagttgagtttatttccttgaatagcttgtgatttgcttctgaaagcaatccaaaagcaaaagttcaaaaaatgttttgaaataatggcagcaatgtcagactgcttccatggccctccaaggggtgcactcattcaggcatagaccttgtgccttccataattcatcagtattgccacatttatgtttactactgtgtcagtaatgcctcattttcttgttaaagcttcatgtggttgctttcttaatgaatagtgcctcatgttttcttgaataaacttttatttttcacttctgttagggatgtttgtattcatcaagacaagaagattcatctcacagtggtgtattttggtaaagaaggactgtctaaagtcaagtctatcctagaatctgtcaccagtgagtctaattttcacaattacaccttggtctcattgaatgaagaatttaatcgtggacgaggactaaatgtgggtgcccgagcttgggacaagggagaggtcttgatgtttttctgtgatgttgatatctatttctcagccgaattccttaacagctgccggttaaatgctgagccaggtaagaaggtgttttaccctgtggtgttcagtctttacaatcctgccattgtttatgccaaccaggaagtgccaccacctgtggagcagcagctggttcacaaaaaggattctggcttttggcgagattttggctttggaatgacttgtcagtatcgttcagatttcctgaccattggtggatttgacatggaagtgaaaggttggggtggagaagatgttcatctttatcgaaaatacttacatggtgacctcattgtgattcggactccggttcctggtcttttccacctctggcatgaaaagcgctgtgctgatgagctgacccccgagcagtaccgcatgtgcatccagtctaaagccatgaatgaggcctctcactcccacctgggaatgctggtcttcagggaggaaatagagacgcatcttcataaacaggcatacaggacaaacagtgaagctgttggttgaaatcataattaatgcgttactgtatgaaccacaaaacagcactatttatttagccttacttctacttccagatgcagtgcctcttttggagaagacatgtttatttttcatgttctttctgacattactttagcaattcaacttgatgtgagaagaaaaaacaaatgtttcaacacaaaatctctgttttgtgagaatactgcactatggaataattgacaaattgaaatctcatatttgtcccaaaagttgttttgagttagttctacctggtgcccatgttctgattgtgtgtgggattgcatggtgtcctgattgcatctaggtggagcggatggaatgtgctgggccactgttgggtggagagcagcacattcttacagaggagatggagcgttatgagcatagtatgtggataggtatcttcacctgcccgcccctgagtcagcctccttgacttgatagcttgaagaatccttttccactgaaatagaggataattaattgacacatctgaaatccccaatcaatcaatcaagagaaaggtagaactaaaaactccttaacttactgttgcttacacccctgaaagtctgtttttaagcaaatgggtaatagtagaaaataggttagaatctatggcttgattaaaaatatgttattacattatcatgttcaggattaggattagtagtcagttgctgtaaactattttgaacaaacagaaaagaacacggaaacatttttaacagagcatttaattatgttggaatacaggatcctagctctgtctgggaacattagcttatgtgagccagctctatcagggtcttcccatggtggttcagaatagatgagcatagcatggttttgtttgtttttgctttcaattttctaatttggcatggatccatatgtatttactatcctttttctaatatattaatatatgctacatttgtatttgcattactataatactttgagttgaaaaagagtttcattgtggagagaaaaagcaaatggtatgccacaagatcactctgatttgagaaaagggaggaggggaagatagtctgaatggaaatctgaaatacggaatgttttagagaaatatgtcacttgcatatagaatgttttaattgaggtataaattaatgagacaaagtgaaaaagaaattatattcagataggactgcactacattatttgtcacacatggatctgttaccatcaggtcaattcctagtatgcataaattttttaacccttttaaaagagacctatgttgaaaacccctgaaaattcactgaagaaaaatcattactctttttctcagtaaatcatatcatctgaaatattacaaatttcaaatttctaggtgctatattaattcaatattacaataactcttacctaattattcttacaagttttaagttgtggtagtttagtgatttttttaaaagatgtgtgaaatgttctctgcaaaataattcaggccactgtctccttttatatattattataattatttattatgaagaccagtgaattacgatatttaaagtgagagaacttaattatttgcaaaggtaagttacagcttgttttttgagagaatcaaatgagtttacttttgttcctgttgtttttaactagctttaagtttaaagatggaagctaagcaatggaaatgctatacgtttttgacatttattaaatggtaccaataaagtattttattaccaaaa

SEQ ID NO: 428299 - DNA, 2165 bp, Homo sapiens
gaaagactctaaagatcttttctagatgtttgttgtgttcacaaaaaggattctggcttttggcgagattttggctttggaatgacttgtcagtatcgttcagatttcctgaccattggtggatttgacatggaagtgaaaggttggggtggagaagatgttcatctttatcgaaaatacttacatggtgacctcattgtgattcggactccggttcctggtcttttccacctctggcatgaaaagcgctgtgctgatgagctgacccccgagcagtaccgcatgtgcatccagtctaaagccatgaatgaggcctctcactcccacctgggaatgctggtcttcagggaggaaatagagacgcatcttcataaacaggcatacaggacaaacagtgaagctgttggttgaaatcataattaatgcgttactgtatgaaccacaaaacagcactatttatttagccttacttctacttccagatgcagtgcctcttttggagaagacatgtttatttttcatgttctttctgacattactttagcaattcaacttgatgtgagaagaaaaaacaaatgtttcaacacaaaatctctgttttgtgagaatactgcactatggaataattgacaaattgaaatctcatatttgtcccaaaagttgttttgagttagttctacctggtgcccatgttctgattgtgtgtgggattgcatggtgtcctgattgcatctaggtggagcggatggaatgtgctgggccactgttgggtggagagcagcacattcttacagaggagatggagcgttatgagcatagtatgtggataggtatcttcacctgcccgcccctgagtcagcctccttgacttgatagcttgaagaatccttttccactgaaatagaggataattaattgacacatctgaaatccccaatcaatcaatcaagagaaaggtagaactaaaaactccttaacttactgttgcttacacccctgaaagtctgtttttaagcaaatgggtaatagtagaaaataggttagaatctatggcttgattaaaaatatgttattacattatcatgttcaggattaggattagtagtcagttgctgtaaactattttgaacaaacagaaaagaacacggaaacatttttaacagagcatttaattatgttggaatacaggatcctagctctgtctgggaacattagcttatgtgagccagctctatcagggtcttcccatggtggttcagaatagatgagcatagcatggttttgtttgtttttgctttcaattttctaatttggcatggatccatatgtatttactatcctttttctaatatattaatatatgctacatttgtatttgcattactataatactttgagttgaaaaagagtttcattgtggagagaaaaagcaaatggtatgccacaagatcactctgatttgagaaaagggaggaggggaagatagtctgaatggaaatctgaaatacggaatgttttagagaaatatgtcacttgcatatagaatgttttaattgaggtataaattaatgagacaaagtgaaaaagaaattatattcagataggactgcactacattatttgtcacacatggatctgttaccatcaggtcaattcctagtatgcataaattttttaacccttttaaaagagacctatgttgaaaacccctgaaaattcactgaagaaaaatcattactctttttctcagtaaatcatatcatctgaaatattacaaatttcaaatttctaggtgctatattaattcaatattacaataactcttacctaattattcttacaagttttaagttgtggtagtttagtgatttttttaaaagatgtgtgaaatgttctctgcaaaataattcaggccactgtctccttttatatattattataattatttattatgaagaccagtgaattacgatatttaaagtgagagaacttaattatttgcaaaggtaagttacagcttgttttttgagagaatcaaatgagtttacttttgttcctgttgtttttaactagctttaagtttaaagatggaagctaagcaatggaaatgctatacgtttttgacatttattaaatggtaccaataaagtattttattaccaaaa

SEQ ID NO: 428300 - DNA, 3756 bp, Homo sapiens
gatcagtgcctccacttgatgctgagtatgtggggtggcaatgggcagttttcccccaacagaggagagatttatattccttaagacggggagaagagtcctaggcattcagagcacttggagtccactccatgcactatttgagcctttgttccatctctccattacccattctgtactgttgtaagtgtaatcctcctaaaatgttacttttttgattaggctgcaccctagtgcagtgagtgattctccagcttcagtgccagagtcaccaggaggacttgtgaaaatgtagaggcttctctccagccctagcatctgattcagtgggtctggctgtagtctgagagtttgcttctctaacatgttaacacaggaagctgatgctgtgggtttgggggcctcactgtgagaaccactgccctagcagaaaagtcctgctgattctctttgcctttaggatactgaccaatttctttaaccttgcatgggaggtactcttcactctgacccttctctcattgttcccattttaagattccgttgacccttatctcactgttcccattttagggtccttttctaccaatctgatttgtctgatcccttttctctaaaatgctttctacattcttacctctttgcctttgagaataattattttgaatgacctttacactcaccactgaattcaacattttaaccaaggcataactcacgttccacttctaacatcttctctaactactccagacatgagcgatgtatttttcagaactgctgttcattcattcattcagcaaatatttattgaactcctactctatcaggggacactgcatccatagtaatgaacaaaacaaaatccctgctcccacagagtgggagagacactggaacaaatatgtctagcaatatgaaggaaaacagctgaggaagaggatggagatgaaggagtgggaggtggcagctgcttctcaagtagtattagggaggatccctctgataaggcgacatgtgtgcaaagacctaacggatgcaagaggagagtgatctttgtgtgtgttatccatttagaatgcattattaacagacattacagctatttttccatttgtgtatttttcaactccccaaaaggtgtttaagattccaaaggtcagtggccactttaacacttttggagcctcataccaccaacatgtgcctcaaattgggcatttggtgaatatctctccctgatgataatcatacacatgaagctgggattttctttccctttgtgaatgtagaaccaatataatcaaatatttgaagtgtaaaacatattttgtaagctgtgttgaaggaagaaaattggtaactttaagtgggacttatcatttgttgtgtgtgctttcctcatagtgagtctaattttcacaattacaccttggtctcattgaatgaagaatttaatcgtggacgaggactaaatgtgggtgcccgagcttgggacaagggagaggtcttgatgtttttctgtgatgttgatatctatttctcagccgaattccttaacagctgccggttaaatgctgagccaggtaagaaggtgttttaccctgtggtgttcagtctttacaatcctgccattgtttatgccaaccaggaagtgccaccacctgtggagcagcagctggttcacaaaaaggattctggcttttggcgagattttggctttggaatgacttgtcagtatcgttcagatttcctgaccattggtggatttgacatggaagtgaaaggttggggtggagaagatgttcatctttatcgaaaatacttacatggtgacctcattgtgattcggactccggttcctggtcttttccacctctggcatgaaaagcgctgtgctgatgagctgacccccgagcagtaccgcatgtgcatccagtctaaagccatgaatgaggcctctcactcccacctgggaatgctggtcttcagggaggaaatagagacgcatcttcataaacaggcatacaggacaaacagtgaagctgttggttgaaatcataattaatgcgttactgtatgaaccacaaaacagcactatttatttagccttacttctacttccagatgcagtgcctcttttggagaagacatgtttatttttcatgttctttctgacattactttagcaattcaacttgatgtgagaagaaaaaacaaatgtttcaacacaaaatctctgttttgtgagaatactgcactatggaataattgacaaattgaaatctcatatttgtcccattgcatggtgtcctgattgcatctaggtggagcggatggaatgtgctgggccactgttgggtggagagcagcacattcttacagaggagatggagcgttatgagcatagtatgtggataggtatcttcacctgcccgcccctgagtcagcctccttgacttgatagcttgaagaatccttttccactgaaatagaggataattaattgacacatctgaaatccccaatcaatcaatcaagagaaaggtagaactaaaaactccttaacttactgttgcttacacccctgaaagtctgtttttaagcaaatgggtaatagtagaaaataggttagaatctatggcttgattaaaaatatgttattacattatcatgttcaggattaggattagtagtcagttgctgtaaactattttgaacaaacagaaaagaacacggaaacatttttaacagagcatttaattatgttggaatacaggatcctagctctgtctgggaacattagcttatgtgagccagctctatcagggtcttcccatggtggttcagaatagatgagcatagcatggttttgtttgtttttgctttcaattttctaatttggcatggatccatatgtatttactatcctttttctaatatattaatatatgctacatttgtatttgcattactataatactttgagttgaaaaagagtttcattgtggagagaaaaagcaaatggtatgccacaagatcactctgatttgagaaaagggaggaggggaagatagtctgaatggaaatctgaaatacggaatgttttagagaaatatgtcacttgcatatagaatgttttaattgaggtataaattaatgagacaaagtgaaaaagaaattatattcagataggactgcactacattatttgtcacacatggatctgttaccatcaggtcaattcctagtatgcataaattttttaacccttttaaaagagacctatgttgaaaacccctgaaaattcactgaagaaaaatcattactctttttctcagtaaatcatatcatctgaaatattacaaatttcaaatttctaggtgctatattaattcaatattacaataactcttacctaattattcttacaagttttaagttgtggtagtttagtgatttttttaaaagatgtgtgaaatgttctctgcaaaataattcaggccactgtctccttttatatattattataattatttattatgaagaccagtgaattacgatatttaaagtgagagaacttaattatttgcaaaggtaagttacagcttgttttttgagagaatcaaatgagtttacttttgttcctgttgtttttaactagctttaagtttaaagatggaagctaagcaatggaaatgctatacgtttttgacatttattaaatggtaccaataaagtattttattaccaaaa

SEQ ID NO: 428301 - DNA, 3756 bp, Homo sapiens
gatcagtgcctccacttgatgctgagtatgtggggtggcaatgggcagttttcccccaacagaggagagatttatattccttaagacggggagaagagtcctaggcattcagagcacttggagtccactccatgcactatttgagcctttgttccatctctccattacccattctgtactgttgtaagtgtaatcctcctaaaatgttacttttttgattaggctgcaccctagtgcagtgagtgattctccagcttcagtgccagagtcaccaggaggacttgtgaaaatgtagaggcttctctccagccctagcatctgattcagtgggtctggctgtagtctgagagtttgcttctctaacatgttaacacaggaagctgatgctgtgggtttgggggcctcactgtgagaaccactgccctagcagaaaagtcctgctgattctctttgcctttaggatactgaccaatttctttaaccttgcatgggaggtactcttcactctgacccttctctcattgttcccattttaagattccgttgacccttatctcactgttcccattttagggtccttttctaccaatctgatttgtctgatcccttttctctaaaatgctttctacattcttacctctttgcctttgagaataattattttgaatgacctttacactcaccactgaattcaacattttaaccaaggcataactcacgttccacttctaacatcttctctaactactccagacatgagcgatgtatttttcagaactgctgttcattcattcattcagcaaatatttattgaactcctactctatcaggggacactgcatccatagtaatgaacaaaacaaaatccctgctcccacagagtgggagagacactggaacaaatatgtctagcaatatgaaggaaaacagctgaggaagaggatggagatgaaggagtgggaggtggcagctgcttctcaagtagtattagggaggatccctctgataaggcgacatgtgtgcaaagacctaacggatgcaagaggagagtgatctttgtgtgtgttatccatttagaatgcattattaacagacattacagctatttttccatttgtgtatttttcaactccccaaaaggtgtttaagattccaaaggtcagtggccactttaacacttttggagcctcataccaccaacatgtgcctcaaattgggcatttggtgaatatctctccctgatgataatcatacacatgaagctgggattttctttccctttgtgaatgtagaaccaatataatcaaatatttgaagtgtaaaacatattttgtaagctgtgttgaaggaagaaaattggtaactttaagtgggacttatcatttgttgtgtgtgctttcctcatagtgagtctaattttcacaattacaccttggtctcattgaatgaagaatttaatcgtggacgaggactaaatgtgggtgcccgagcttgggacaagggagaggtcttgatgtttttctgtgatgttgatatctatttctcagccgaattccttaacagctgccggttaaatgctgagccaggtaagaaggtgttttaccctgtggtgttcagtctttacaatcctgccattgtttatgccaaccaggaagtgccaccacctgtggagcagcagctggttcacaaaaaggattctggcttttggcgagattttggctttggaatgacttgtcagtatcgttcagatttcctgaccattggtggatttgacatggaagtgaaaggttggggtggagaagatgttcatctttatcgaaaatacttacatggtgacctcattgtgattcggactccggttcctggtcttttccacctctggcatgaaaagcgctgtgctgatgagctgacccccgagcagtaccgcatgtgcatccagtctaaagccatgaatgaggcctctcactcccacctgggaatgctggtcttcagggaggaaatagagacgcatcttcataaacaggcatacaggacaaacagtgaagctgttggttgaaatcataattaatgcgttactgtatgaaccactggagaagacatgtttatttttcatgttctttctgacattactttagcaattcaacttgatgtgagaagaaaaaacaaatgtttcaacacaaaatctctgttttgtgagaatactgcactatggaataattgacaaattgaaatctcatatttgtcccaaaagttgttttgagttagttctacctggtgcccatgttctgattgtgtgtgggattgcatggtgtcctgattgcatctaggtggagcggatggaatgtgctgggccactgttgggtggagagcagcacattcttacagaggagatggagcgttatgagcatagtatgtggataggtatcttcacctgcccgcccctgagtcagcctccttgacttgatagcttgaagaatccttttccactgaaatagaggataattaattgacacatctgaaatccccaatcaatcaatcaagagaaaggtagaactaaaaactccttaacttactgttgcttacacccctgaaagtctgtttttaagcaaatgggtaatagtagaaaataggttagaatctatggcttgattaaaaatatgttattacattatcatgttcaggattaggattagtagtcagttgctgtaaactattttgaacaaacagaaaagaacacggaaacatttttaacagagcatttaattatgttggaatacaggatcctagctctgtctgggaacattagcttatgtgagccagctctatcagggtcttcccatggtggttcagaatagatgagcatagcatggttttgtttgtttttgctttcaattttctaatttggcatggatccatatgtatttactatcctttttctaatatattaatatatgctacatttgtatttgcattactataatactttgagttgaaaaagagtttcattgtggagagaaaaagcaaatggtatgccacaagatcactctgatttgagaaaagggaggaggggaagatagtctgaatggaaatctgaaatacggaatgttttagagaaatatgtcacttgcatatagaatgttttaattgaggtataaattaatgagacaaagtgaaaaagaaattatattcagataggactgcactacattatttgtcacacatggatctgttaccatcaggtcaattcctagtatgcataaattttttaacccttttaaaagagacctatgttgaaaacccctgaaaattcactgaagaaaaatcattactctttttctcagtaaatcatatcatctgaaatattacaaatttcaaatttctaggtgctatattaattcaatattacaataactcttacctaattattcttacaagttttaagttgtggtagtttagtgatttttttaaaagatgtgtgaaatgttctctgcaaaataattcaggccactgtctccttttatatattattataattatttattatgaagaccagtgaattacgatatttaaagtgagagaacttaattatttgcaaaggtaagttacagcttgttttttgagagaatcaaatgagtttacttttgttcctgttgtttttaactagctttaagtttaaagatggaagctaagcaatggaaatgctatacgtttttgacatttattaaatggtaccaataaagtattttattaccaaaa

SEQ ID NO: 428302 - DNA, 1818 bp, Homo sapiens
tctgaggatacccgagtcttgctcccatcaggcatacaggacaaacagtgaagctgttggttgaaatcataattaatgcgttactgtatgaaccacaaaacagcactatttatttagccttacttctacttccagatgcagtgcctcttttggagaagacatgtttatttttcatgttctttctgacattactttagcaattcaacttgatgtgagaagaaaaaacaaatgtttcaacacaaaatctctgttttgtgagaatactgcactatggaataattgacaaattgaaatctcatatttgtcccaaaagttgttttgagttagttctacctggtgcccatgttctgattgtgtgtgggattgcatggtgtcctgattgcatctaggtggagcggatggaatgtgctgggccactgttgggtggagagcagcacattcttacagaggagatggagcgttatgagcatagtatgtggataggtatcttcacctgcccgcccctgagtcagcctccttgacttgatagcttgaagaatccttttccactgaaatagaggataattaattgacacatctgaaatccccaatcaatcaatcaagagaaaggtagaactaaaaactccttaacttactgttgcttacacccctgaaagtctgtttttaagcaaatgggtaatagtagaaaataggttagaatctatggcttgattaaaaatatgttattacattatcatgttcaggattaggattagtagtcagttgctgtaaactattttgaacaaacagaaaagaacacggaaacatttttaacagagcatttaattatgttggaatacaggatcctagctctgtctgggaacattagcttatgtgagccagctctatcagggtcttcccatggtggttcagaatagatgagcatagcatggttttgtttgtttttgctttcaattttctaatttggcatggatccatatgtatttactatcctttttctaatatattaatatatgctacatttgtatttgcattactataatactttgagttgaaaaagagtttcattgtggagagaaaaagcaaatggtatgccacaagatcactctgatttgagaaaagggaggaggggaagatagtctgaatggaaatctgaaatacggaatgttttagagaaatatgtcacttgcatatagaatgttttaattgaggtataaattaatgagacaaagtgaaaaagaaattatattcagataggactgcactacattatttgtcacacatggatctgttaccatcaggtcaattcctagtatgcataaattttttaacccttttaaaagagacctatgttgaaaacccctgaaaattcactgaagaaaaatcattactctttttctcagtaaatcatatcatctgaaatattacaaatttcaaatttctaggtgctatattaattcaatattacaataactcttacctaattattcttacaagttttaagttgtggtagtttagtgatttttttaaaagatgtgtgaaatgttctctgcaaaataattcaggccactgtctccttttatatattattataattatttattatgaagaccagtgaattacgatatttaaagtgagagaacttaattatttgcaaaggtaagttacagcttgttttttgagagaatcaaatgagtttacttttgttcctgttgtttttaactagctttaagtttaaagatggaagctaagcaatggaaatgctatacgtttttgacatttattaaatggtaccaataaagtattttattaccaaaa

SEQ ID NO: 428303 - DNA, 4130 bp, Homo sapiens
gatcagtgcctccacttgatgctgagtatgtggggtggcaatgggcagttttcccccaacagaggagagatttatattccttaagacggggagaagagtcctaggcattcagagcacttggagtccactccatgcactatttgagcctttgttccatctctccattacccattctgtactgttgtaagtgtaatcctcctaaaatgttacttttttgattaggctgcaccctagtgcagtgagtgattctccagcttcagtgccagagtcaccaggaggacttgtgaaaatgtagaggcttctctccagccctagcatctgattcagtgggtctggctgtagtctgagagtttgcttctctaacatgttaacacaggaagctgatgctgtgggtttgggggcctcactgtgagaaccactgccctagcagaaaagtcctgctgattctctttgcctttaggatactgaccaatttctttaaccttgcatgggaggtactcttcactctgacccttctctcattgttcccattttaagattccgttgacccttatctcactgttcccattttagggtccttttctaccaatctgatttgtctgatcccttttctctaaaatgctttctacattcttacctctttgcctttgagaataattattttgaatgacctttacactcaccactgaattcaacattttaaccaaggcataactcacgttccacttctaacatcttctctaactactccagacatgagcgatgtatttttcagaactgctgttcattcattcattcagcaaatatttattgaactcctactctatcaggggacactgcatccatagtaatgaacaaaacaaaatccctgctcccacagagtgggagagacactggaacaaatatgtctagcaatatgaaggaaaacagctgaggaagaggatggagatgaaggagtgggaggtggcagctgcttctcaagtagtattagggaggatccctctgataaggcgacatgtgtgcaaagacctaacggatgcaagaggagagtgatctttgtgtgtgttatccatttagaatgcattattaacagacattacagctatttttccatttgtgtatttttcaactccccaaaaggtgtttaagattccaaaggtcagtggccactttaacacttttggagcctcataccaccaacatgtgcctcaaattgggcatttggtgaatatctctccctgatgataatcatacacatgaagctgggattttctttccctttgtgaatgtagaaccaatataatcaaatatttgaagtgtaaaacatattttgtaagctgtgttgaaggaagaaaattggtaactttaagtgggacttatcatttgttgtgtgtgctttcctcatagtgagtctaattttcacaattacaccttggtctcattgaatgaagaatttaatcgtggacgaggactaaatgtgggtgcccgagcttgggacaagggagaggtcttgatgtttttctgtgatgttgatatctatttctcagccgaattccttaacagctgccggttaaatgctgagccaggtaagaaggtgttttaccctgtggtgttcagtctttacaatcctgccattgtttatgccaaccaggaagtgccaccacctgtggagcagcagctggttcacaaaaaggattctggcttttggcgagattttggctttggaatgacttgtcagtatcgttcagatttcctgaccattggtggatttgacatggaagtgaaaggttggggtggagaagatgttcatctttatcgaaaatacttacatggtgacctcattgtgattcggactccggttcctggtcttttccacctctggcatgaaaagcgctgtgctgatgagctgacccccgagcagtaccgcatgtgcatccagtctaaagccatgaatgaggcctctcactcccacctgggaatgctggtcttcagggaggaaatagagacgcatcttcataaacaggcatacaggacaaacagtgaagctgttggttgaaatcataattaatgcgttactgtatgaaccacaaaacagcactatttatttagccttacttctacttccagatgcagtgcctcttttggagaagacatgtttatttttcatgttctttctgacattactttagcaattcaacttgatgtgagaagaaaaaacaaatgtttcaacacaaaatctctgttttgtgagaatactgcactatggaataattgacaaattgaaatctcatatttgtcccaaaagttgttttgagttagttctacctggtgcccatgttctgattgtgtgtgggattgcatggtgtcctgattgcatctaggtggagcggatggaatgtgctgggccactgttgggtggagagcagcacattcttacagaggagatggagcgttatgagcatagtatgtggataggtatcttcacctgcccgcccctgagtcagcctccttgacttgatagcttgaagaatccttttccactgaaatagaggataattaattgacacatctgaaatccccaatcaatcaatcaagagaaaggtagaactaaaaactccttaacttactgttgcttacacccctgaaagtctgtttttaagcaaatgggtaatagtagaaaataggttagaatctatggcttgattaaaaatatgttattacattatcatgttcaggattaggattagtagtcagttgctgtaaactattttgaacaaacagaaaagaacacggaaacatttttaacagagcatttaattatgttggaatacaggatcctagctctgtctgggaacattagcttatgtgagccagctctatcagggtcttcccatggtggttcagaatagatgagcatagcatggttttgtttgtttttgctttcaattttctaatttggcatggatccatatgtatttactatcctttttctaatatattaatatatgctacatttgtatttgcattactataatactttgagttgaaaaagagtttcattgtggagagaaaaagcaaatggtatgccacaagatcactctgatttgagaaaagggaggaggggaagatagtctgaatggaaatctgaaatacggaatgttttagagaaatatgtcacttgcatatagaatgttttaattgaggtataaattaatgagacaaagtgaaaaagaaattatattcagataggactgcactacattatttgtcacacatggatctgttaccatcaggtcaattcctagtatgcataaattttttaacccttttaaaagagacctatgttgaaaacccctgaaaattcactgaagaaaaatcattactctttttctcagtaaatcatatcatctgaaatattacaaatttcaaatttctaggtgctatattaattcaatattacaataactcttacctaattattcttacaagttttaagttgtggtagtttagtgatttttttaaaagatgtgtgaaatgttctctgcaaaataattcaggccactgtctccttttatatattattataattatttattatgaagaccagtgaattacgatatttaaagtgagagaacttaattatttgcaaaggtaagttacagcttgttttttgagagaatcaaatgagtttacttttgttcctgttgtttttaactagctttaagtttaaagatggaagctaagcaatggaaatgctatacgtttttgacatttattaaatggtaccaataaagtattttattaccaaaaaaaaaaaaaaaaaaaaaaaaaaaaaaaaaaaatttgggggaggagccccataaaaaacgtttaagaaacaatagccgtagggaacacggggacacaatagagaaagcgacacgtgggcgagagacgagtcccatagaagaccacgcgggtagcaggaaaaggagggcgcgagagatcaccacgcgaagaaaaaagccccgggggaaaaaacagaaggtctggaaaacagtcccgatgaagggattcgagagatcaaaaggggatgcaacaacgagcgccacaagagaagaccgcataaaaagtacccccggtggcggaac

SEQ ID NO: 428304 - DNA, 3246 bp, Homo sapiens
gatcagtgcctccacttgatgctgagtatgtggggtggcaatgggcagttttcccccaacagaggagagatttatattccttaagacggggagaagagtcctaggcattcagagcacttggagtccactccatgcactatttgagcctttgttccatctctccattacccattctgtactgttgtaagtgtaatcctcctaaaatgttacttttttgattaggctgcaccctagtgcagtgagtgattctccagcttcagtgccagagtcaccaggaggacttgtgaaaatgtagaggcttctctccagccctagcatctgattcagtgggtctggctgtagtctgagagtttgcttctctaacatgttaacacaggaagctgatgctgtgggtttgggggcctcactgtgagaaccactgccctagcagaaaagtcctgctgattctctttgcctttaggatactgaccaatttctttaaccttgcatgggaggtactcttcactctgacccttctctcattgttcccattttaagattccgttgacccttatctcactgttcccattttagggtccttttctaccaatctgatttgtctgatcccttttctctaaaatgctttctacattcttacctctttgcctttgagaataattattttgaatgacctttacactcaccactgaattcaacattttaaccaaggcataactcacgttccacttctaacatcttctctaactactccagacatgagcgatgtatttttcagaactgctgttcattcattcattcagcaaatatttattgaactcctactctatcaggggacactgcatccatagtaatgaacaaaacaaaatccctgctcccacagagtgggagagacactggaacaaatatgtctagcaatatgaaggaaaacagctgaggaagaggatggagatgaaggagtgggaggtggcagctgcttctcaagtagtattagggaggatccctctgataaggcgacatgtgtgcaaagacctaacggatgcaagaggagagtgatctttgtgtgtgttatccatttagaatgcattattaacagacattacagctatttttccatttgtgtatttttcaactccccaaaaggtgtttaagattccaaaggtcagtggccactttaacacttttggagcctcataccaccaacatgtgcctcaaattgggcatttggtgaatatctctccctgatgataatcatacacatgaagctgggattttctttccctttgtgaatgtagaaccaatataatcaaatatttgaagtgtaaaacatattttgtaagctgtgttgaaggaagaaaattggtaactttaagtgggacttatcatttgttgtgtgtgctttcctcatagtgagtctaattttcacaattacaccttggtctcattgaatgaagaatttaatcgtggacgaggactaaatgtgggtgcccgagcttgggacaagggagaggtcttgatgtttttctgtgatgttgatatctatttctcagccgaattccttaacagctgccggttaaatgctgagccaggtaagaaggtgttttaccctgtggtgttcagtctttacaatcctgccattgtttatgccaaccaggaagtgccaccacctgtggagcagcagctggttcacaaaaaggattctggcttttggcgagattttggctttggaatgacttgtcagtatcgttcagatttcctgaccattggtggatttgacatggaagtgaaaggttggggtggagaagatgttcatctttatcgaaaatacttacatggtgacctcattgtgattcggactccggttcctggtcttttccacctctggcatgaaaagcgctgtgctgatgagctgacccccgagcagtaccgcatgtgcatccagtctaaagccatgaatgaggcctctcactcccacctgggaatgctggtcttcagggaggaaatagagacgcatcttcataaacaggcatacaggacaaacagtgaagctgttggttgaaatcataattaatgcgttactgtatgaaccacaaaacagcactatttatttagccttacttctacttccagatgcagtgcctcttttggagaagacatgtttatttttcatgttctttctgacattactttagcaattcaacttgatgtgagaagaaaaaacaaatgtttcaacacaaaatctctgttttgtgagaatactgcactatggaataattgacaaattgaaatctcatatttgtcccaaaagttgttttgagttagttctacctggtgcccatgttctgattgtgtgtgggattgcatggtgtcctgattgcatctaggtggagcggatggaatgtgctgggccactgttgggtggagagcagcacattcttacagaggagatggagcgttatgagcatagtatgtggataggtatcttcacctgcccgcccctgagtcagcctccttgacttgatagcttgaagaatccttttccactgaaatagaggataattaattgacacatctgaaatccccaatcaatcaatcaagagaaaggtagaactaaaaactccttaacttactgttgcttacacccctgaaagtctgtttttaagcaaatgggtaatagtagaaaataggttagaatctatggcttgattaaaaatatgttattacattatcatgttcaggattaggattagtagtcagttgctgtaaactattttgaacaaacagaaaagaacacggaaacatttttaacagagcatttaattatgttggaatacaggatcctagctctgtctgggaacattagcttatgtgagccagctctatcagggtcttcccatggtggttcagaatagatgagcatagcatggttttgtttgtttttgctttcaattttctaatttggcatggatccatatgtatttactatcctttttctaatatattaatatatgctacatttgtatttgcattactataatactttgagttgaaaaagagtttcattgtggagagaaaaagcaaatggtatgccacaagatcactctgatttgagaaaagggaggaggggaagatagtctgaatggaaatctgaaatacggaatgttttagagaaatatgtcacttgcatatagaatgttttaattgaggtggggtgatcatctgcaggataaggtgatcttctgcacgata

SEQ ID NO: 428305 - DNA, 3429 bp, Homo sapiens
gcaccaggcgcccagtggagccgtttgggagaattgcctgcgccacgcagcggggccggacaggcggtaaggatctgattaggctttcgaacttgagtttgactgatgtcttctgtgtggtgtccgctaaatcccacagcatataggatcagtcgcattggttataaggtttgcttctggctgggtgcggtggctcatgcctgtaatccaacattgggaggccaaggcaggcggaccacctgaagtcgggagcttgagtccagccactgtctgggtactgccagccatcgggcccaggtctctggggttgtcttaccgcagtgagtaccacgcggtactacagagaccggctgcccgtgtgcccggcaggtggagccgcccgcatcagcggcctcggggaatggaagcggagaacgcgggcagctattcccttcagcaagctcaagctttttatacgtttccatttcaacaactgatggctgaagctcctaatatggcagttgtgaatgaacagcaaatgccagaagaagttccagccccagctcctgctcaggaaccagtgcaagaggctccaaaaggaagaaaaagaaaacccagaacaacagaaccaaaacaaccagtggaacccaaaaaacctgttgagtcaaaaaaatctggcaagtctgcaaaatcaaaagaaaaacaagaaaaaattacagacacatttaaagtaaaaagaaaagtagaccgttttaatggtgtttcagaagctgaacttctgaccaagactctccccgatattttgaccttcaatctggacattgtcattattggcataaacccgggactaatggctgcttacaaagggcatcattaccctggacctggaaaccatttttggaagtgtttgtttatgtcagggctcagtgaggtccagctgaaccatatggatgatcacactctaccagggaagtatggtattggatttaccaacatggtggaaaggaccacgcccggcagcaaagatctctccagtaaagaatttcgtgaaggaggacgtattctagtacagaaattacagaaatatcagccacgaatagcagtgtttaatggaaaatgtatttatgaaatttttagtaaagaagtttttggagtaaaggttaagaacttggaatttgggcttcagccccataagattccagacacagaaactctctgctatgttatgccatcatccagtgcaagatgtgctcagtttcctcgagcccaagacaaagttcattactacataaaactgaaggacttaagagatcagttgaaaggcattgaacgaaatatggacgttcaagaggtgcaatatacatttgacctacagcttgcccaagaggatgcaaagaagatggctgttaaggaagaaaaatatgatccaggttatgaggcagcatatggtggtgcttacggagaaaatccatgcagcagtgaaccttgtggcttctcttcaaatgggctaattgagagcgtggagttaagaggagaatcagctttcagtggcattcctaatgggcagtggatgacccagtcatttacagaccaaattccttcctttagtaatcactgtggaacacaagaacaggaagaagaaagccatgcttaagaatggtgcttctcagctctgcttaaatgctgcagttttaatgcagttgtcaacaagtagaacctcagtttgctaactgaagtgttttattagtattttactctagtggtgtaattgtaatgtagaacagttgtgtggtagtgtgaaccgtatgaacctaagtagtttggaagaaaaagtagggtttttgtatactagcttttgtatttgaattaattatcattccagctttttatatactatatttcatttatgaagaaattgattttcttttgggagtcacttttaatctgtaattttaaaatacaagtctgaatatttatagttgattcttaactgtgcataaacctagatataccattatcccttttatacctaagaagggcatgctaataattaccactgtcaaagaggcaaaggtgttgatttttgtatatgaagttaagcctcagtggagtctcatttgttagtttttagtggtaactaagggtaaactcagggttccctgagctatatgcacactcagacctctttgctttaccagtggtgttgtgagttgctcagtagtaaaaactggcccttacctgacagagccctggctttgacctgctcagccctgtgtgttaatcctctagtagccaattaactactctggggtggcaggttccagagaatgcagtagaccttttgccactcatctgtgttttacttgagacatgtaaatatgatagggaaggaactgaatttctccattcatatttataaccattctagttttatcttccttggctttaagagtgtgccatggaaagtgataagaaatgaacttctaggctaagcaaaaagatgctggagatatttgatactctcatttaaactggtgctttatgtacatgagatgtactaaaataagtaatatagaatttttcttgctaggtaaatccagtaagccaataattttaaagattctttatctgcatcattgctgtttgttactataaattaaatgaacctcatggaaaggttgaggtgtatacctttgtgattttctaatgagttttccatggtgctacaaataatccagactaccaggtctggtagatattaaagctgggtactaagaaatgttatttgcatcctctcagttactcctgaatattctgatttcatacgtacccagggagcatgctgttttgtcaatcaatataaaatatttatgaggtctcccccacccccaggaggttatatgattgctcttctctttataataagagaaacaaattcttattgtgaatcttaacatgctttttagctgtggctatgatggattttattttttcctaggtcaagctgtgtaaaagtcatttatgttatttaaatgatgtactgtactgctgtttacatggacgttttgtgcgggtgctttgaagtgccttgcatcagggattaggagcaattaaattattttttcacgggactgtgtaaagcatgtaactaggtattgctttggtatataactattgtagctttacaagagattgttttatttgaatggggaaaataccctttaaattatgacggacatccactagagatgggtttgaggattttccaagcgtgtaataatgatgtttttcctaacatgacagatgagtagtaaatgttgatatatcctatacatgacagtgtgagactttttcattaaataatattgaaagattttaaaattcatttgaaagtctgatggcttttacaataaaagatattaagaattgttatccttaacttaaaaaaaa

SEQ ID NO: 428306 - DNA, 3140 bp, Homo sapiens
gaagtgcagcacagaaagggggtccgtgggggacagtagaagcctggaggaggagcttgagtccagccactgtctgggtactgccagccatcgggcccaggtctctggggttgtcttaccgcagtgagtaccacgcggtactacagagaccggctgcccgtgtgcccggcaggtggagccgcccgcatcagcggcctcggggaatggaagcggagaacgcgggcagctattcccttcagcaagctcaagctttttatacgtttccatttcaacaactgatggctgaagctcctaatatggcagttgtgaatgaacagcaaatgccagaagaagttccagccccagctcctgctcaggaaccagtgcaagaggctccaaaaggaagaaaaagaaaacccagaacaacagaaccaaaacaaccagtggaacccaaaaaacctgttgagtcaaaaaaatctggcaagtctgcaaaatcaaaagaaaaacaagaaaaaattacagacacatttaaagtaaaaagaaaagtagaccgttttaatggtgtttcagaagctgaacttctgaccaagactctccccgatattttgaccttcaatctggacattgtcattattggcataaacccgggactaatggctgcttacaaagggcatcattaccctggacctggaaaccatttttggaagtgtttgtttatgtcagggctcagtgaggtccagctgaaccatatggatgatcacactctaccagggaagtatggtattggatttaccaacatggtggaaaggaccacgcccggcagcaaagatctctccagtaaagaatttcgtgaaggaggacgtattctagtacagaaattacagaaatatcagccacgaatagcagtgtttaatggaaaatgtatttatgaaatttttagtaaagaagtttttggagtaaaggttaagaacttggaatttgggcttcagccccataagattccagacacagaaactctctgctatgttatgccatcatccagtgcaagatgtgctcagtttcctcgagcccaagacaaagttcattactacataaaactgaaggacttaagagatcagttgaaaggcattgaacgaaatatggacgttcaagaggtgcaatatacatttgacctacagcttgcccaagaggatgcaaagaagatggctgttaaggaagaaaaatatgatccaggttatgaggcagcatatggtggtgcttacggagaaaatccatgcagcagtgaaccttgtggcttctcttcaaatgggctaattgagagcgtggagttaagaggagaatcagctttcagtggcattcctaatgggcagtggatgacccagtcatttacagaccaaattccttcctttagtaatcactgtggaacacaagaacaggaagaagaaagccatgcttaagaatggtgcttctcagctctgcttaaatgctgcagttttaatgcagttgtcaacaagtagaacctcagtttgctaactgaagtgttttattagtattttactctagtggtgtaattgtaatgtagaacagttgtgtggtagtgtgaaccgtatgaacctaagtagtttggaagaaaaagtagggtttttgtatactagcttttgtatttgaattaattatcattccagctttttatatactatatttcatttatgaagaaattgattttcttttgggagtcacttttaatctgtaattttaaaatacaagtctgaatatttatagttgattcttaactgtgcataaacctagatataccattatcccttttatacctaagaagggcatgctaataattaccactgtcaaagaggcaaaggtgttgatttttgtatatgaagttaagcctcagtggagtctcatttgttagtttttagtggtaactaagggtaaactcagggttccctgagctatatgcacactcagacctctttgctttaccagtggtgttgtgagttgctcagtagtaaaaactggcccttacctgacagagccctggctttgacctgctcagccctgtgtgttaatcctctagtagccaattaactactctggggtggcaggttccagagaatgcagtagaccttttgccactcatctgtgttttacttgagacatgtaaatatgatagggaaggaactgaatttctccattcatatttataaccattctagttttatcttccttggctttaagagtgtgccatggaaagtgataagaaatgaacttctaggctaagcaaaaagatgctggagatatttgatactctcatttaaactggtgctttatgtacatgagatgtactaaaataagtaatatagaatttttcttgctaggtaaatccagtaagccaataattttaaagattctttatctgcatcattgctgtttgttactataaattaaatgaacctcatggaaaggttgaggtgtatacctttgtgattttctaatgagttttccatggtgctacaaataatccagactaccaggtctggtagatattaaagctgggtactaagaaatgttatttgcatcctctcagttactcctgaatattctgatttcatacgtacccagggagcatgctgttttgtcaatcaatataaaatatttatgaggtctcccccacccccaggaggttatatgattgctcttctctttataataagagaaacaaattcttattgtgaatcttaacatgctttttagctgtggctatgatggattttattttttcctaggtcaagctgtgtaaaagtcatttatgttatttaaatgatgtactgtactgctgtttacatggacgttttgtgcgggtgctttgaagtgccttgcatcagggattaggagcaattaaattattttttcacgggactgtgtaaagcatgtaactaggtattgctttggtatataactattgtagctttacaagagattgttttatttgaatggggaaaataccctttaaattatgacggacatccactagagatgggtttgaggattttccaagcgtgtaataatgatgtttttcctaacatgacagatgagtagtaaatgttgatatatcctatacatgacagtgtgagactttttcatta

SEQ ID NO: 428307 - DNA, 3177 bp, Homo sapiens
gaagtgcagcacagaaagggggtccgtgggggacagtagaagcctggaggaggagcttgagtccagccactgtctgggtactgccagccatcgggcccaggtctctggggttgtcttaccgcagtgagtaccacgcggtactacagagaccggctgcccgtgtgcccggcaggtggagccgcccgcatcagcggcctcggggaatggaagcggagaacgcgggcagctattcccttcagcaagctcaagctttttatacgtttccatttcaacaactgatggctgaagctcctaatatggcagttgtgaatgaacagcaaatgccagaagaagttccagccccagctcctgctcaggaaccagtgcaagaggctccaaaaggaagaaaaagaaaacccagaacaacagaaccaaaacaaccagtggaacccaaaaaacctgttgagtcaaaaaaatctggcaagtctgcaaaatcaaaagaaaaacaagaaaaaattacagacacatttaaagtaaaaagaaaagtagaccgttttaatggtgtttcagaagctgaacttctgaccaagactctccccgatattttgaccttcaatctggacattgtcattattggcataaacccgggactaatggctgcttacaaagggcatcattaccctggacctggaaaccatttttggaagtgtttgtttatgtcagggctcagtgaggtccagctgaaccatatggatgatcacactctaccagggaagtatggtattggatttaccaacatggtggaaaggaccacgcccggcagcaaagatctctccagtaaagaatttcgtgaaggaggacgtattctagtacagaaattacagaaatatcagccacgaatagcagtgtttaatggaaaatgtatttatgaaatttttagtaaagaagtttttggagtaaaggttaagaacttggaatttgggcttcagccccataagattccagacacagaaactctctgctatgttatgccatcatccagtgcaagatgtgctcagtttcctcgagcccaagacaaagttcattactacataaaactgaaggacttaagagatcagttgaaaggcattgaacgaaatatggacgttcaagaggtgcaatatacatttgacctacagcttgcccaagaggatgcaaagaagatggctgttaaggaagaaaaatatgatccaggttatgaggcagcatatggtggtgcttacggagaaaatccatgcagcagtgaaccttgtggcttctcttcaaatgggctaattgagagcgtggagttaagaggagaatcagctttcagtggcattcctaatgggcagtggatgacccagtcatttacagaccaaattccttcctttagtaatcactgtggaacacaagaacaggaagaagaaagccatgcttaagaatggtgcttctcagctctgcttaaatgctgcagttttaatgcagttgtcaacaagtagaacctcagtttgctaactgaagtgttttattagtattttactctagtggtgtaattgtaatgtagaacagttgtgtggtagtgtgaaccgtatgaacctaagtagtttggaagctttttatatactatatttcatttatgaagaaattgattttcttttgggagtcacttttaatctgtaattttaaaatacaagtctgaatatttatagttgattcttaactgtgcataaacctagatataccattatcccttttatacctaagaagggcatgctaataattaccactgtcaaagaggcaaaggtgttgatttttgtatatgaagttaagcctcagtggagtctcatttgttagtttttagtggtaactaagggtaaactcagggttccctgagctatatgcacactcagacctctttgctttaccagtggtgttgtgagttgctcagtagtaaaaactggcccttacctgacagagccctggctttgacctgctcagccctgtgtgttaatcctctagtagccaattaactactctggggtggcaggttccagagaatgcagtagaccttttgccactcatctgtgttttacttgagacatgtaaatatgatagggaaggaactgaatttctccattcatatttataaccattctagttttatcttccttggctttaagagtgtgccatggaaagtgataagaaatgaacttctaggctaagcaaaaagatgctggagatatttgatactctcatttaaactggtgctttatgtacatgagatgtactaaaataagtaatatagaatttttcttgctaggtaaatccagtaagccaataattttaaagattctttatctgcatcattgctgtttgttactataaattaaatgaacctcatggaaaggttgaggtgtatacctttgtgattttctaatgagttttccatggtgctacaaataatccagactaccaggtctggtagatattaaagctgggtactaagaaatgttatttgcatcctctcagttactcctgaatattctgatttcatacgtacccagggagcatgctgttttgtcaatcaatataaaatatttatgaggtctcccccacccccaggaggttatatgattgctcttctctttataataagagaaacaaattcttattgtgaatcttaacatgctttttagctgtggctatgatggattttattttttcctaggtcaagctgtgtaaaagtcatttatgttatttaaatgatgtactgtactgctgtttacatggacgttttgtgcgggtgctttgaagtgccttgcatcagggattaggagcaattaaattattttttcacgggactgtgtaaagcatgtaactaggtattgctttggtatataactattgtagctttacaagagattgttttatttgaatggggaaaataccctttaaattatgacggacatccactagagatgggtttgaggattttccaagcgtgtaataatgatgtttttcctaacatgacagatgagtagtaaatgttgatatatcctatacatgacagtgtgagactttttcattaaataatattgaaagattttaaaattcatttgaaagtctgatggcttttacaataaaagatattaagaattgttatccttaacttaaaaaaaa

SEQ ID NO: 428308 - DNA, 3286 bp, Homo sapiens
gcaccaggcgcccagtggagccgtttgggagaattgcctgcgccacgcagcggggccggacaggcggtaaggatctgattaggctttcgaacttgagtttgactgatgtcttctgtgtggtgtccgctaaatcccacagcatataggatcagtcgcattggttataaggtttgcttctggctgggtgcggtggctcatgcctgtaatccaacattgggaggccaaggcaggcggaccacctgaagtcgggagcttgagtccagccactgtctgggtactgccagccatcgggcccaggtctctggggttgtcttaccgcagtgagtaccacgcggtactacagagaccggctgcccgtgtgcccggcaggtggagccgcccgcatcagcggcctcggggaatggaagcggagaacgcgggcagaggctccaaaaggaagaaaaagaaaacccagaacaacagaaccaaaacaaccagtggaacccaaaaaacctgttgagtcaaaaaaatctggcaagtctgcaaaatcaaaagaaaaacaagaaaaaattacagacacatttaaagtaaaaagaaaagtagaccgttttaatggtgtttcagaagctgaacttctgaccaagactctccccgatattttgaccttcaatctggacattgtcattattggcataaacccgggactaatggctgcttacaaagggcatcattaccctggacctggaaaccatttttggaagtgtttgtttatgtcagggctcagtgaggtccagctgaaccatatggatgatcacactctaccagggaagtatggtattggatttaccaacatggtggaaaggaccacgcccggcagcaaagatctctccagtaaagaatttcgtgaaggaggacgtattctagtacagaaattacagaaatatcagccacgaatagcagtgtttaatggaaaatgtatttatgaaatttttagtaaagaagtttttggagtaaaggttaagaacttggaatttgggcttcagccccataagattccagacacagaaactctctgctatgttatgccatcatccagtgcaagatgtgctcagtttcctcgagcccaagacaaagttcattactacataaaactgaaggacttaagagatcagttgaaaggcattgaacgaaatatggacgttcaagaggtgcaatatacatttgacctacagcttgcccaagaggatgcaaagaagatggctgttaaggaagaaaaatatgatccaggttatgaggcagcatatggtggtgcttacggagaaaatccatgcagcagtgaaccttgtggcttctcttcaaatgggctaattgagagcgtggagttaagaggagaatcagctttcagtggcattcctaatgggcagtggatgacccagtcatttacagaccaaattccttcctttagtaatcactgtggaacacaagaacaggaagaagaaagccatgcttaagaatggtgcttctcagctctgcttaaatgctgcagttttaatgcagttgtcaacaagtagaacctcagtttgctaactgaagtgttttattagtattttactctagtggtgtaattgtaatgtagaacagttgtgtggtagtgtgaaccgtatgaacctaagtagtttggaagaaaaagtagggtttttgtatactagcttttgtatttgaattaattatcattccagctttttatatactatatttcatttatgaagaaattgattttcttttgggagtcacttttaatctgtaattttaaaatacaagtctgaatatttatagttgattcttaactgtgcataaacctagatataccattatcccttttatacctaagaagggcatgctaataattaccactgtcaaagaggcaaaggtgttgatttttgtatatgaagttaagcctcagtggagtctcatttgttagtttttagtggtaactaagggtaaactcagggttccctgagctatatgcacactcagacctctttgctttaccagtggtgttgtgagttgctcagtagtaaaaactggcccttacctgacagagccctggctttgacctgctcagccctgtgtgttaatcctctagtagccaattaactactctggggtggcaggttccagagaatgcagtagaccttttgccactcatctgtgttttacttgagacatgtaaatatgatagggaaggaactgaatttctccattcatatttataaccattctagttttatcttccttggctttaagagtgtgccatggaaagtgataagaaatgaacttctaggctaagcaaaaagatgctggagatatttgatactctcatttaaactggtgctttatgtacatgagatgtactaaaataagtaatatagaatttttcttgctaggtaaatccagtaagccaataattttaaagattctttatctgcatcattgctgtttgttactataaattaaatgaacctcatggaaaggttgaggtgtatacctttgtgattttctaatgagttttccatggtgctacaaataatccagactaccaggtctggtagatattaaagctgggtactaagaaatgttatttgcatcctctcagttactcctgaatattctgatttcatacgtacccagggagcatgctgttttgtcaatcaatataaaatatttatgaggtctcccccacccccaggaggttatatgattgctcttctctttataataagagaaacaaattcttattgtgaatcttaacatgctttttagctgtggctatgatggattttattttttcctaggtcaagctgtgtaaaagtcatttatgttatttaaatgatgtactgtactgctgtttacatggacgttttgtgcgggtgctttgaagtgccttgcatcagggattaggagcaattaaattattttttcacgggactgtgtaaagcatgtaactaggtattgctttggtatataactattgtagctttacaagagattgttttatttgaatggggaaaataccctttaaattatgacggacatccactagagatgggtttgaggattttccaagcgtgtaataatgatgtttttcctaacatgacagatgagtagtaaatgttgatatatcctatacatgacagtgtgagactttttcattaaataatattgaaagattttaaaattcatttgaaagtctgatggcttttacaataaaagatattaagaattgttatccttaacttaaaaaaaa

SEQ ID NO: 428309 - DNA, 2869 bp, Homo sapiens
gaagtgcagcacagaaagggggtccgtgggggacagtagaagcctggaggaggagcttgagtccagccactgtctgggtactgccagccatcgggcccaggtctctggggttgtcttaccgcagtgagtaccacgcggtactacagagaccggctgcccgtgtgcccggcaggtggagccgcccgcatcagcggcctcggggaatggaagcggagaacgcgggcagctattcccttcagcaagctcaagctttttatacgtttccatttcaacaactgatggctgaagctcctaatatggcagttgtgaatgaacagcaaatgccagaagaagttccagccccagctcctgctcaggaaccagtgcaagaggctccaaaaggaagaaaaagaaaacccagaacaacagaaccaaaacaaccagtggaacccaaaaaacctgttgagtcaaaaaaatctggcaagtctgcaaaatcaaaagaaaaacaagaaaaaattacagacacatttaaagtaaaaagaaaagtagaccgttttaatggtgtttcagaagctgaacttctgaccaagactctccccgatattttgaccttcaatctggacattgtcattattggcataaacccgggactaatggctgcttacaaagggcatcattaccctggacctggaaaccatttttggaagtgtttgtttatgtcagggctcagtgaggtccagctgaaccatatggatgatcacactctaccagggaagtatggtattggatttaccaacatggtggaaaggaccacgcccggcagcaaagatctctccagtaaagaatttcgtgaaggaggacgtattctagtacagaaattacagaaatatcagccacgaatagcagtgtttaatggaaaatgtatttatgaaatttttagtaaagaagtttttggagtaaaggttaagaacttggaatttgggcttcagccccataagattccagacacagaaactctctgctatgttatgccatcatccagtgcaagatgtgctcagtttcctcgagcccaagacaaagttcattactacataaaactgaaggacttaagagatcagttgaaaggcattgaacgaaatatggacgttcaagaggtgcaatatacatttgacctacagcttgcccaagaggatgcaaagaagatggctgttaaggaagaaaaatatgatccaggttatgaggcagcatatggtggtgcttacggagaaaatccatgcagcagtgaaccttgtggcttctcttcaaatgggctaattgagagcgtggagttaagaggagaatcagctttcagtggcattcctaatgggcagtggatgacccagtcatttacagaccaaattccttcctttagtaatcactgtggaacacaagaacaggaagaagaaagccatgcttaagaatggtgcttctcagctctgcttaaatgctgcagttttaatgcagttgtcaacaagtagaacctcagtttgctaactgaagtgttttattagtattttactctagtggtgtaattgtaatgtagaacagttgtgtggtagtgtgaaccgtatgaacctaagtagtttggaagaaaaagtagggtttttgtatactagcttttgtatttgaattaattatcattccagctttttatatactatatttcatttatgaagaaattgattttcttttgggagtcacttttaatctgtaattttaaaatacaagtctgaatatttatagttgattcttaactgtgcataaacctagatataccattatcccttttatacctaagaagggcatgctaataattaccactgtcaaagaggcaaaggtgttgatttttgtatatgaagttaagcctcagtggagtctcatttgttagtttttagtggtaactaagggtaaactcagggttccctgagctatatgcacactcagacctctttgctttaccagtggtgttgtgagttgctcagtagtaaaaactggcccttacctgacagagccctggctttgacctgctcagccctgtgtgttaatcctctagtagccaattaactactctggggtggcaggttccagagaatgcagtagaccttttgccactcatctgtgttttacttgagacatgtaaatatgatagggaaggaactgaatttctccattcatatttataaccattctagttttatcttccttggctttaagagtgtgccatggaaagtgataagaaatgaacttctaggctaagcaaaaagatgctggagatatttgatactctcatttaaactggtgctttatgtacatgagatgtactaaaataagtaatatagaatttttcttgctaggtaaatccagtaagccaataattttaaagattctttatctgcatcattgctgtttgttactataaattaaatgaacctcatggaaaggttgaggtgtatacctttgtgattttctaatgagttttccatggtgctacaaataatccagactaccaggtctggtagatattaaagctgggtactaagaaatgttatttgcatcctctcagttactcctgaatattctgatttcatacgtacccagggagcatgctgttttgtcaatcaatataaaatatttatgaggtctcccccacccccaggtgggctacgtcgacgtagcccacctgacaaccttagccaaaccatttacccaaataaagtataggcgatagaaattgaaacctggcgcaatagatatagtaccgcaagggaaagatgaaaaattataaccaagcataatatagcaaggactaacccctataccttctgcataatgaattaactagaaataactt

SEQ ID NO: 428310 - DNA, 673 bp, Homo sapiens
gcaccaggcgcccagtggagccgtttgggagaattgcctgcgccacgcagcggggccggacaggcggtaaggatctgattaggctttcgaacttgagtttgactgatgtcttctgtgtggtgtccgctaaatcccacagcatataggatcagtcgcattggttataaggtttgcttctggctgggtgcggtggctcatgcctgtaatccaacattgggaggccaaggcaggcggaccacctgaagtcgggagcttgagtccagccactgtctgggtactgccagccatcgggcccaggtctctggggttgtcttaccgcagtgagtaccacgcggtactacagagaccggctgcccgtgtgcccggcaggtggagccgcccgcatcagcggcctcggggaatggaagcggagaacgcgggcagctattcccttcagcaagctcaagctttttatacgtttccatttcaacaactgatggctgaagctcctaatatggcagttgtgaatgaacagcaaatgccagaagaagttccagccccagctcctgctcaggaaccagtgcaagtggaggctccttatggattaaattgtggtccctggtcgcctggacctgaactaaccggcggaaccctgaatacctggaacttcaaggtcatatgacgttctggttct

SEQ ID NO: 428311 - DNA, 420 bp, Homo sapiens
atattttgaccttcaatctggacattgtcattgtaagatctttgtcctcgttggattttataagtagtattgggggatcagctttacttaacagttgtccttgcaaatagcattttgctgaaaaggaccatttctaagaatccttttggtggtaaatggtgtcagcttcatgaggttgtgttatatgagagtgtttaagagggtgggctccaaatttagactgtctgggttcaaatcctgtcacaagtataatcttggataagtcttattaacctttctaaacaccggttttctcattgataaaccaggggtgataataccaccccccgatagggttgcaagtaaatgagagaatccatgtgaatcacttcaactgaatgatgcctgtggagacctgatacatggcagcactaattttaa

SEQ ID NO: 428312 - DNA, 206 bp, Homo sapiens
ccatgcagcagtgaaccttgtggcttctcttcaaatgggctaagtatggttccctccacatgtgtattcctttcaaagacggtttggtcaggattggggggaaaattttaatagaaggagagtaaattattgaagaatgggaatgataatatgaaattttatttagtgactaatagtgaaaaattgatggttatttcacgttgaat

SEQ ID NO: 428313 - DNA, 3232 bp, Homo sapiens
gaagtgcagcacagaaagggggtccgtgggggacagtagaagcctggaggaggagcttgagtccagccactgtctgggtactgccagccatcgggcccaggtctctggggttgtcttaccgcagtgagtaccacgcggtactacagagaccggctgcccgtgtgcccggcaggtggagccgcccgcatcagcggcctcggggaatggaagcggagaacgcgggcagctattcccttcagcaagctcaagctttttatacgtttccatttcaacaactgatggctgaagctcctaatatggcagttgtgaatgaacagcaaatgccagaagaagttccagccccagctcctgctcaggaaccagtgcaagaggctccaaaaggaagaaaaagaaaacccagaacaacagaaccaaaacaaccagtggaacccaaaaaacctgttgagtcaaaaaaatctggcaagtctgcaaaatcaaaagaaaaacaagaaaaaattacagacacatttaaagtaaaaagaaaagtagaccgttttaatggtgtttcagaagctgaacttctgaccaagactctccccgatattttgaccttcaatctggacattgtcattattggcataaacccgggactaatggctgcttacaaagggcatcattaccctggacctggaaaccatttttggaagtgtttgtttatgtcagggctcagtgaggtccagctgaaccatatggatgatcacactctaccagggaagtatggtattggatttaccaacatggtggaaaggaccacgcccggcagcaaagatctctccagtaaagaatttcgtgaaggaggacgtattctagtacagaaattacagaaatatcagccacgaatagcagtgtttaatggaaaatgtatttatgaaatttttagtaaagaagtttttggagtaaaggttaagaacttggaatttgggcttcagccccataagattccagacacagaaactctctgctatgttatgccatcatccagtgcaagatgtgctcagtttcctcgagcccaagacaaagttcattactacataaaactgaaggacttaagagatcagttgaaaggcattgaacgaaatatggacgttcaagaggtgcaatatacatttgacctacagcttgcccaagaggatgcaaagaagatggctgttaaggaagaaaaatatgatccaggttatgaggcagcatatggtggtgcttacggagaaaatccatgcagcagtgaaccttgtggcttctcttcaaatgggctaattgagagcgtggagttaagaggagaatcagctttcagtggcattcctaatgggcagtggatgacccagtcatttacagaccaaattccttcctttagtaatcactgtggaacacaagaacaggaagaagaaagccatgcttaagaatggtgcttctcagctctgcttaaatgctgcagttttaatgcagttgtcaacaagtagaacctcagtttgctaactgaagtgttttattagtattttactctagtggtgtaattgtaatgtagaacagttgtgtggtagtgtgaaccgtatgaacctaagtagtttggaagaaaaagtagggtttttgtatactagcttttgtatttgaattaattatcattccagctttttatatactatatttcatttatgaagaaattgattttcttttgggagtcacttttaatctgtaattttaaaatacaagtctgaatatttatagttgattcttaactgtgcataaacctagatataccattatcccttttatacctaagaagggcatgctaataattaccactgtcaaagaggcaaaggtgttgatttttgtatatgaagttaagcctcagtggagtctcatttgttagtttttagtggtaactaagggtaaactcagggttccctgagctatatgcacactcagacctctttgctttaccagtggtgttgtgagttgctcagtagtaaaaactggcccttacctgacagagccctggctttgacctgctcagccctgtgtgttaatcctctagtagccaattaactactctggggtggcaggttccagagaatgcagtagaccttttgccactcatctgtgttttacttgagacatgtaaatatgatagggaaggaactgaatttctccattcatatttataaccattctagttttatcttccttggctttaagagtgtgccatggaaagtgataagaaatgaacttctaggctaagcaaaaagatgctggagatatttgatactctcatttaaactggtgctttatgtacatgagatgtactaaaataagtaatatagaatttttcttgctaggtaaatccagtaagccaataattttaaagattctttatctgcatcattgctgtttgttactataaattaaatgaacctcatggaaaggttgaggtgtatacctttgtgattttctaatgagttttccatggtgctacaaataatccagactaccaggtctggtagatattaaagctgggtactaagaaatgttatttgcatcctctcagttactcctgaatattctgatttcatacgtacccagggagcatgctgttttgtcaatcaatataaaatatttatgaggtctcccccacccccaggaggttatatgattgctcttctctttataataagagaaacaaattcttattgtgaatcttaacatgctttttagctgtggctatgatggattttattttttcctaggtcaagctgtgtaaaagtcatttatgttatttaaatgatgtactgtactgctgtttacatggacgttttgtgcgggtgctttgaagtgccttgcatcagggattaggagcaattaaattattttttcacgggactgtgtaaagcatgtaactaggtattgctttggtatataactattgtagctttacaagagattgttttatttgaatggggaaaataccctttaaattatgacggacatccactagagatgggtttgaggattttccaagcgtgtaataatgatgtttttcctaacatgacagatgagtagtaaatgttgatatatcctatacatgacagtgtgagactttttcattaaataatattgaaagattttaaaattcatttgaaagtctgatggcttttacaataaaagatattaagaattgttatccttaacttaaaaaaaa

SEQ ID NO: 428314 - DNA, 3178 bp, Homo sapiens
gaagtgcagcacagaaagggggtccgtgggggacagtagaagcctggaggaggagcttgagtccagccactgtctgggtactgccagccatcgggcccaggtctctggggttgtcttaccgcagtgagtaccacgcggtactacagagaccggctgcccgtgtgcccggcaggtggagccgcccgcatcagcggcctcggggaatggaagcggagaacgcgggcagctattcccttcagcaagctcaagctttttatacgtttccatttcaacaactgatggctgaagctcctaatatggcagttgtgaatgaacagcaaatgccagaagaagttccagccccagctcctgctcaggaaccagtgcaagaggctccaaaaggaagaaaaagaaaacccagaacaacagaaccaaaacaaccagtggaacccaaaaaacctgttgagtcaaaaaaatctggcaagtctgcaaaatcaaaagaaaaacaagaaaaaattacagacacatttaaagtaaaaagccccgatattttgaccttcaatctggacattgtcattattggcataaacccgggactaatggctgcttacaaagggcatcattaccctggacctggaaaccatttttggaagtgtttgtttatgtcagggctcagtgaggtccagctgaaccatatggatgatcacactctaccagggaagtatggtattggatttaccaacatggtggaaaggaccacgcccggcagcaaagatctctccagtaaagaatttcgtgaaggaggacgtattctagtacagaaattacagaaatatcagccacgaatagcagtgtttaatggaaaatgtatttatgaaatttttagtaaagaagtttttggagtaaaggttaagaacttggaatttgggcttcagccccataagattccagacacagaaactctctgctatgttatgccatcatccagtgcaagatgtgctcagtttcctcgagcccaagacaaagttcattactacataaaactgaaggacttaagagatcagttgaaaggcattgaacgaaatatggacgttcaagaggtgcaatatacatttgacctacagcttgcccaagaggatgcaaagaagatggctgttaaggaagaaaaatatgatccaggttatgaggcagcatatggtggtgcttacggagaaaatccatgcagcagtgaaccttgtggcttctcttcaaatgggctaattgagagcgtggagttaagaggagaatcagctttcagtggcattcctaatgggcagtggatgacccagtcatttacagaccaaattccttcctttagtaatcactgtggaacacaagaacaggaagaagaaagccatgcttaagaatggtgcttctcagctctgcttaaatgctgcagttttaatgcagttgtcaacaagtagaacctcagtttgctaactgaagtgttttattagtattttactctagtggtgtaattgtaatgtagaacagttgtgtggtagtgtgaaccgtatgaacctaagtagtttggaagaaaaagtagggtttttgtatactagcttttgtatttgaattaattatcattccagctttttatatactatatttcatttatgaagaaattgattttcttttgggagtcacttttaatctgtaattttaaaatacaagtctgaatatttatagttgattcttaactgtgcataaacctagatataccattatcccttttatacctaagaagggcatgctaataattaccactgtcaaagaggcaaaggtgttgatttttgtatatgaagttaagcctcagtggagtctcatttgttagtttttagtggtaactaagggtaaactcagggttccctgagctatatgcacactcagacctctttgctttaccagtggtgttgtgagttgctcagtagtaaaaactggcccttacctgacagagccctggctttgacctgctcagccctgtgtgttaatcctctagtagccaattaactactctggggtggcaggttccagagaatgcagtagaccttttgccactcatctgtgttttacttgagacatgtaaatatgatagggaaggaactgaatttctccattcatatttataaccattctagttttatcttccttggctttaagagtgtgccatggaaagtgataagaaatgaacttctaggctaagcaaaaagatgctggagatatttgatactctcatttaaactggtgctttatgtacatgagatgtactaaaataagtaatatagaatttttcttgctaggtaaatccagtaagccaataattttaaagattctttatctgcatcattgctgtttgttactataaattaaatgaacctcatggaaaggttgaggtgtatacctttgtgattttctaatgagttttccatggtgctacaaataatccagactaccaggtctggtagatattaaagctgggtactaagaaatgttatttgcatcctctcagttactcctgaatattctgatttcatacgtacccagggagcatgctgttttgtcaatcaatataaaatatttatgaggtctcccccacccccaggaggttatatgattgctcttctctttataataagagaaacaaattcttattgtgaatcttaacatgctttttagctgtggctatgatggattttattttttcctaggtcaagctgtgtaaaagtcatttatgttatttaaatgatgtactgtactgctgtttacatggacgttttgtgcgggtgctttgaagtgccttgcatcagggattaggagcaattaaattattttttcacgggactgtgtaaagcatgtaactaggtattgctttggtatataactattgtagctttacaagagattgttttatttgaatggggaaaataccctttaaattatgacggacatccactagagatgggtttgaggattttccaagcgtgtaataatgatgtttttcctaacatgacagatgagtagtaaatgttgatatatcctatacatgacagtgtgagactttttcattaaataatattgaaagattttaaaattcatttgaaagtctgatggcttttacaataaaagatattaagaattgttatccttaacttaaaaaaaa

SEQ ID NO: 428315 - DNA, 3521 bp, Homo sapiens
gcaccaggcgcccagtggagccgtttgggagaattgcctgcgccacgcagcggggccggacaggcggtaaggatctgattaggctttcgaacttgagtttgactgatgtcttctgtgtggtgtccgctaaatcccacagcatataggatcagtcgcattggttataaggtttgcttctggctgggtgcggtggctcatgcctgtaatccaacattgggaggccaaggcaggcggaccacctgaagtcgggagcttgagtccagccactgtctgggtactgccagccatcgggcccaggtctctggggttgtcttaccgcagtgagtaccacgcggtactacagagaccggctgcccgtgtgcccggcaggtggagccgcccgcatcagcggcctcggggaatggaagcggagaacgcgggcagctattcccttcagcaagctcaagctttttatacgtttccatttcaacaactgatggctgaagctcctaatatggcagttgtgaatgaacagcaaatgccagaagaagttccagccccagctcctgctcaggaaccagtgcaagtggggctgaagctcctaatatggcagttgtgaatgaacagcaaatgccagaagaagttccagccccagctcctgctcaggaaccagtgcaagaggctccaaaaggaagaaaaagaaaacccagaacaacagaaccaaaacaaccagtggaacccaaaaaacctgttgagtcaaaaaaatctggcaagtctgcaaaatcaaaagaaaaacaagaaaaaattacagacacatttaaagtaaaaagaaaagtagaccgttttaatggtgtttcagaagctgaacttctgaccaagactctccccgatattttgaccttcaatctggacattgtcattattggcataaacccgggactaatggctgcttacaaagggcatcattaccctggacctggaaaccatttttggaagtgtttgtttatgtcagggctcagtgaggtccagctgaaccatatggatgatcacactctaccagggaagtatggtattggatttaccaacatggtggaaaggaccacgcccggcagcaaagatctctccagtaaagaatttcgtgaaggaggacgtattctagtacagaaattacagaaatatcagccacgaatagcagtgtttaatggaaaatgtatttatgaaatttttagtaaagaagtttttggagtaaaggttaagaacttggaatttgggcttcagccccataagattccagacacagaaactctctgctatgttatgccatcatccagtgcaagatgtgctcagtttcctcgagcccaagacaaagttcattactacataaaactgaaggacttaagagatcagttgaaaggcattgaacgaaatatggacgttcaagaggtgcaatatacatttgacctacagcttgcccaagaggatgcaaagaagatggctgttaaggaagaaaaatatgatccaggttatgaggcagcatatggtggtgcttacggagaaaatccatgcagcagtgaaccttgtggcttctcttcaaatgggctaattgagagcgtggagttaagaggagaatcagctttcagtggcattcctaatgggcagtggatgacccagtcatttacagaccaaattccttcctttagtaatcactgtggaacacaagaacaggaagaagaaagccatgcttaagaatggtgcttctcagctctgcttaaatgctgcagttttaatgcagttgtcaacaagtagaacctcagtttgctaactgaagtgttttattagtattttactctagtggtgtaattgtaatgtagaacagttgtgtggtagtgtgaaccgtatgaacctaagtagtttggaagaaaaagtagggtttttgtatactagcttttgtatttgaattaattatcattccagctttttatatactatatttcatttatgaagaaattgattttcttttgggagtcacttttaatctgtaattttaaaatacaagtctgaatatttatagttgattcttaactgtgcataaacctagatataccattatcccttttatacctaagaagggcatgctaataattaccactgtcaaagaggcaaaggtgttgatttttgtatatgaagttaagcctcagtggagtctcatttgttagtttttagtggtaactaagggtaaactcagggttccctgagctatatgcacactcagacctctttgctttaccagtggtgttgtgagttgctcagtagtaaaaactggcccttacctgacagagccctggctttgacctgctcagccctgtgtgttaatcctctagtagccaattaactactctggggtggcaggttccagagaatgcagtagaccttttgccactcatctgtgttttacttgagacatgtaaatatgatagggaaggaactgaatttctccattcatatttataaccattctagttttatcttccttggctttaagagtgtgccatggaaagtgataagaaatgaacttctaggctaagcaaaaagatgctggagatatttgatactctcatttaaactggtgctttatgtacatgagatgtactaaaataagtaatatagaatttttcttgctaggtaaatccagtaagccaataattttaaagattctttatctgcatcattgctgtttgttactataaattaaatgaacctcatggaaaggttgaggtgtatacctttgtgattttctaatgagttttccatggtgctacaaataatccagactaccaggtctggtagatattaaagctgggtactaagaaatgttatttgcatcctctcagttactcctgaatattctgatttcatacgtacccagggagcatgctgttttgtcaatcaatataaaatatttatgaggtctcccccacccccaggaggttatatgattgctcttctctttataataagagaaacaaattcttattgtgaatcttaacatgctttttagctgtggctatgatggattttattttttcctaggtcaagctgtgtaaaagtcatttatgttatttaaatgatgtactgtactgctgtttacatggacgttttgtgcgggtgctttgaagtgccttgcatcagggattaggagcaattaaattattttttcacgggactgtgtaaagcatgtaactaggtattgctttggtatataactattgtagctttacaagagattgttttatttgaatggggaaaataccctttaaattatgacggacatccactagagatgggtttgaggattttccaagcgtgtaataatgatgtttttcctaacatgacagatgagtagtaaatgttgatatatcctatacatgacagtgtgagactttttcattaaataatattgaaagattttaaaattcatttgaaagtctgatggcttttacaataaaagatattaagaattgttatccttaacttaaaaaaaa

SEQ ID NO: 428316 - DNA, 2730 bp, Homo sapiens
gaagtgcagcacagaaagggggtccgtgggggacagtagaagcctggaggaggagcttgagtccagccactgtctgggtactgccagccatcgggcccaggtctctggggttgtcttaccgcagtgagtaccacgcggtactacagagaccggctgcccgtgtgcccggcaggtggagccgcccgcatcagcggcctcggggaatggaagcggagaacgcgggcagctattcccttcagcaagctcaagctttttatacgtttccatttcaacaactgatggctgaagctcctaatatggcagttgtgaatgaacagcaaatgccagaagaagttccagccccagctcctgctcaggaaccagtgcaagaggctccaaaaggaagaaaaagaaaacccagaacaacagaaccaaaacaaccagtggaacccaaaaaacctgttgagtcaaaaaaatctggcaagtctgcaaaatcaaaagaaaaacaagaaaaaattacagacacatttaaagtaaaaagaaaagtagaccgttttaatggtgtttcagaagctgaacttctgaccaagactctccccgatattttgaccttcaatctggacattgtcattattggcataaacccgggactaatggctgcttacaaagggcatcattaccctggacctggaaaccatttttggaagtgtttgtttatgtcagggctcagtgaggtccagctgaaccatatggatgatcacactctaccagggaagtatggtattggatttaccaacatggtggaaaggaccacgcccggcagcaaagatctctccagtaaagaatttcgtgaaggaggacgtattctagtacagaaattacagaaatatcagccacgaatagcagtgtttaatggaaaatgtatttatgaaatttttagtaaagaagtttttggagtaaaggttaagaacttggaatttgggcttcagccccataagattccagacacagaaactctctgctatgttatgccatcatccagtgcaagatgtgctcagtttcctcgagcccaagacaaagttcattactacataaaactgaaggacttaagagatcagttgaaaggcattgaacgaaatatggacgttcaagaggtgcaatatacatttgacctacagcttgcccaagaggatgcaaagaagatggctgttaaggaagaaaaatatgatccaggttatgaggcagcatatggtggtgcttacggagaaaatccatgcagcagtgaaccttgtggcttctcttcaaatgggctaattgagagcgtggagttaagaggagaatcagctttcagtggcattcctaatgggcagtggatgacccagtcatttacagaccaaattccttcctttagtaatcactgtggaacacaagaacaggaagaagaaagccatgcttaagaatggtgcttctcagctctgcttaaatgctgcagttttaatgcagttgtcaacaagtagaacctcagtttgctaactgaagtgttttattagtattttactctagtggtgtaattgtaatgtagaacagttgtgtggtagtgtgaaccgtatgaacctaagtagtttggaagaaaaagtagggtttttgtatactagcttttgtatttgaattaattatcattccagctttttatatactatatttcatttatgaagaaattgattttcttttgggagtcacttttaatctgtaattttaaaatacaagtctgaatatttatagttgattcttaactgtgcataaacctagatataccattatcccttttatacctaagaagggcatgctaataattaccactgtcaaagaggcaaaggtgttgatttttgtatatgaagttaagcctcagtggagtctcatttgttagtttttagtggtaactaagggtaaactcagggttccctgagctatatgcacactcagacctctttgctttaccagtggtgttgtgagttgctcagtagtaaaaactggcccttacctgacagagccctggctttgacctgctcagccctgtgtgttaatcctctagtagccaattaactactctggggtggcaggttccagagaatgcagtagaccttttgccactcatctgtgttttacttgagacatgtaaatatgatagggaaggaactgaatttctccattcatatttataaccattctagttttatcttccttggctttaagagtgtgccatggaaagtgataagaaatgaacttctaggctaagcaaaaagatgctggagatatttgatactctcatttaaactggtgctttatgtacatgagatgtactaaaataagtaatatagaatttttcttgctaggtaaatccagtaagccaataattttaaagattctttatctgcatcattgctgtttgttactataaattaaatgaacctcatggaaaggttgaggtgtatacctttgtgattttctaatgagttttccatggtgctacaaataatccagactaccaggtctggtagatattaaagctgggtactaagaaatgttatttgcatcctctcagttactcctgaatattctgatttcatacgtacccagggagcatgctgttttgtcaatcaataatattgaaagattttaaaattcatttgaaagtctgatggcttttacaataaaagatattaagaattgttatccttaacttaaaaaaaa

SEQ ID NO: 428317 - DNA, 889 bp, Homo sapiens
ccggtggcctgcgaccccgtaattgcctcggtgatgtcgtgggttcaagcagcctccttgatccagggccctggagacaaaggggacgtgtttgacgaagaagcagacgagtcgctcctggcgcagcgggaatggcagagtaacatgcaaagacgagtcaaagaaggttatagagatggaatagatgctggcaaagcagttactcttcaacagggcttcaatcaaggttataagaaaggtgcagaagtcattttaaactatggacgactccgaggaacattgagtgctttgctctcctggtgtcaccttcataataataattcaactttgatcaataaaataaacaatcttctggatgcagttggccagtgtgaagagtatgtgctcaaacatctgaaatcaatcactccaccgtcccatgttgtagatttattggactccattgaggatatggacctttgtcatgtagttccagctgagaaaaagattgatgaagctaaagatgaaagactctgtgaaaataatgctgagtttaacaaaaactgtagcaagagccatagtgggatagattgttcatatgtagaatgttgtagaacacaggagcatgcacattcagaaaacccaagccccacatggattttggaacagacagccagtttagttaaacagctgggcctatcagtagatgtattacaacacctcaaacaactataaaattaccttcccttttctaatgaaaataatgttcagaacatttggtttcctaacaatcgaaatttgtactggtttctgcatcaaacacctcaactgtagggttaccctttatggaagtttgaaattaacactattgtcttcaaaattaacactattaaatgtaatataagccttt

SEQ ID NO: 428318 - DNA, 812 bp, Homo sapiens
ccggtggcctgcgaccccgtaattgcctcggtgatgtcgtgggttcaagcagcctccttgatccagggccctggagacaaaggggacgtgtttgacgaagaagcagacgagtcgctcctggcgcagcgggaatggcagagtaacatgcaaagacgagtcaaagaaggttatagagatggaatagatgctggcaaagcagttactcttcaacagggcttcaatcaaggttataagaaaggtgcagaagtcattttaaactatggacgactccgaggaacattgagttggccagtgtgaagagtatgtgctcaaacatctgaaatcaatcactccaccgtcccatgttgtagatttattggactccattgaggatatggacctttgtcatgtagttccagctgagaaaaagattgatgaagctaaagatgaaagactctgtgaaaataatgctgagtttaacaaaaactgtagcaagagccatagtgggatagattgttcatatgtagaatgttgtagaacacaggagcatgcacattcagaaaacccaagccccacatggattttggaacagacagccagtttagttaaacagctgggcctatcagtagatgtattacaacacctcaaacaactataaaattaccttcccttttctaatgaaaataatgttcagaacatttggtttcctaacaatcgaaatttgtactggtttctgcatcaaacacctcaactgtagggttaccctttatggaagtttgaaattaacactattgtcttcaaaattaacactattaaatgtaatataagccttt

SEQ ID NO: 428319 - DNA, 897 bp, Homo sapiens
taggatttctcgatggttacttgaaagcgtgtaaaacaacaagacgcattctttgagcgcctacgggatgcgttagaaactgaggaccgaccaaaattaactatgtgtagactttgaacagtttgcagtttgttgaggatcacagggaaaggagctggagagaaacatacactatacttattatggctgtcaaaggacgtgtacgcagtttatatgggtggcttgaatgggtagggagcctaaagttaaggagtagtgttaatcaagacatattgaaaagatgaactaaagcatgctgtcagaggacaataagggaaagctaatgtggaatactggtgtctaggtaagggaatattaaagttggtttcttttttatttgttagatgtaactttttcatctctaatttgtctcactattcattgaaactaagcttaatttctgtgtgcagcctacagtatttctgggtgaggaccaaatagtgaggtccacatccacttaatatatttgccaaccattaaattgccgctaaagctgcagttgggaatctgccctgtttaatatttcagtagagtggtatttgcttagcccaaaaaccatgttgtcaattacaaaaatgctttatgtgagactggggccacactaataagtattgagcatcttttaaatgctgtggcaccgtgagagatgcagaacgaaatcactacccacagagcttttgcaggttagttgaatttaggtattatgcaaaatttctgaaaccagacttctcatcatccttttttttttaaacaatttcctctctctgctttgccctgtctcctcacccacccacaccattccaatcagttggcaagagcccagatgtgtaattttccatatatcctttttgtgaagac

SEQ ID NO: 428320 - DNA, 389 bp, Homo sapiens
ggagaagcatagtctgctttagttatattgttatgccatattatggtcagtaacacagtaaaggcctaattcatctgctttctaaattggttctgtacttttctagaaaagcctacatgtatatacttagttacagctgcacttctccattacttatttttaggaaggttatagagatggaatagatgctggcaaagcagttactcttcaacagggcttcaatcaaggttataagaaaggtgcagaagtcattttaaactatggacgactccgaggaacattgaggtaatttttaaagtctaaatgctgaatcattttaacctcaatactactggaggatgtttctgtataaataaagtgtttaaactgaaatgcttttcctggtgcta

SEQ ID NO: 428321 - DNA, 996 bp, Homo sapiens
ccggtggcctgcgaccccgtaattgcctcggtgatgtcgtgggttcaagcagcctccttgatccagggccctggagacaaaggggacgtgtttgacgaagaagcagacgagtcgctcctggcgcagcgggaatggcagagtaacatgcaaagacgagtcaaagaaggttatagagatggaatagatgctggcaaagcagttactcttcaacagggcttcaatcaaggttataagaaaggtgcagaagtcattttaaactatggacgactccgaggaacattgagtgctttgctctcctggtgtcaccttcataataataattcaactttgatcaataaaataaacaatcttctggatgcagttggccagtgtgaagagtatgtgctcaaacatctgaaatcaatcactccaccgtcccatgttgtagatttattggactccattgaggatatggacctttgtcatgtagttccagctgagaaaaagattgatgaagctaaagatgaaagactctgtgaaaataatgctgagtttaacaaaaactgtagcaagagccatagtgggatagattgttcatatgtagaatgttgtagaacacaggagcatgcacattcagaaaacccaagccccacatggattttggaacagacagccagtttagttaaacagctgggcctatcagtagatgtattacaacacctcaaacaactataaaattaccttcccttttctaatgaaaataatgttcagaacatttggtttcctaacaatcgaaatttgtactggtttctgcatcaaacacctcaactgtagggttaccctttatggaagtttgaaattaacactattgtcttcaaaataataattcaactttgatcaataaaataaacaatcttctggatgcagttggccagtgtgaagagtatgtgctcaaacatctgaaatcaatcactccaccgtccctgttgtagatttattgactccattgagtatccc

SEQ ID NO: 428322 - DNA, 906 bp, Homo sapiens
gctcttcaggtgattctaatgtgcatccatgattgagaattgctagttaagaagctgtttaatgtccttaaagaagaaactaatttttctttctcggagttgtattcatcttcaacagatattacatagtcataagagaaaaatataaaatcaggaaaagcgtatatagagttatgaaagaggggttatgaattataaacagttttatgattaagtccaatcgtttaattgttattgaaagatagtcttatatttttaagtcctattttgctatttaacccttgtttatacttttgttcagtgctttgctctcctggtgtcaccttcataataataattcaactttgatcaataaaataaacaatcttctggatgcagttggccagtgtgaagagtatgtgctcaaacatctgaaatcaatcactccaccgtcccatgttgtagatttattggactccattgaggatatggacctttgtcatgtagttccagctgagaaaaagattgatgaagctaaagatgaaagactctgtgaaaataatgctgagtttaacaaaaactgtagcaagagccatagtgggatagattgttcatatgtagaatgttgtagaacacaggagcatgcacattcagaaaacccaagccccacatggattttggaacagacagccagtttagttaaacagctgggcctatcagtagatgtattacaacacctcaaacaactataaaattaccttcccttttctaatgaaaataatgttcagaacatttggtttcctaacaatcgaaatttgtactggtttctgcatcaaacacctcaactgtagggttaccctttatggaagtttgaaattaacactattgtcttcaaaattaacactattaaatgtaatataagccttt

SEQ ID NO: 428323 - DNA, 835 bp, Homo sapiens
ccggtggcctgcgaccccgtaattgcctcggtgatgtcgtgggttcaagcagcctccttgatccagggccctggagacaaaggggacgtgtttgacgaagaagcagacgagtcgctcctggcgcagcgggaatggcagagtaacatgcaaagacgagtcaaagaaggttatagagatggaatagatgctggcaaagcagttactcttcaacagggcttcaatcaaggttataagaaaggtgcagaagtcattttaaactatggacgactccgaggaacattgagtgctttgctctcctggtgtcaccttcataataataattcaactttgatcaataatctgaaatcaatcactccaccgtcccatgttgtagatttattggactccattgaggatatggacctttgtcatgtagttccagctgagaaaaagattgatgaagctaaagatgaaagactctgtgaaaataatgctgagtttaacaaaaactgtagcaagagccatagtgggatagattgttcatatgtagaatgttgtagaacacaggagcatgcacattcagaaaacccaagccccacatggattttggaacagacagccagtttagttaaacagctgggcctatcagtagatgtattacaacacctcaaacaactataaaattaccttcccttttctaatgaaaataatgttcagaacatttggtttcctaacaatcgaaatttgtactggtttctgcatcaaacacctcaactgtagggttaccctttatggaagtttgaaattaacactattgtcttcaaaattaacactattaaatgtaatataagccttt

SEQ ID NO: 428324 - DNA, 4061 bp, Homo sapiens
  misc_feature (687)..(687): n is a, c, g, or t
  misc_feature (689)..(690): n is a, c, g, or t
  misc_feature (696)..(696): n is a, c, g, or t
  misc_feature (846)..(846): n is a, c, g, or t
gagcgcagagcgtgagccgcgacctccgcgcaggtggtcgcgccggtctccgcggaaatgttgtccaaagttcttccagtcctcctaggcatcttattgatcctccagtcgagaacatgtatacagagaagtgctcaaatcataagtgtacagctgatgagttgtcaaaaaatgaccacagcggtgtaaagaaagccaaatcaaggacccgaatgtgagcaggacctcagaagccccctttgtcactgcctcccagcaaaggcagcactatccggacttctaacaccatcggtgagtttcataccttggcagatggcctttaacatttttgtttaattcaattattcttactaatcttcttctttttcttggctgtggtgcatggctgtggagctcagggtggactcctgttgggcagccagttcctggatggctgtctgtgggtggaggactcctgcctttcctgtttagacacccacaaaggctgctctttagcctccttcccttcatccccttcccctgcccccagtgcaacgagtattacacaaccaacaaaaccgcaaaatattcccacaattttctggtcctctctgggagaggccgctctggcttttcctctcagccctggccctctgcctgctcctcactcctggttggtgctggtcaggctgactagaggccaaggcnanncacagngggccagcgctcagacataaatgccctcttcatttcacgtgtaacattcttttaaaatctaggtcttggttttgttgattttttcttaaataaaagagtgatcataaaagagggacagcatagaaagtccccaaagagcagcaaggtttnaaagaaattcacaagcctaatctgtcactgtcttataatttgctattaccagtcacaatttaactaggttttgtgttgaaaacttgttttggtttgcttctgtcccaagaggcactagctggggcccctacagagtgcagggcagagcttcatttttcgtttgaatgttctagggtcgagggacctcagactgaatcaaagaatgaagcctcttcccgtgatgttgtctatggcccccagccccagcctctggaaaatcagctcctctctgaggaaacaaagtcaactgagactgagactgggagcagagttggcaaactgccagaagcctctcgcatcctgaacactatcctgagtaattatgaccacaaactgcgccctggcattggagagaagcccactgtggtcactgttgagatctccgtcaacagccttggtcctctctctatcctagacatggaatacaccattgacatcatcttctcccagacctggtacgacgaacgcctctgttacaacgacacctttgagtctcttgttctgaatggcaatgtggtgagccagctatggatcccggacaccttttttaggaattctaagaggacccacgagcatgagatcaccatgcccaaccagatggtccgcatctacaaggatggcaaggtgttgtacacaattaggatgaccattgatgccggatgctcactccacatgctcagatttccaatggattctcactcttgccctctatctttctctagcttttcctatcctgagaatgagatgatctacaagtgggaaaatttcaagcttgaaatcaatgagaagaactcctggaagctcttccagtttgattttacaggagtgagcaacaaaactgaaataatcacaaccccagttggtgacttcatggtcatgacgattttcttcaatgtgagcaggcggtttggctatgttgcctttcaaaactatgtcccttcttccgtgaccacgatgctctcctgggtttccttttggatcaagacagagtctgctccagcccggacctctctagggatcacctctgttctgaccatgaccacgttgggcaccttttctcgtaagaatttcccgcgtgtctcctatatcacagccttggatttctatatcgccatctgcttcgtcttctgcttctgcgctctgttggagtttgctgtgctcaacttcctgatctacaaccagacaaaagcccatgcttctcctaaactccgccatcctcgtatcaatagccgtgcccatgcccgtacccgtgcacgttcccgagcctgtgcccgccaacatcaggaagcttttgtgtgccagattgtcaccactgagggaagtgatggagaggagcgcccgtcttgctcagcccagcagccccctagcccaggtagccctgagggtccccgcagcctctgctccaagctggcctgctgtgagtggtgcaagcgttttaagaagtacttctgcatggtccccgattgtgagggcagtacctggcagcagggccgcctctgcatccatgtctaccgcctggataactactcgagagttgttttcccagtgactttcttcttcttcaatgtgctctactggcttgtttgccttaacttgtaggtaccagctggtaccctgtggggcaacctctccagttccccaggaggtccaagccccttgccaagggagttgggggaaagcagcagcagcagcaggagcgactagagtttttcctgccccattccccaaacagaagcttgcagagggtttgtctttgctgcccctctcccctacctggcccattcactgagtcttctcagcagaccatttcaaattattaataaatgggccacctccctcttcttcaaggagcatccgtgatgctcagtgttcaaaaccacagccacttagtgatcagctccctaaaaccatgcctaagtacaggcggattagctatcttccaacaatgctgaccaccagacaattactgcatttttccagaagcccactattgcctttgtagtgctttcggcccagttctggcctcagcctcaaagtgcaccgactagttgcttgcctatacctggcacctcattaagatgctgggcagcagtataacaggaggaagagatccctctcctttggtcagattattatgttctcagttctctctccctgctacccctttctctgcagatagatagacactggcattatccctttaggaagaggggggggcagcaagagagcctatttgggacagcattcctctctctctgctgctgtgacatctccctctccttgctggctccatctttcgtctgcactaccaattcaatgcccttcatccaatgggtatctatttttgtgtgtgattatagtaactactccctgctttatatgccaccctcttccttctctttgacccctgtgactctttctgtaactttcccagtgacttcccctagccctgacccaggcactaggccttggtgacttcctggggccaagaaactaaggaaactcggctttgcaacaggcattactcgccattgattggtgcccacccagggcacactgtcggagttctatcacttgcttgacccctggacccataaaccagtccactgttatacccggggcactctaaccatcacaatcaatcaatcaaattcccttaaatttgtatggcactggaactttggcaaagcacttttgacaagttgtgtctgattggagcttcatgatagccttgtgacatctttagggcaggattcttatccccattttgcagatgaaaaccctgagtcacagatttctgtgggactgtggatctcactggaagctatccaagagcccactgtcaccttctagaccacatgatagggctagacagctcagttcaccatgattctcttctgtcacctctgctggcacaccagtggcaaggcccagaatggcgacctctctttagctcaatttctgggcctgaggtgctcagactgcccccaagatcaaatctctcctggctgtagtaacccagtggaatgaatttggacatgccccaatgcttctatatgctaagtgaaatctgtgtctgtaatttgttggggggtggatagggtggggtctccatctactttttgtcaccatcatctgaaatggggaaatatgtaaataaatatatcagcaaagca

SEQ ID NO: 428325 - DNA, 3237 bp, Homo sapiens
gagcgcagagcgtgagccgcgacctccgcgcaggtggtcgcgccggtctccgcggaaatgttgtccaaagttcttccagtcctcctaggcatcttattgatcctccagtcgagaacatgtatacagagaagtgctcaaatcataagtgtacagctgatgagttgtcaaaaaatgaccacagcggtgtaaagaaagccaaatcaaggacccgaatgtgagcaggacctcagaagccccctttgtcactgcctcccagcaaaggcagcactatccggacttctaacaccatcgggtcgagggacctcagactgaatcaaagaatgaagcctcttcccgtgatgttgtctatggcccccagccccagcctctggaaaatcagctcctctctgaggaaacaaagtcaactgagactgagactgggagcagagttggcaaactgccagaagcctctcgcatcctgaacactatcctgagtaattatgaccacaaactgcgccctggcattggagagaagcccactgtggtcactgttgagatctccgtcaacagccttggtcctctctctatcctagacatggaatacaccattgacatcatcttctcccagacctggaattctaagaggacccacgagcatgagatcaccatgcccaaccagatggtccgcatctacaaggatggcaaggtgttgtacacaattaggatgaccattgatgccggatgctcactccacatgctcagatttccaatggattctcactcttgccctctatctttctctagcttttcctatcctgagaatgagatgatctacaagtgggaaaatttcaagcttgaaatcaatgagaagaactcctggaagctcttccagtttgattttacaggagtgagcaacaaaactgaaataatcacaaccccagttggtgacttcatggtcatgacgattttcttcaatgtgagcaggcggtttggctatgttgcctttcaaaactatgtcccttcttccgtgaccacgatgctctcctgggtttccttttggatcaagacagagtctgctccagcccggacctctctagggatcacctctgttctgaccatgaccacgttgggcaccttttctcgtaagaatttcccgcgtgtctcctatatcacagccttggatttctatatcgccatctgcttcgtcttctgcttctgcgctctgttggagtttgctgtgctcaacttcctgatctacaaccagacaaaagcccatgcttctcctaaactccgccatcctcgtatcaatagccgtgcccatgcccgtacccgtgcacgttcccgagcctgtgcccgccaacatcaggaagcttttgtgtgccagattgtcaccactgagggaagtgatggagaggagcgcccgtcttgctcagcccagcagccccctagcccaggtagccctgagggtccccgcagcctctgctccaagctggcctgctgtgagtggtgcaagcgttttaagaagtacttctgcatggtccccgattgtgagggcagtacctggcagcagggccgcctctgcatccatgtctaccgcctggataactactcgagagttgttttcccagtgactttcttcttcttcaatgtgctctactggcttgtttgccttaacttgtaggtaccagctggtaccctgtggggcaacctctccagttccccaggaggtccaagccccttgccaagggagttgggggaaagcagcagcagcagcaggagcgactagagtttttcctgccccattccccaaacagaagcttgcagagggtttgtctttgctgcccctctcccctacctggcccattcactgagtcttctcagcagaccatttcaaattattaataaatgggccacctccctcttcttcaaggagcatccgtgatgctcagtgttcaaaaccacagccacttagtgatcagctccctaaaaccatgcctaagtacaggcggattagctatcttccaacaatgctgaccaccagacaattactgcatttttccagaagcccactattgcctttgtagtgctttcggcccagttctggcctcagcctcaaagtgcaccgactagttgcttgcctatacctggcacctcattaagatgctgggcagcagtataacaggaggaagagatccctctcctttggtcagattattatgttctcagttctctctccctgctacccctttctctgcagatagatagacactggcattatccctttaggaagaggggggggcagcaagagagcctatttgggacagcattcctctctctctgctgctgtgacatctccctctccttgctggctccatctttcgtctgcactaccaattcaatgcccttcatccaatgggtatctatttttgtgtgtgattatagtaactactccctgctttatatgccaccctcttccttctctttgacccctgtgactctttctgtaactttcccagtgacttcccctagccctgacccaggcactaggccttggtgacttcctggggccaagaaactaaggaaactcggctttgcaacaggcattactcgccattgattggtgcccacccagggcacactgtcggagttctatcacttgcttgacccctggacccataaaccagtccactgttatacccggggcactctaaccatcacaatcaatcaatcaaattcccttaaatttgtatggcactggaactttggcaaagcacttttgacaagttgtgtctgattggagcttcatgatagccttgtgacatctttagggcaggattcttatccccattttgcagatgaaaaccctgagtcacagatttctgtgggactgtggatctcactggaagctatccaagagcccactgtcaccttctagaccacatgatagggctagacagctcagttcaccatgattctcttctgtcacctctgctggcacaccagtggcaaggcccagaatggcgacctctctttagctcaatttctgggcctgaggtgctcagactgcccccaagatcaaatctctcctggctgtagtaacccagtggaatgaatttggacatgccccaatgcttctatatgctaagtgaaatctgtgtctgtaatttgttggggggtggatagggtggggtctccatctactttttgtcaccatcatctgaaatggggaaatatgtaaataaatatatcagcaaagca

SEQ ID NO: 428326 - DNA, 390 bp, Homo sapiens
  misc_feature (95)..(95): n is a, c, g, or t
tttcgtacgatcgagctcggtaccagcggaacaagcaactagtcggtgcactttgaggctgaggccagaactgggccgaaagcactacaaaggcnatagtgggcttctggaaaaatgcagtaattgtctggtggtcagcattgttggaagatagctaatccgcctgtacttaggcatggttttaggaagagatccctctcctttggtcagattattatgttctcagttctctctccctgctacccctttctctgcagatagatagacactggcattatccctttaggaagaggggggggcagcaagagagcctatttgggacagcattcctctctctctgctgctgtgacatctccctctccttgctgttccgctggtaccgagctcgat

SEQ ID NO: 428327 - DNA, 821 bp, Homo sapiens
ctgggtggatacggaagtgcttagggccagcctgatgaggctcctttctcccttccaggatgaccattgatgccggatgctcactccacatgctcagatttccaatggattctcactcttgccctctatctttctctagctgtgagtaccttcttaagtttctggggccccagaaacatgctgggctccttctttttctcatccttgccatttacatttttctgcctctgcttttcttctaaaatgctgccaaggttgtgcaggacttccatcctccaccctcatttcctttcctgccaacaatactgtgttgctcatcccttccacgtgcctctgaagcgtatctcaagtatgtctgctcctctccatctccactggcactaccttggtttaggcctttgttatcttccacctggacttttgccacatcttcactttgaaactgcacatgtccaaaatgaaattcattgtctcctccaaacctctaccaccaaaacaagtgtgttgcttctgggttcccatctgtctcattgaagaggaccatcactcacccagttgcgcaaatcaagaactttgatgttccctctccctcacctcctgcatctaatcaatcagcacatcctgttggtgtttcctcccagtctctatcgatgctgtctatttctctgcaccctgtacagctttgacttccacctgcgttaatttaattctgcctggattactacactggcctccttgacaacatgttgtcctcacagaaggaccagagtgacctagctgaagggtcacctaggttgggtcacttcttagtctcgaatctg

SEQ ID NO: 428328 - DNA, 499 bp, Homo sapiens
  misc_feature (492)..(494): n is a, c, g, or t
  misc_feature (496)..(499): n is a, c, g, or t
ccatgaaagaataaataaagaaataggattagatgctgaaactgtgtggtccaacacttacttgactcccctttcatcccctctgaccacttcctcccccgtcccatgcgcctgtttgacacttaccctctgctgcttctgcttcccttatagagaagcccactgtggtcactgttgagatctccgtcaacagccttggtcctctctctatcctagacatggtgagtactaagcttttttagtactatttcctagcccaggggctgacctatgggaccttccacagacttctgctttctgctctgtacttctgtaacaactccaataatttattttctggagggagaaagggattttttaaccactggtttgagaatgagactggaaaaggtaagtcccttgctacttgaagaggatcttcagaatcatgaccatatcttccagttttttcattcaaaatagaaataataaagcaatgttaaacaccacaannnannnn

SEQ ID NO: 428329 - DNA, 6175 bp, Homo sapiens
gtcttataattgctaagcacttacaactgtttgcagaggaaactgagactttgtaactatgtctcagtctcatctgcaaagaagtaagtgctttgccaagctccttgagaggttaggtaagtagataaagttctgctgctgtcggaatgtgcagctggctttttcatgcagacccttcagtttcgaggttacaactctgacctctttggatgactttggggaatggagctcgtgtgagttctccatacccagaaccaatccagtctggttgaatgggaagcaaagtccattgtagtgggaggtggaggctagagttctaatgtcagctagtttaaggctgggaaagtctggaggaagttacagcagctacactggctgctgcattgacatttatcttaaaggaacaagtctgaaaagcacagattcttatcaaaggcttcatggtggattccacatagacatagtggccactggttttctgaccttttctctgacaaagactaaaggggaaggtcctgggtatcttacacttcagctcccaattagatgtgagcaccttcacttatgttcctaggtgacctgaatgaggagccaagggacctccccagggtagctcccagagcaaccctggaaacactcttcacacatcctgaccaagttcagggcagtgaaggcactgccctcatcgtttccagaatgtggatggagccagtcacccaaccagccatttgtcgtgagaggcatcttgttctgctaccatgtgactaggcagaaaatctgcttttgtttcatttattgagtcagtctctggatgagggaaagctcatgctcatgtggctagagctttgcttgcacagtattaggcaggggcagagggctgggctaccttaaaaatacttgccctttttcttggggactctggggaagcggttttactacctttgacttgggagccttgctcttctgccagctaaccatgggcctgcctcttggttttctgcacctcagcttttcccggataggtggggaccatcatcaaaagtgacagagaagataaggcccagggctttcaagtcactagtggttccgtttagtagatgattgtgcattgtttcaaaatggtgccctagtgactacaaagccccagagccagcatcatcatcaaagcaatgacagtaggtaagcaccagacctccttgggagtgaggaggattcttgaggagaaaagaggtcttctttctcctctgctggagactagttgatctggagacgtggttccttcaatgtcagagttatctttgggactggtctcaaactcttccagttgggccctggggcaggtctctccatctggagcatacttacgtgctcggcgattaagggttcagaatgcagtggtagcctgctactctggccatcttggaccttgatccagagaatctctgcttcaggagcttctaagagagtccagccctgcctccagagagaggcttgcccttcactgatggctgtggagcctctgatggaatattattgctggtcaggaattcactgtcttacaaggaggtttccttcttctctagacagttctgttcatcaaaaaactctccctgttcttctgaaattggagtctctggaagttccacacattaagcttagttctttttccttggaactgtccaggttacattagtccagccactgtttcacaggaccgagattaaacgatcaacatcatcattcccggcatggatcatagtctgttgtagtctacatagccctagtttatttttcttcccttattcttcaaagctttgggtccattcattcttctagtcccagtcctctggacatggtctatttaattgtgtccctctgacactgcagtgaccaaccatgatctggtcaaagaggataagagtttgagcagaaaaccatctttagcatatatttttttgctttggttcatcagccccagatatattgttttccttacccgtgcttctctcactcctcaagaagaagaaagtgtgtgttagcatctttctcttgtccttcaagacaaattggcatctcttgacgagcggagaaggttcttttttggccagaataaataaaattaaaatagaatcatccaacagaataataaatcttcgtgcaacaagaatatattatataaacccagcaattttgcagggcctgggtataactaattagaagtgtcttaaattgcagtcaagatcccacggcaagaggacttttgataaatacattctggccagtaggcaagtgcgagggtggtccgtgcagcagctctggaggagttctatcccaaagctatactcaacacacaggtttcccactgacaacaggtcgctcccttgccttcttccagaagaatctgagaagctttgctccttgagtttcagtgctgccaaggtgagtacgaaaggctgctcttctcattcagctccagcccacccagacctgctgggcagttgatccactttccaaaataggaggacacacggacaggttagtgttctggtctgctttacaaagctgttgcctgacaggagcaagagttgctgagtgtctgctgggttccaggctgttctgagcttggatgggcaggggctaagccacagggcctgcatgagccctgccttgaagggacttaaaagacgacctaattataggcctaggaattttacagtattgcaactgcaatgtgatgctgaaagtggaaaatgatgtcctgggctcagagaaaagcccacaccagcctgggagtcatgatagcagcagagtgcttggggagggtgtgtcagagcataaagcagcatgaatgctacaaaagaagatgccaactagagatataggttgtcatcaggtcccggaggagccatgaccgtctagctgagagccatgaccaaggacacaatgtccaagtgactgtgaggacctcagtctgccctgtggatgtgtatgccacagacctgacttctggagggctgactgaaatgttcattttaagctttttcttctctttccctgaaacactcagtttgggttaggggtcatagactaagaccaaagagtccagggttagaatcttggtgtaaaattgcaggccatctcaggaaatctgtgagcagatgggattggctttgggtaaggtgcgtgtggaaaatgtcagtgggagccgggtcatggtgggcctttagcatcagattccagagtgcagatagtctgtatagctcatgtgaaacagggagccaccaaaactttggggagcaggctagtgccggttttgaccacctgtggagcagtgctcactcacgaaggcattttgccatcacatgaatgtgcagaaaggaggccaaaagcattctgtgcttctccaccacagcacagacttccctagtctcatttgctgagagtagacattctgagggccagcagtgcaggtgtgatgtgcctcagagggtatgaagcccttagtcagccatctggatatcagctgcgtgggcatgatatctagaaggctaattgattttttcactttcacctgactctcttgccaacctgcagagacagacattgggtgtaggacagtgaactgagaaggaagctattaagattctggccttggcttagctctcaactggccattggtcttgcagtaagtcttttttctgggcttcttctggtcctatttgtatgtattgcattgtcacatcatgcctctatcctagggaatactgtgagctgaaaaatgagacccttactgttcacgtcctgctaagggggaccgtcgtgtcagcactgtaatgcagtgatgttttttgtgtctttcaggtgacttcatggtcatgacgattttcttcaatgtgagcaggcggtttggctatgttgcctttcaaaactatgtcccttcttccgtgaccacgatgctctcctgggtttccttttggatcaagacagagtctgctccagcccggacctctctagggatcacctctgttctgaccatgaccacgttgggcaccttttctcgtaagaatttcccgcgtgtctcctatatcacagccttggatttctatatcgccatctgcttcgtcttctgcttctgcgctctgttggagtttgctgtgctcaacttcctgatctacaaccagacaaaagcccatgcttctcctaaactccgccatcctcgtatcaatagccgtgcccatgcccgtacccgtgcacgttcccgagcctgtgcccgccaacatcaggaagcttttgtgtgccagattgtcaccactgagggaagtgatggagaggagcgcccgtcttgctcagcccagcagccccctagcccaggtagccctgagggtccccgcagcctctgctccaagctggcctgctgtgagtggtgcaagcgttttaagaagtacttctgcatggtccccgattgtgagggcagtacctggcagcagggccgcctctgcatccatgtctaccgcctggataactactcgagagttgttttcccagtgactttcttcttcttcaatgtgctctactggcttgtttgccttaacttgtaggtaccagctggtaccctgtggggcaacctctccagttccccaggaggtccaagccccttgccaagggagttgggggaaagcagcagcagcagcaggagcgactagagtttttcctgccccattccccaaacagaagcttgcagagggtttgtctttgctgcccctctcccctacctggcccattcactgagtcttctcagcagaccatttcaaattattaataaatgggccacctccctcttcttcaaggagcatccgtgatgctcagtgttcaaaaccacagccacttagtgatcagctccctaaaaccatgcctaagtacaggcggattagctatcttccaacaatgctgaccaccagacaattactgcatttttccagaagcccactattgcctttgtagtgctttcggcccagttctggcctcagcctcaaagtgcaccgactagttgcttgcctatacctggcacctcattaagatgctgggcagcagtataacaggaggaagagatccctctcctttggtcagattattatgttctcagttctctctccctgctacccctttctctgcagatagatagacactggcattatccctttaggaagaggggggggcagcaagagagcctatttgggacagcattcctctctctctgctgctgtgacatctccctctccttgctggctccatctttcgtctgcactaccaattcaatgcccttcatccaatgggtatctatttttgtgtgtgattatagtaactactccctgctttatatgccaccctcttccttctctttgacccctgtgactctttctgtaactttcccagtgacttcccctagccctgacccaggcactaggccttggtgacttcctggggccaagaaactaaggaaactcggctttgcaacaggcattactcgccattgattggtgcccacccagggcacactgtcggagttctatcacttgcttgacccctggacccataaaccagtccactgttatacccggggcactctaaccatcacaatcaatcaatcaaattcccttaaatttgtatggcactggaactttggcaaagcacttttgacaagttgtgtctgattggagcttcatgatagccttgtgacatctttagggcaggattcttatccccattttgcagatgaaaaccctgagtcacagatttctgtgggactgtggatctcactggaagctatccaagagcccactgtcaccttctagaccacatgatagggctagacagctcagttcaccatgattctcttctgtcacctctgctggcacaccagtggcaaggcccagaatggcgacctctctttagctcaatttctgggcctgaggtgctcagactgcccccaagatcaaatctctcctggctgtagtaacccagtggaatgaatttggacatgccccaatgcttctatatgctaagtgaaatctgtgtctgtaatttgttggggggtggatagggtggggtctccatctactttttgtcaccatcatctgaaatggggaaatatgtaaataaatatatcagcaaagca

SEQ ID NO: 428330 - DNA, 4849 bp, Homo sapiens
gtcttataattgctaagcacttacaactgtttgcagaggaaactgagactttgtaactatgtctcagtctcatctgcaaagaagtaagtgctttgccaagctccttgagaggttaggtaagtagataaagttctgctgctgtcggaatgtgcagctggctttttcatgcagacccttcagtttcgaggttacaactctgacctctttggatgactttggggaatggagctcgtgtgagttctccatacccagaaccaatccagtctggttgaatgggaagcaaagtccattgtagtgggaggtggaggctagagttctaatgtcagctagtttaaggctgggaaagtctggaggaagttacagcagctacactggctgctgcattgacatttatcttaaaggaacaagtctgaaaagcacagattcttatcaaaggcttcatggtggattccacatagacatagtggccactggttttctgaccttttctctgacaaagactaaaggggaaggtcctgggtatcttacacttcagctcccaattagatgtgagcaccttcacttatgttcctaggtgacctgaatgaggagccaagggacctccccagggtagctcccagagcaaccctggaaacactcttcacacatcctgaccaagttcagggcagtgaaggcactgccctcatcgtttccagaatgtggatggagccagtcacccaaccagccatttgtcgtgagaggcatcttgttctgctaccatgtgactaggcagaaaatctgcttttgtttcatttattgagtcagtctctggatgagggaaagctcatgctcatgtggctagagctttgcttgcacagtattaggcaggggcagagggctgggctaccttaaaaatacttgccctttttcttggggactctggggaagcggttttactacctttgacttgggagccttgctcttctgccagctaaccatgggcctgcctcttggttttctgcacctcagcttttcccggataggtggggaccatcatcaaaagtgacagagaagataaggcccagggctttcaagtcactagtggttccgtttagtagatgattgtgcattgtttcaaaatggtgccctagtgactacaaagccccagagccagcatcatcatcaaagcaatgacagtaggtaagcaccagacctccttgggagtgaggaggattcttgaggagaaaagaggtcttctttctcctctgctggagactagttgatctggagacgtggttccttcaatgtcagagttatctttgggactggtctcaaactcttccagttgggccctggggcaggtctctccatctggagcatacttacgtgctcggcgattaagggttcagaatgcagtggtagcctgctactctggccatcttggaccttgatccagagaatctctgcttcaggagcttctaagagagtccagccctgcctccagagagaggcttgcccttcactgatggctgtggagcctctgatggaatattattgctggtcaggaattcactgtcttacaaggaggtttccttcttctctagacagttctgttcatcaaaaaactctccctgttcttctgaaattggagtctctggaagttccacacattaagcttagttctttttccttggaactgtccaggttacattagtccagccactgtttcacaggaccgagattaaacgatcaacatcatcattcccggcatggatcatagtctgttgtagtctacatagccctagtttatttttcttcccttattcttcaaagctttgggtccattcattcttctagtcccagtcctctggacatggtctatttaattgtgtccctctgacactgcagtgaccaaccatgatctggtcaaagaggataagagtttgagcagaaaaccatctttagcatatatttttttgctttggttcatcagccccagatatattgttttccttacccgtgcttctctcactcctcaagaagaagaaagtgtgtgttagcatctttctcttgtccttcaagacaaattggcatctcttgacgagcggagaaggttcttttttggccagaataaataaaattaaaatagaatcatccaacagaataataaatcttcgtgcaacaagaatatattatataaacccagcaattttgcagggcctgggtataactaattagaagtgtcttaaattgcagtcaagatcccacggcaagaggacttttgataaatacattctggccagtaggcaagtgcgagggtggtccgtgcagcagctctggaggagttctatcccaaagctatactcaacacacaggtttcccactgacaacaggtcgctcccttgccttcttccagaagaatctgagaagctttgctccttgagtttcagtgctgccaaggtgagtacgaaaggctgctcttctcattcagctccagcccacccagacctgctgggcagttgatccactttccaaaataggaggacacacggacaggtgacttcatggtcatgacgattttcttcaatgtgagcaggcggtttggctatgttgcctttcaaaactatgtcccttcttccgtgaccacgatgctctcctgggtttccttttggatcaagacagagtctgctccagcccggacctctctagggatcacctctgttctgaccatgaccacgttgggcaccttttctcgtaagaatttcccgcgtgtctcctatatcacagccttggatttctatatcgccatctgcttcgtcttctgcttctgcgctctgttggagtttgctgtgctcaacttcctgatctacaaccagacaaaagcccatgcttctcctaaactccgccatcctcgtatcaatagccgtgcccatgcccgtacccgtgcacgttcccgagcctgtgcccgccaacatcaggaagcttttgtgtgccagattgtcaccactgagggaagtgatggagaggagcgcccgtcttgctcagcccagcagccccctagcccaggtagccctgagggtccccgcagcctctgctccaagctggcctgctgtgagtggtgcaagcgttttaagaagtacttctgcatggtccccgattgtgagggcagtacctggcagcagggccgcctctgcatccatgtctaccgcctggataactactcgagagttgttttcccagtgactttcttcttcttcaatgtgctctactggcttgtttgccttaacttgtaggtaccagctggtaccctgtggggcaacctctccagttccccaggaggtccaagccccttgccaagggagttgggggaaagcagcagcagcagcaggagcgactagagtttttcctgccccattccccaaacagaagcttgcagagggtttgtctttgctgcccctctcccctacctggcccattcactgagtcttctcagcagaccatttcaaattattaataaatgggccacctccctcttcttcaaggagcatccgtgatgctcagtgttcaaaaccacagccacttagtgatcagctccctaaaaccatgcctaagtacaggcggattagctatcttccaacaatgctgaccaccagacaattactgcatttttccagaagcccactattgcctttgtagtgctttcggcccagttctggcctcagcctcaaagtgcaccgactagttgcttgcctatacctggcacctcattaagatgctgggcagcagtataacaggaggaagagatccctctcctttggtcagattattatgttctcagttctctctccctgctacccctttctctgcagatagatagacactggcattatccctttaggaagaggggggggcagcaagagagcctatttgggacagcattcctctctctctgctgctgtgacatctccctctccttgctggctccatctttcgtctgcactaccaattcaatgcccttcatccaatgggtatctatttttgtgtgtgattatagtaactactccctgctttatatgccaccctcttccttctctttgacccctgtgactctttctgtaactttcccagtgacttcccctagccctgacccaggcactaggccttggtgacttcctggggccaagaaactaaggaaactcggctttgcaacaggcattactcgccattgattggtgcccacccagggcacactgtcggagttctatcacttgcttgacccctggacccataaaccagtccactgttatacccggggcactctaaccatcacaatcaatcaatcaaattcccttaaatttgtatggcactggaactttggcaaagcacttttgacaagttgtgtctgattggagcttcatgatagccttgtgacatctttagggcaggattcttatccccattttgcagatgaaaaccctgagtcacagatttctgtgggactgtggatctcactggaagctatccaagagcccactgtcaccttctagaccacatgatagggctagacagctcagttcaccatgattctcttctgtcacctctgctggcacaccagtggcaaggcccagaatggcgacctctctttagctcaatttctgggcctgaggtgctcagactgcccccaagatcaaatctctcctggctgtagtaacccagtggaatgaatttggacatgccccaatgcttctatatgctaagtgaaatctgtgtctgtaatttgttggggggtggatagggtggggtctccatctactttttgtcaccatcatctgaaatggggaaatatgtaaataaatatatcagcaaagca

SEQ ID NO: 428331 - DNA, 1417 bp, Homo sapiens
cggaggactgtgtcccaagtcgggtctcttgctgccccccctcttcctaaagggataatgccagtgtctatctatctgcagagaaaggggtagcagggagagagaactgagaacataataatctgaccaaaggagagggatcttaaaaccatgcctaagtacaggcggattagctatcttccaacaatgctgaccaccagacaattactgcatttttccagaagcccactattgcctttgtagtgctttcggcccagttctggcctcagcctcaaagtgcaccgactagttgcttgcctatacctggcacctcattaagatgctgggcagcagtataacaggaggaagagatccctctcctttggtcagattattatgttctcagttctctctccctgctacccctttctctgcagatagatagacactggcattatccctttaggaagaggggggggcagcaagagagcctatttgggacagcattcctctctctctgctgctgtgacatctccctctccttgctggctccatctttcgtctgcactaccaattcaatgcccttcatccaatgggtatctatttttgtgtgtgattatagtaactactccctgctttatatgccaccctcttccttctctttgacccctgtgactctttctgtaactttcccagtgacttcccctagccctgacccaggcactaggccttggtgacttcctggggccaagaaactaaggaaactcggctttgcaacaggcattactcgccattgattggtgcccacccagggcacactgtcggagttctatcacttgcttgacccctggacccataaaccagtccactgttatacccggggcactctaaccatcacaatcaatcaatcaaattcccttaaatttgtatggcactggaactttggcaaagcacttttgacaagttgtgtctgattggagcttcatgatagccttgtgacatctttagggcaggattcttatccccattttgcagatgaaaaccctgagtcacagatttctgtgggactgtggatctcactggaagctatccaagagcccactgtcaccttctagaccacatgatagggctagacagctcagttcaccatgattctcttctgtcacctctgctggcacaccagtggcaaggcccagaatggcgacctctctttagctcaatttctgggcctgaggtgctcagactgcccccaagatcaaatctctcctggctgtagtaacccagtggaatgaatttggacatgccccaatgcttctatatgctaagtgaaatctgtgtctgtaatttgttggggggtggatagggtggggtctccatctactttttgtcaccatcatctgaaatggggaaatatgtaaataaatatatcagcaaagca

SEQ ID NO: 428332 - DNA, 1393 bp, Homo sapiens
cagagtccaaacagtgcccagagtccaaacagggcccaaagtccaaacagtgcccagagtccaaacagtgcccagaggccaaacagtgcccagagtccaaacagtgcccagagtccaaataaaaccatgcctaagtacaggcggattagctatcttccaacaatgctgaccaccagacaattactgcatttttccagaagcccactattgcctttgtagtgctttcggcccagttctggcctcagcctcaaagtgcaccgactagttgcttgcctatacctggcacctcattaagatgctgggcagcagtataacaggaggaagagatccctctcctttggtcagattattatgttctcagttctctctccctgctacccctttctctgcagatagatagacactggcattatccctttaggaagaggggggggcagcaagagagcctatttgggacagcattcctctctctctgctgctgtgacatctccctctccttgctggctccatctttcgtctgcactaccaattcaatgcccttcatccaatgggtatctatttttgtgtgtgattatagtaactactccctgctttatatgccaccctcttccttctctttgacccctgtgactctttctgtaactttcccagtgacttcccctagccctgacccaggcactaggccttggtgacttcctggggccaagaaactaaggaaactcggctttgcaacaggcattactcgccattgattggtgcccacccagggcacactgtcggagttctatcacttgcttgacccctggacccataaaccagtccactgttatacccggggcactctaaccatcacaatcaatcaatcaaattcccttaaatttgtatggcactggaactttggcaaagcacttttgacaagttgtgtctgattggagcttcatgatagccttgtgacatctttagggcaggattcttatccccattttgcagatgaaaaccctgagtcacagatttctgtgggactgtggatctcactggaagctatccaagagcccactgtcaccttctagaccacatgatagggctagacagctcagttcaccatgattctcttctgtcacctctgctggcacaccagtggcaaggcccagaatggcgacctctctttagctcaatttctgggcctgaggtgctcagactgcccccaagatcaaatctctcctggctgtagtaacccagtggaatgaatttggacatgccccaatgcttctatatgctaagtgaaatctgtgtctgtaatttgttggggggtggatagggtggggtctccatctactttttgtcaccatcatctgaaatggggaaatatgtaaataaatatatcagcaaagca

SEQ ID NO: 428333 - DNA, 1258 bp, Homo sapiens
  misc_feature (95)..(95): n is a, c, g, or t
tttcgtacgatcgagctcggtaccagcggaacaagcaactagtcggtgcactttgaggctgaggccagaactgggccgaaagcactacaaaggcnatagtgggcttctggaaaaatgcagtaattgtctggtggtcagcattgttggaagatagctaatccgcctgtacttaggcatggttttaggaagagatccctctcctttggtcagattattatgttctcagttctctctccctgctacccctttctctgcagatagatagacactggcattatccctttaggaagaggggggggcagcaagagagcctatttgggacagcattcctctctctctgctgctgtgacatctccctctccttgctggctccatctttcgtctgcactaccaattcaatgcccttcatccaatgggtatctatttttgtgtgtgattatagtaactactccctgctttatatgccaccctcttccttctctttgacccctgtgactctttctgtaactttcccagtgacttcccctagccctgacccaggcactaggccttggtgacttcctggggccaagaaactaaggaaactcggctttgcaacaggcattactcgccattgattggtgcccacccagggcacactgtcggagttctatcacttgcttgacccctggacccataaaccagtccactgttatacccggggcactctaaccatcacaatcaatcaatcaaattcccttaaatttgtatggcactggaactttggcaaagcacttttgacaagttgtgtctgattggagcttcatgatagccttgtgacatctttagggcaggattcttatccccattttgcagatgaaaaccctgagtcacagatttctgtgggactgtggatctcactggaagctatccaagagcccactgtcaccttctagaccacatgatagggctagacagctcagttcaccatgattctcttctgtcacctctgctggcacaccagtggcaaggcccagaatggcgacctctctttagctcaatttctgggcctgaggtgctcagactgcccccaagatcaaatctctcctggctgtagtaacccagtggaatgaatttggacatgccccaatgcttctatatgctaagtgaaatctgtgtctgtaatttgttggggggtggatagggtggggtctccatctactttttgtcaccatcatctgaaatggggaaatatgtaaataaatatatcagcaaagca

SEQ ID NO: 428334 - DNA, 5161 bp, Homo sapiens
gtcttataattgctaagcacttacaactgtttgcagaggaaactgagactttgtaactatgtctcagtctcatctgcaaagaagtaagtgctttgccaagctccttgagaggttaggtaagtagataaagttctgctgctgtcggaatgtgcagctggctttttcatgcagacccttcagtttcgaggttacaactctgacctctttggatgactttggggaatggagctcgtgtgagttctccatacccagaaccaatccagtctggttgaatgggaagcaaagtccattgtagtgggaggtggaggctagagttctaatgtcagctagtttaaggctgggaaagtctggaggaagttacagcagctacactggctgctgcattgacatttatcttaaaggaacaagtctgaaaagcacagattcttatcaaaggcttcatggtggattccacatagacatagtggccactggttttctgaccttttctctgacaaagactaaaggggaaggtcctgggtatcttacacttcagctcccaattagatgtgagcaccttcacttatgttcctaggtgacctgaatgaggagccaagggacctccccagggtagctcccagagcaaccctggaaacactcttcacacatcctgaccaagttcagggcagtgaaggcactgccctcatcgtttccagaatgtggatggagccagtcacccaaccagccatttgtcgtgagaggcatcttgttctgctaccatgtgactaggcagaaaatctgcttttgtttcatttattgagtcagtctctggatgagggaaagctcatgctcatgtggctagagctttgcttgcacagtattaggcaggggcagagggctgggctaccttaaaaatacttgccctttttcttggggactctggggaagcggttttactacctttgacttgggagccttgctcttctgccagctaaccatgggcctgcctcttggttttctgcacctcagcttttcccggataggtggggaccatcatcaaaagtgacagagaagataaggcccagggctttcaagtcactagtggttccgtttagtagatgattgtgcattgtttcaaaatggtgccctagtgactacaaagccccagagccagcatcatcatcaaagcaatgacagtaggtaagcaccagacctccttgggagtgaggaggattcttgaggagaaaagaggtcttctttctcctctgctggagactagttgatctggagacgtggttccttcaatgtcagagttatctttgggactggtctcaaactcttccagttgggccctggggcaggtctctccatctggagcatacttacgtgctcggcgattaagggttcagaatgcagtggtagcctgctactctggccatcttggaccttgatccagagaatctctgcttcaggagcttctaagagagtccagccctgcctccagagagaggcttgcccttcactgatggctgtggagcctctgatggaatattattgctggtcaggaattcactgtcttacaaggaggtttccttcttctctagacagttctgttcatcaaaaaactctccctgttcttctgaaattggagtctctggaagttccacacattaagcttagttctttttccttggaactgtccaggttacattagtccagccactgtttcacaggaccgagattaaacgatcaacatcatcattcccggcatggatcatagtctgttgtagtctacatagccctagtttatttttcttcccttattcttcaaagctttgggtccattcattcttctagtcccagtcctctggacatggtctatttaattgtgtccctctgacactgcagtgaccaaccatgatctggtcaaagaggataagagtttgagcagaaaaccatctttagcatatatttttttgctttggttcatcagccccagatatattgttttccttacccgtgcttctctcactcctcaagaagaagaaagtgtgtgttagcatctttctcttgtccttcaagacaaattggcatctcttgacgagcggagaaggttcttttttggccagaataaataaaattaaaatagaatcatccaacagaataataaatcttcgtgcaacaagaatatattatataaacccagcaattttgcagggcctgggtataactaattagaagtgtcttaaattgcagtcaagatcccacggcaagaggacttttgataaatacattctggccagtaggcaagtgcgagggtggtccgtgcagcagctctggaggagttctatcccaaagctatactcaacacacaggtttcccactgacaacaggtcgctcccttgccttcttccagaagaatctgagaagctttgctccttgagtttcagtgctgccaaggtgagtacgaaaggctgctcttctcattcagctccagcccacccagacctgctgggcagttgatccactttccaaaataggaggacacacggacaggttagtgttctggtctgctttacaaagctgttgcctgacaggagcaagagttgctgagtgtctgctgggttccaggctgttctgagcttggatgggcaggggctaagccacagggcctgcatgagccctgccttgaagggacttaaaagacgacctaattataggcctaggaattttacagtattgcaactgcaatgtgatgctgaaagtggaaaatgatgtcctgggctcagagaaaagcccacaccagcctgggagtcatgatagcagcagagtgcttggggagggtgtgtcagagcataaagcagcatgaatgctacaaaagaagatgccaactagagatataggttgtcatcaggtcccggaggagccatgaccgtctagctgagagccatgaccaaggacacaatgtccaagtgactgtgaggacctcagtctgccctgtggatgtgtatgccacagacctgacttctggagggctgactgaaatgttcattttaagctttttcttctctttccctgaaacactcagtttgggttaggggtcatagactaagaccaaagagtccagggttagaatcttggtgtaaaattgcaggccatctcaggaaatctgtgagcagatgggattggctttgggtaaggtgcgtgtggaaaatgtcagtgggagccgggtcatggtgggcctttagcatcagattccagagtgcagatagtctgtatagctcatgtgaaacagggagccaccaaaactttggggagcaggctagtgccggttttgaccacctgtggagcagtgctcactcacgaaggcattttgccatcacatgaatgtgcagaaaggaggccaaaagcattctgtgcttctccaccacagcacagacttccctagtctcatttgctgagagtagacattctgagggccagcagtgcaggtgtgatgtgcctcagagggtatgaagcccttagtcagccatctggatatcagctgcgtgggcatgatatctagaaggctaattgattttttcactttcacctgactctcttgccaacctgcagagacagacattgggtgtaggacagtgaactgagaaggaagctattaagattctggccttggcttagctctcaactggccattggtcttgcagtaagtcttttttctgggcttcttctggtcctatttgtatgtattgcattgtcacatcatgcctctatcctagggaatactgtgagctgaaaaatgagacccttactgttcacgtcctgctaagggggaccgtcgtgtcagcactgtaatgcagtgatgttttttgtgtctttcaggtgacttcatggtcatgacgattttcttcaatgtgagcaggcggtttggctatgttgcctttcaaaactatgtcccttcttccgtgaccacgatgctctcctgggtttccttttggatcaagacagagtctgctccagcccggacctctctagggatcacctctgttctgaccatgaccacgttgggcaccttttctcgtaagaatttcccgcgtgtctcctatatcacagccttggatttctatatcgccatctgcttcgtcttctgcttctgcgctctgttggagtttgctgtgctcaacttcctgatctacaaccagacaaaagcccatgcttctcctaaactccgccatcctcgtatcaatagccgtgcccatgcccgtacccgtgcacgttcccgagcctgtgcccgccaacatcaggaagcttttgtgtgccagattgtcaccactgagggaagtgatggagaggagcgcccgtcttgctcagcccagcagccccctagcccaggtagccctgagggtccccgcagcctctgctccaagctggcctgctgtgagtggtgcaagcgttttaagaagtacttctgcatggtccccgattgtgagggcagtacctggcagcagggccgcctctgcatccatgtctaccgcctggataactactcgagagttgttttcccagtgactttcttcttcttcaatgtgctctactggcttgtttgccttaacttgtaggtaccagctggtaccctgtggggcaacctctccagttccccaggaggtccaagccccttgccaagggagttgggggaaagcagcagcagcagcaggagcgactagagtttttcctgccccattccccaaacagaagcttgcagagggtttgtctttgctgcccctctcccctacctggcccattcactgagtcttctcagcagaccatttcaaattattaataaatgggccacctccctcttcttcaaggagcatccgtgatgctcagtgttcaaaaccacagccacttagtgatcagctccctaaaaccatgcctaagtacaggcggattagctatcttccaacaatgctgaccaccagacaattactgcatttttccagaagcccactattgcctttgtagtaatatggcggataaagagcttttgtcctggtagctgaaacttttcattaatttgtccaagaatactgtgccggtgggttagagtccgcagaacagacaagtagagactctcctgaacggtaataggtggtgcatcgataacaccggtacgagctcatcc

SEQ ID NO: 428335 - DNA, 4204 bp, Homo sapiens
gtcttataattgctaagcacttacaactgtttgcagaggaaactgagactttgtaactatgtctcagtctcatctgcaaagaagtaagtgctttgccaagctccttgagaggttaggtaagtagataaagttctgctgctgtcggaatgtgcagctggctttttcatgcagacccttcagtttcgaggttacaactctgacctctttggatgactttggggaatggagctcgtgtgagttctccatacccagaaccaatccagtctggttgaatgggaagcaaagtccattgtagtgggaggtggaggctagagttctaatgtcagctagtttaaggctgggaaagtctggaggaagttacagcagctacactggctgctgcattgacatttatcttaaaggaacaagtctgaaaagcacagattcttatcaaaggcttcatggtggattccacatagacatagtggccactggttttctgaccttttctctgacaaagactaaaggggaaggtcctgggtatcttacacttcagctcccaattagatgtgagcaccttcacttatgttcctaggtgacctgaatgaggagccaagggacctccccagggtagctcccagagcaaccctggaaacactcttcacacatcctgaccaagttcagggcagtgaaggcactgccctcatcgtttccagaatgtggatggagccagtcacccaaccagccatttgtcgtgagaggcatcttgttctgctaccatgtgactaggcagaaaatctgcttttgtttcatttattgagtcagtctctggatgagggaaagctcatgctcatgtggctagagctttgcttgcacagtattaggcaggggcagagggctgggctaccttaaaaatacttgccctttttcttggggactctggggaagcggttttactacctttgacttgggagccttgctcttctgccagctaaccatgggcctgcctcttggttttctgcacctcagcttttcccggataggtggggaccatcatcaaaagtgacagagaagataaggcccagggctttcaagtcactagtggttccgtttagtagatgattgtgcattgtttcaaaatggtgccctagtgactacaaagccccagagccagcatcatcatcaaagcaatgacagtaggtaagcaccagacctccttgggagtgaggaggattcttgaggagaaaagaggtcttctttctcctctgctggagactagttgatctggagacgtggttccttcaatgtcagagttatctttgggactggtctcaaactcttccagttgggccctggggcaggtctctccatctggagcatacttacgtgctcggcgattaagggttcagaatgcagtggtagcctgctactctggccatcttggaccttgatccagagaatctctgcttcaggagcttctaagagagtccagccctgcctccagagagaggcttgcccttcactgatggctgtggagcctctgatggaatattattgctggtcaggaattcactgtcttacaaggaggtttccttcttctctagacagttctgttcatcaaaaaactctccctgttcttctgaaattggagtctctggaagttccacacattaagcttagttctttttccttggaactgtccaggttacattagtccagccactgtttcacaggaccgagattaaacgatcaacatcatcattcccggcatggatcatagtctgttgtagtctacatagccctagtttatttttcttcccttattcttcaaagctttgggtccattcattcttctagtcccagtcctctggacatggtctatttaattgtgtccctctgacactgcagtgaccaaccatgatctggtcaaagaggataagagtttgagcagaaaaccatctttagcatatatttttttgctttggttcatcagccccagatatattgttttccttacccgtgcttctctcactcctcaagaagaagaaagtgtgtgttagcatctttctcttgtccttcaagacaaattggcatctcttgacgagcggagaaggttcttttttggccagaataaataaaattaaaatagaatcatccaacagaataataaatcttcgtgcaacaagaatatattatataaacccagcaattttgcagggcctgggtataactaattagaagtgtcttaaattgcagtcaagatcccacggcaagaggacttttgataaatacattctggccagtaggcaagtgcgagggtggtccgtgcagcagctctggaggagttctatcccaaagctatactcaacacacaggtttcccactgacaacaggtcgctcccttgccttcttccagaagaatctgagaagctttgctccttgagtttcagtgctgccaaggtgagtacgaaaggctgctcttctcattcagctccagcccacccagacctgctgggcagttgatccactttccaaaataggaggacacacggacaggttagtgttctggtctgctttacaaagctgttgcctgacaggagcaagagttgctgagtgtctgctgggttccaggctgttctgagcttggatgggcaggggctaagccacagggcctgcatgagccctgccttgaagggacttaaaagacgacctaattataggcctaggaattttacagtattgcaactgcaatgtgatgctgaaagtggaaaatgatgtcctgggctcagagaaaagcccacaccagcctgggagtcatgatagcagcagagtgcttggggagggtgtgtcagagcataaagcagcatgaatgctacaaaagaagatgccaactagagatataggttgtcatcaggtcccggaggagccatgaccgtctagctgagagccatgaccaaggacacaatgtccaagtgactgtgaggacctcagtctgccctgtggatgtgtatgccacagacctgacttctggagggctgactgaaatgttcattttaagctttttcttctctttccctgaaacactcagtttgggttaggggtcatagactaagaccaaagagtccagggttagaatcttggtgtaaaattgcaggccatctcaggaaatctgtgagcagatgggattggctttgggtaaggtgcgtgtggaaaatgtcagtgggagccgggtcatggtgggcctttagcatcagattccagagtgcagatagtctgtatagctcatgtgaaacagggagccaccaaaactttggggagcaggctagtgccggttttgaccacctgtggagcagtgctcactcacgaaggcattttgccatcacatgaatgtgcagaaaggaggccaaaagcattctgtgcttctccaccacagcacagacttccctagtctcatttgctgagagtagacattctgagggccagcagtgcaggtgtgatgtgcctcagagggtatgaagcccttagtcagccatctggatatcagctgcgtgggcatgatatctagaaggctaattgattttttcactttcacctgactctcttgccaacctgcagagacagacattgggtgtaggacagtgaactgagaaggaagctattaagattctggccttggcttagctctcaactggccattggtcttgcagtaagtcttttttctgggcttcttctggtcctatttgtatgtattgcattgtcacatcatgcctctatcctagggaatactgtgagctgaaaaatgagacccttactgttcacgtcctgctaagggggaccgtcgtgtcagcactgtaatgcagtgatgttttttgtgtctttcaggtgacttcatggtcatgacgattttcttcaatgtgagcaggcggtttggctatgttgcctttcaaaactatgtcccttcttccgtgaccacgatgctctcctgggtttccttttggatcaagacagagtctgctccagcccggacctctctagggatcacctctgttctgaccatgaccacgttgggcaccttttctcgtaagaatttcccgcgtgtctcctatatcacagccttggatttctatatcgccatctgcttcgtcttctgcttctgcgctctgttggagtttgctgtgctcaacttcctgatctacgaatcctgggatcctctagatcaccatcc

SEQ ID NO: 428336 - DNA, 1583 bp, Homo sapiens
  misc_feature (687)..(687): n is a, c, g, or t
  misc_feature (689)..(690): n is a, c, g, or t
  misc_feature (696)..(696): n is a, c, g, or t
  misc_feature (846)..(846): n is a, c, g, or t
  misc_feature (1576)..(1578): n is a, c, g, or t
  misc_feature (1580)..(1583): n is a, c, g, or t
gagcgcagagcgtgagccgcgacctccgcgcaggtggtcgcgccggtctccgcggaaatgttgtccaaagttcttccagtcctcctaggcatcttattgatcctccagtcgagaacatgtatacagagaagtgctcaaatcataagtgtacagctgatgagttgtcaaaaaatgaccacagcggtgtaaagaaagccaaatcaaggacccgaatgtgagcaggacctcagaagccccctttgtcactgcctcccagcaaaggcagcactatccggacttctaacaccatcggtgagtttcataccttggcagatggcctttaacatttttgtttaattcaattattcttactaatcttcttctttttcttggctgtggtgcatggctgtggagctcagggtggactcctgttgggcagccagttcctggatggctgtctgtgggtggaggactcctgcctttcctgtttagacacccacaaaggctgctctttagcctccttcccttcatccccttcccctgcccccagtgcaacgagtattacacaaccaacaaaaccgcaaaatattcccacaattttctggtcctctctgggagaggccgctctggcttttcctctcagccctggccctctgcctgctcctcactcctggttggtgctggtcaggctgactagaggccaaggcnanncacagngggccagcgctcagacataaatgccctcttcatttcacgtgtaacattcttttaaaatctaggtcttggttttgttgattttttcttaaataaaagagtgatcataaaagagggacagcatagaaagtccccaaagagcagcaaggtttnaaagaaattcacaagcctaatctgtcactgtcttataatttgctattaccagtcacaatttaactaggttttgtgttgaaaacttgttttggtttgcttctgtcccaagaggcactagctggggcccctacagagtgcagggcagagcttcatttttcgtttgaatgttctagggtcgagggacctcagactgaatcaaagaatgaagcctcttcccgtgatgttgtctatggcccccagccccagcctctggaaaatcagctcctctctgaggaaacaaagtcaactgagactgagactgggagcagagttggcaaactgccagaagcctctcgcatcctgaacactatcctgagtaattatgaccacaaactgcgccctggcattggagagaagcccactgtggtcactgttgagatctccgtcaacagccttggtcctctctctatcctagacatggtgagtactaagcttttttagtactatttcctagcccaggggctgacctatgggaccttccacagacttctgctttctgctctgtacttctgtaacaactccaataatttattttctggagggagaaagggattttttaaccactggtttgagaatgagactggaaaaggtaagtcccttgctacttgaagaggatcttcagaatcatgaccatatcttccagttttttcattcaaaatagaaataataaagcaatgttaaacaccacaannnannnn

SEQ ID NO: 428337 - DNA, 396 bp, Homo sapiens
caaggtgttgtacacaattaggtatgtcaagcctctggagtctcacttcctggaattctctctccccttctgataattttagctaaagatccatgggcagagatctcatcctgaatgatacctctaagggcctgtccagctttcctagaccatgagctcagcccccttatgtaacagatatagaggcctcaaaatagaaagatattgcttaaagccacacaccaagtttgtggcagagctggaactggtactcagttacttggctccgagtccagagctccctcaactaggatgtgccagtatgactgcattatctagacaattccatcctaagtgggcactcgatacaaagatacgtccacagtggtggaattgttcaggcagagcagcagcacg

SEQ ID NO: 428338 - DNA, 3155 bp, Homo sapiens
gagcgcagagcgtgagccgcgacctccgcgcaggtggtcgcgccggtctccgcggaaatgttgtccaaagttcttccagtcctcctaggcatcttattgatcctccagtcgagggtcgagggacctcagactgaatcaaagaatgaagcctcttcccgtgatgttgtctatggcccccagccccagcctctggaaaatcagctcctctctgaggaaacaaagtcaactgagactgagactgggagcagagttggcaaactgccagaagcctctcgcatcctgaacactatcctgagtaattatgaccacaaactgcgccctggcattggagagaagcccactgtggtcactgttgagatctccgtcaacagccttggtcctctctctatcctagacatggaatacaccattgacatcatcttctcccagacctggtacgacgaacgcctctgttacaacgacacctttgagtctcttgttctgaatggcaatgtggtgagccagctatggatcccggacaccttttttaggaattctaagaggacccacgagcatgagatcaccatgcccaaccagatggtccgcatctacaaggatggcaaggtgttgtacacaattaggatgaccattgatgccggatgctcactccacatgctcagatttccaatggattctcactcttgccctctatctttctctagcttttcctatcctgagaatgagatgatctacaagtgggaaaatttcaagcttgaaatcaatgagaagaactcctggaagctcttccagtttgattttacaggagtgagcaacaaaactgaaataatcacaaccccagttggtgacttcatggtcatgacgattttcttcaatgtgagcaggcggtttggctatgttgcctttcaaaactatgtcccttcttccgtgaccacgatgctctcctgggtttccttttggatcaagacagagtctgctccagcccggacctctctagggatcacctctgttctgaccatgaccacgttgggcaccttttctcgtaagaatttcccgcgtgtctcctatatcacagccttggatttctatatcgccatctgcttcgtcttctgcttctgcgctctgttggagtttgctgtgctcaacttcctgatctacaaccagacaaaagcccatgcttctcctaaactccgccatcctcgtatcaatagccgtgcccatgcccgtacccgtgcacgttcccgagcctgtgcccgccaacatcaggaagcttttgtgtgccagattgtcaccactgagggaagtgatggagaggagcgcccgtcttgctcagcccagcagccccctagcccaggtagccctgagggtccccgcagcctctgctccaagctggcctgctgtgagtggtgcaagcgttttaagaagtacttctgcatggtccccgattgtgagggcagtacctggcagcagggccgcctctgcatccatgtctaccgcctggataactactcgagagttgttttcccagtgactttcttcttcttcaatgtgctctactggcttgtttgccttaacttgtaggtaccagctggtaccctgtggggcaacctctccagttccccaggaggtccaagccccttgccaagggagttgggggaaagcagcagcagcagcaggagcgactagagtttttcctgccccattccccaaacagaagcttgcagagggtttgtctttgctgcccctctcccctacctggcccattcactgagtcttctcagcagaccatttcaaattattaataaatgggccacctccctcttcttcaaggagcatccgtgatgctcagtgttcaaaaccacagccacttagtgatcagctccctaaaaccatgcctaagtacaggcggattagctatcttccaacaatgctgaccaccagacaattactgcatttttccagaagcccactattgcctttgtagtgctttcggcccagttctggcctcagcctcaaagtgcaccgactagttgcttgcctatacctggcacctcattaagatgctgggcagcagtataacaggaggaagagatccctctcctttggtcagattattatgttctcagttctctctccctgctacccctttctctgcagatagatagacactggcattatccctttaggaagaggggggggcagcaagagagcctatttgggacagcattcctctctctctgctgctgtgacatctccctctccttgctggctccatctttcgtctgcactaccaattcaatgcccttcatccaatgggtatctatttttgtgtgtgattatagtaactactccctgctttatatgccaccctcttccttctctttgacccctgtgactctttctgtaactttcccagtgacttcccctagccctgacccaggcactaggccttggtgacttcctggggccaagaaactaaggaaactcggctttgcaacaggcattactcgccattgattggtgcccacccagggcacactgtcggagttctatcacttgcttgacccctggacccataaaccagtccactgttatacccggggcactctaaccatcacaatcaatcaatcaaattcccttaaatttgtatggcactggaactttggcaaagcacttttgacaagttgtgtctgattggagcttcatgatagccttgtgacatctttagggcaggattcttatccccattttgcagatgaaaaccctgagtcacagatttctgtgggactgtggatctcactggaagctatccaagagcccactgtcaccttctagaccacatgatagggctagacagctcagttcaccatgattctcttctgtcacctctgctggcacaccagtggcaaggcccagaatggcgacctctctttagctcaatttctgggcctgaggtgctcagactgcccccaagatcaaatctctcctggctgtagtaacccagtggaatgaatttggacatgccccaatgcttctatatgctaagtgaaatctgtgtctgtaatttgttggggggtggatagggtggggtctccatctactttttgtcaccatcatctgaaatggggaaatatgtaaataaatatatcagcaaagca

SEQ ID NO: 428339 - DNA, 3333 bp, Homo sapiens
gagcgcagagcgtgagccgcgacctccgcgcaggtggtcgcgccggtctccgcggaaatgttgtccaaagttcttccagtcctcctaggcatcttattgatcctccagtcgagaacatgtatacagagaagtgctcaaatcataagtgtacagctgatgagttgtcaaaaaatgaccacagcggtgtaaagaaagccaaatcaaggacccgaatgtgagcaggacctcagaagccccctttgtcactgcctcccagcaaaggcagcactatccggacttctaacaccatcgggtcgagggacctcagactgaatcaaagaatgaagcctcttcccgtgatgttgtctatggcccccagccccagcctctggaaaatcagctcctctctgaggaaacaaagtcaactgagactgagactgggagcagagttggcaaactgccagaagcctctcgcatcctgaacactatcctgagtaattatgaccacaaactgcgccctggcattggagagaagcccactgtggtcactgttgagatctccgtcaacagccttggtcctctctctatcctagacatggaatacaccattgacatcatcttctcccagacctggtacgacgaacgcctctgttacaacgacacctttgagtctcttgttctgaatggcaatgtggtgagccagctatggatcccggacaccttttttaggaattctaagaggacccacgagcatgagatcaccatgcccaaccagatggtccgcatctacaaggatggcaaggtgttgtacacaattaggatgaccattgatgccggatgctcactccacatgctcagatttccaatggattctcactcttgccctctatctttctctagcttttcctatcctgagaatgagatgatctacaagtgggaaaatttcaagcttgaaatcaatgagaagaactcctggaagctcttccagtttgattttacaggagtgagcaacaaaactgaaataatcacaaccccagttggtgacttcatggtcatgacgattttcttcaatgtgagcaggcggtttggctatgttgcctttcaaaactatgtcccttcttccgtgaccacgatgctctcctgggtttccttttggatcaagacagagtctgctccagcccggacctctctagggatcacctctgttctgaccatgaccacgttgggcaccttttctcgtaagaatttcccgcgtgtctcctatatcacagccttggatttctatatcgccatctgcttcgtcttctgcttctgcgctctgttggagtttgctgtgctcaacttcctgatctacaaccagacaaaagcccatgcttctcctaaactccgccatcctcgtatcaatagccgtgcccatgcccgtacccgtgcacgttcccgagcctgtgcccgccaacatcaggaagcttttgtgtgccagattgtcaccactgagggaagtgatggagaggagcgcccgtcttgctcagcccagcagccccctagcccaggtagccctgagggtccccgcagcctctgctccaagctggcctgctgtgagtggtgcaagcgttttaagaagtacttctgcatggtccccgattgtgagggcagtacctggcagcagggccgcctctgcatccatgtctaccgcctggataactactcgagagttgttttcccagtgactttcttcttcttcaatgtgctctactggcttgtttgccttaacttgtaggtaccagctggtaccctgtggggcaacctctccagttccccaggaggtccaagccccttgccaagggagttgggggaaagcagcagcagcagcaggagcgactagagtttttcctgccccattccccaaacagaagcttgcagagggtttgtctttgctgcccctctcccctacctggcccattcactgagtcttctcagcagaccatttcaaattattaataaatgggccacctccctcttcttcaaggagcatccgtgatgctcagtgttcaaaaccacagccacttagtgatcagctccctaaaaccatgcctaagtacaggcggattagctatcttccaacaatgctgaccaccagacaattactgcatttttccagaagcccactattgcctttgtagtgctttcggcccagttctggcctcagcctcaaagtgcaccgactagttgcttgcctatacctggcacctcattaagatgctgggcagcagtataacaggaggaagagatccctctcctttggtcagattattatgttctcagttctctctccctgctacccctttctctgcagatagatagacactggcattatccctttaggaagaggggggggcagcaagagagcctatttgggacagcattcctctctctctgctgctgtgacatctccctctccttgctggctccatctttcgtctgcactaccaattcaatgcccttcatccaatgggtatctatttttgtgtgtgattatagtaactactccctgctttatatgccaccctcttccttctctttgacccctgtgactctttctgtaactttcccagtgacttcccctagccctgacccaggcactaggccttggtgacttcctggggccaagaaactaaggaaactcggctttgcaacaggcattactcgccattgattggtgcccacccagggcacactgtcggagttctatcacttgcttgacccctggacccataaaccagtccactgttatacccggggcactctaaccatcacaatcaatcaatcaaattcccttaaatttgtatggcactggaactttggcaaagcacttttgacaagttgtgtctgattggagcttcatgatagccttgtgacatctttagggcaggattcttatccccattttgcagatgaaaaccctgagtcacagatttctgtgggactgtggatctcactggaagctatccaagagcccactgtcaccttctagaccacatgatagggctagacagctcagttcaccatgattctcttctgtcacctctgctggcacaccagtggcaaggcccagaatggcgacctctctttagctcaatttctgggcctgaggtgctcagactgcccccaagatcaaatctctcctggctgtagtaacccagtggaatgaatttggacatgccccaatgcttctatatgctaagtgaaatctgtgtctgtaatttgttggggggtggatagggtggggtctccatctactttttgtcaccatcatctgaaatggggaaatatgtaaataaatatatcagcaaagca

SEQ ID NO: 428340 - DNA, 547 bp, Homo sapiens
taccccccttcctgcagccgctgctgacgtccccccgccacagcaggtcggggaccacttgcctttttagcccttcctctccctctcctctccatctccactggcactaccttggtttaggcctttgttatcttccacctggacttttgccacatcttcactttgaaactgcacatgtccaaaatgaaattcattgtctcctccaaacctctaccaccaaaacaagtgtgttgcttctgggttcccatctgtctcattgaagaggaccatcactcacccagttgcgcaaatcaagaactttgatgttccctctccctcacctcctgcatctaatcaatcagcacatcctgttggtgtttcctcccagtctctatcgatgctgtctatttctctgcaccctgtacagctttgacttccacctgcgttaatttaattctgcctggattactacactggcctccttgacaacatgttgtcctcacagaaggaccagagtgacctagctgaagggtcacctaggttgggtcacttcttagtctcgaatctg

SEQ ID NO: 428341 - DNA, 5999 bp, Homo sapiens
gtcttataattgctaagcacttacaactgtttgcagaggaaactgagactttgtaactatgtctcagtctcatctgcaaagaagtaagtgctttgccaagctccttgagaggttaggtaagtagataaagttctgctgctgtcggaatgtgcagctggctttttcatgcagacccttcagtttcgaggttacaactctgacctctttggatgactttggggaatggagctcgtgtgagttctccatacccagaaccaatccagtctggttgaatgggaagcaaagtccattgtagtgggaggtggaggctagagttctaatgtcagctagtttaaggctgggaaagtctggaggaagttacagcagctacactggctgctgcattgacatttatcttaaaggaacaagtctgaaaagcacagattcttatcaaaggcttcatggtggattccacatagacatagtggccactggttttctgaccttttctctgacaaagactaaaggggaaggtcctgggtatcttacacttcagctcccaattagatgtgagcaccttcacttatgttcctaggtgacctgaatgaggagccaagggacctccccagggtagctcccagagcaaccctggaaacactcttcacacatcctgaccaagttcagggcagtgaaggcactgccctcatcgtttccagaatgtggatggagccagtcacccaaccagccatttgtcgtgagaggcatcttgttctgctaccatgtgactaggcagaaaatctgcttttgtttcatttattgagtcagtctctggatgagggaaagctcatgctcatgtggctagagctttgcttgcacagtattaggcaggggcagagggctgggctaccttaaaaatacttgccctttttcttggggactctggggaagcggttttactacctttgacttgggagccttgctcttctgccagctaaccatgggcctgcctcttggttttctgcacctcagcttttcccggataggtggggaccatcatcaaaagtgacagagaagataaggcccagggctttcaagtcactagtggttccgtttagtagatgattgtgcattgtttcaaaatggtgccctagtgactacaaagccccagagccagcatcatcatcaaagcaatgacagtaggtaagcaccagacctccttgggagtgaggaggattcttgaggagaaaagaggtcttctttctcctctgctggagactagttgatctggagacgtggttccttcaatgtcagagttatctttgggactggtctcaaactcttccagttgggccctggggcaggtctctccatctggagcatacttacgtgctcggcgattaagggttcagaatgcagtggtagcctgctactctggccatcttggaccttgatccagagaatctctgcttcaggagcttctaagagagtccagccctgcctccagagagaggcttgcccttcactgatggctgtggagcctctgatggaatattattgctggtcaggaattcactgtcttacaaggaggtttccttcttctctagacagttctgttcatcaaaaaactctccctgttcttctgaaattggagtctctggaagttccacacattaagcttagttctttttccttggaactgtccaggttacattagtccagccactgtttcacaggaccgagattaaacgatcaacatcatcattcccggcatggatcatagtctgttgtagtctacatagccctagtttatttttcttcccttattcttcaaagctttgggtccattcattcttctagtcccagtcctctggacatggtctatttaattgtgtccctctgacactgcagtgaccaaccatgatctggtcaaagaggataagagtttgagcagaaaaccatctttagcatatatttttttgctttggttcatcagccccagatatattgttttccttacccgtgcttctctcactcctcaagaagaagaaagtgtgtgttagcatctttctcttgtccttcaagacaaattggcatctcttgacgagcggagaaggttcttttttggccagaataaataaaattaaaatagaatcatccaacagaataataaatcttcgtgcaacaagaatatattatataaacccagcaattttgcagggcctgggtataactaattagaagtgtcttaaattgcagtcaagatcccacggcaagaggacttttgataaatacattctggccagtaggcaagtgcgagggtggtccgtgcagcagctctggaggagttctatcccaaagctatactcaacacacaggtttcccactgacaacaggtcgctcccttgccttcttccagaagaatctgagaagctttgctccttgagtttcagtgctgccaaggtgagtacgaaaggctgctcttctcattcagctccagcccacccagacctgctgggcagttgatccactttccaaaataggaggacacacggacaggttagtgttctggtctgctttacaaagctgttgcctgacaggagcaagagttgctgagtgtctgctgggttccaggctgttctgagcttggatgggcaggggctaagccacagggcctgcatgagccctgccttgaagggacttaaaagacgacctaattataggcctaggaattttacagtattgcaactgcaatgtgatgctgaaagtggaaaatgatgtcctgggctcagagaaaagcccacaccagcctgggagtcatgatagcagcagagtgcttggggagggtgtgtcagagcataaagcagcatgaatgctacaaaagaagatgccaactagagatataggttgtcatcaggtcccggaggagccatgaccgtctagctgagagccatgaccaaggacacaatgtccaagtgactgtgaggacctcagtctgccctgtggatgtgtatgccacagacctgacttctggagggctgactgaaatgttcattttaagctttttcttctctttccctgaaacactcagtttgggttaggggtcatagactaagaccaaagagtccagggttagaatcttggtgtaaaattgcaggccatctcaggaaatctgtgagcagatgggattggctttgggtaaggtgcgtgtggaaaatgtcagtgggagccgggtcatggtgggcctttagcatcagattccagagtgcagatagtctgtatagctcatgtgaaacagggagccaccaaaactttggggagcaggctagtgccggttttgaccacctgtggagcagtgctcactcacgaaggcattttgccatcacatgaatgtgcagaaaggaggccaaaagcattctgtgcttctccaccacagcacagacttccctagtctcatttgctgagagtagacattctgagggccagcagtgcaggtgtgatgtgcctcagagggtatgaagcccttagtcagccatctggatatcagctgcgtgggcatgatatctagaaggctaattgattttttcactttcacctgactctcttgccaacctgcagagacagacattgggtgtaggacagtgaactgagaaggaagctattaagattctggccttggcttagctctcaactggccattggtcttgcagtgacttcatggtcatgacgattttcttcaatgtgagcaggcggtttggctatgttgcctttcaaaactatgtcccttcttccgtgaccacgatgctctcctgggtttccttttggatcaagacagagtctgctccagcccggacctctctagggatcacctctgttctgaccatgaccacgttgggcaccttttctcgtaagaatttcccgcgtgtctcctatatcacagccttggatttctatatcgccatctgcttcgtcttctgcttctgcgctctgttggagtttgctgtgctcaacttcctgatctacaaccagacaaaagcccatgcttctcctaaactccgccatcctcgtatcaatagccgtgcccatgcccgtacccgtgcacgttcccgagcctgtgcccgccaacatcaggaagcttttgtgtgccagattgtcaccactgagggaagtgatggagaggagcgcccgtcttgctcagcccagcagccccctagcccaggtagccctgagggtccccgcagcctctgctccaagctggcctgctgtgagtggtgcaagcgttttaagaagtacttctgcatggtccccgattgtgagggcagtacctggcagcagggccgcctctgcatccatgtctaccgcctggataactactcgagagttgttttcccagtgactttcttcttcttcaatgtgctctactggcttgtttgccttaacttgtaggtaccagctggtaccctgtggggcaacctctccagttccccaggaggtccaagccccttgccaagggagttgggggaaagcagcagcagcagcaggagcgactagagtttttcctgccccattccccaaacagaagcttgcagagggtttgtctttgctgcccctctcccctacctggcccattcactgagtcttctcagcagaccatttcaaattattaataaatgggccacctccctcttcttcaaggagcatccgtgatgctcagtgttcaaaaccacagccacttagtgatcagctccctaaaaccatgcctaagtacaggcggattagctatcttccaacaatgctgaccaccagacaattactgcatttttccagaagcccactattgcctttgtagtgctttcggcccagttctggcctcagcctcaaagtgcaccgactagttgcttgcctatacctggcacctcattaagatgctgggcagcagtataacaggaggaagagatccctctcctttggtcagattattatgttctcagttctctctccctgctacccctttctctgcagatagatagacactggcattatccctttaggaagaggggggggcagcaagagagcctatttgggacagcattcctctctctctgctgctgtgacatctccctctccttgctggctccatctttcgtctgcactaccaattcaatgcccttcatccaatgggtatctatttttgtgtgtgattatagtaactactccctgctttatatgccaccctcttccttctctttgacccctgtgactctttctgtaactttcccagtgacttcccctagccctgacccaggcactaggccttggtgacttcctggggccaagaaactaaggaaactcggctttgcaacaggcattactcgccattgattggtgcccacccagggcacactgtcggagttctatcacttgcttgacccctggacccataaaccagtccactgttatacccggggcactctaaccatcacaatcaatcaatcaaattcccttaaatttgtatggcactggaactttggcaaagcacttttgacaagttgtgtctgattggagcttcatgatagccttgtgacatctttagggcaggattcttatccccattttgcagatgaaaaccctgagtcacagatttctgtgggactgtggatctcactggaagctatccaagagcccactgtcaccttctagaccacatgatagggctagacagctcagttcaccatgattctcttctgtcacctctgctggcacaccagtggcaaggcccagaatggcgacctctctttagctcaatttctgggcctgaggtgctcagactgcccccaagatcaaatctctcctggctgtagtaacccagtggaatgaatttggacatgccccaatgcttctatatgctaagtgaaatctgtgtctgtaatttgttggggggtggatagggtggggtctccatctactttttgtcaccatcatctgaaatggggaaatatgtaaataaatatatcagcaaagca

SEQ ID NO: 428342 - DNA, 3978 bp, Homo sapiens
  misc_feature (687)..(687): n is a, c, g, or t
  misc_feature (689)..(690): n is a, c, g, or t
  misc_feature (696)..(696): n is a, c, g, or t
  misc_feature (846)..(846): n is a, c, g, or t
gagcgcagagcgtgagccgcgacctccgcgcaggtggtcgcgccggtctccgcggaaatgttgtccaaagttcttccagtcctcctaggcatcttattgatcctccagtcgagaacatgtatacagagaagtgctcaaatcataagtgtacagctgatgagttgtcaaaaaatgaccacagcggtgtaaagaaagccaaatcaaggacccgaatgtgagcaggacctcagaagccccctttgtcactgcctcccagcaaaggcagcactatccggacttctaacaccatcggtgagtttcataccttggcagatggcctttaacatttttgtttaattcaattattcttactaatcttcttctttttcttggctgtggtgcatggctgtggagctcagggtggactcctgttgggcagccagttcctggatggctgtctgtgggtggaggactcctgcctttcctgtttagacacccacaaaggctgctctttagcctccttcccttcatccccttcccctgcccccagtgcaacgagtattacacaaccaacaaaaccgcaaaatattcccacaattttctggtcctctctgggagaggccgctctggcttttcctctcagccctggccctctgcctgctcctcactcctggttggtgctggtcaggctgactagaggccaaggcnanncacagngggccagcgctcagacataaatgccctcttcatttcacgtgtaacattcttttaaaatctaggtcttggttttgttgattttttcttaaataaaagagtgatcataaaagagggacagcatagaaagtccccaaagagcagcaaggtttnaaagaaattcacaagcctaatctgtcactgtcttataatttgctattaccagtcacaatttaactaggttttgtgttgaaaacttgttttggtttgcttctgtcccaagaggcactagctggggcccctacagagtgcagggcagagcttcatttttcgtttgaatgttctagggtcgagggacctcagactgaatcaaagaatgaagcctcttcccgtgatgttgtctatggcccccagccccagcctctggaaaatcagctcctctctgaggaaacaaagtcaactgagactgagactgggagcagagttggcaaactgccagaagcctctcgcatcctgaacactatcctgagtaattatgaccacaaactgcgccctggcattggagagaagcccactgtggtcactgttgagatctccgtcaacagccttggtcctctctctatcctagacatggaatacaccattgacatcatcttctcccagacctggtacgacgaacgcctctgttacaacgacacctttgagtctcttgttctgaatggcaatgtggtgagccagctatggatcccggacaccttttttaggaattctaagaggacccacgagcatgagatcaccatgcccaaccagatggtccgcatctacaaggatggcaaggtgttgtacacaattagtttcctatcctgagaatgagatgatctacaagtgggaaaatttcaagcttgaaatcaatgagaagaactcctggaagctcttccagtttgattttacaggagtgagcaacaaaactgaaataatcacaaccccagttggtgacttcatggtcatgacgattttcttcaatgtgagcaggcggtttggctatgttgcctttcaaaactatgtcccttcttccgtgaccacgatgctctcctgggtttccttttggatcaagacagagtctgctccagcccggacctctctagggatcacctctgttctgaccatgaccacgttgggcaccttttctcgtaagaatttcccgcgtgtctcctatatcacagccttggatttctatatcgccatctgcttcgtcttctgcttctgcgctctgttggagtttgctgtgctcaacttcctgatctacaaccagacaaaagcccatgcttctcctaaactccgccatcctcgtatcaatagccgtgcccatgcccgtacccgtgcacgttcccgagcctgtgcccgccaacatcaggaagcttttgtgtgccagattgtcaccactgagggaagtgatggagaggagcgcccgtcttgctcagcccagcagccccctagcccaggtagccctgagggtccccgcagcctctgctccaagctggcctgctgtgagtggtgcaagcgttttaagaagtacttctgcatggtccccgattgtgagggcagtacctggcagcagggccgcctctgcatccatgtctaccgcctggataactactcgagagttgttttcccagtgactttcttcttcttcaatgtgctctactggcttgtttgccttaacttgtaggtaccagctggtaccctgtggggcaacctctccagttccccaggaggtccaagccccttgccaagggagttgggggaaagcagcagcagcagcaggagcgactagagtttttcctgccccattccccaaacagaagcttgcagagggtttgtctttgctgcccctctcccctacctggcccattcactgagtcttctcagcagaccatttcaaattattaataaatgggccacctccctcttcttcaaggagcatccgtgatgctcagtgttcaaaaccacagccacttagtgatcagctccctaaaaccatgcctaagtacaggcggattagctatcttccaacaatgctgaccaccagacaattactgcatttttccagaagcccactattgcctttgtagtgctttcggcccagttctggcctcagcctcaaagtgcaccgactagttgcttgcctatacctggcacctcattaagatgctgggcagcagtataacaggaggaagagatccctctcctttggtcagattattatgttctcagttctctctccctgctacccctttctctgcagatagatagacactggcattatccctttaggaagaggggggggcagcaagagagcctatttgggacagcattcctctctctctgctgctgtgacatctccctctccttgctggctccatctttcgtctgcactaccaattcaatgcccttcatccaatgggtatctatttttgtgtgtgattatagtaactactccctgctttatatgccaccctcttccttctctttgacccctgtgactctttctgtaactttcccagtgacttcccctagccctgacccaggcactaggccttggtgacttcctggggccaagaaactaaggaaactcggctttgcaacaggcattactcgccattgattggtgcccacccagggcacactgtcggagttctatcacttgcttgacccctggacccataaaccagtccactgttatacccggggcactctaaccatcacaatcaatcaatcaaattcccttaaatttgtatggcactggaactttggcaaagcacttttgacaagttgtgtctgattggagcttcatgatagccttgtgacatctttagggcaggattcttatccccattttgcagatgaaaaccctgagtcacagatttctgtgggactgtggatctcactggaagctatccaagagcccactgtcaccttctagaccacatgatagggctagacagctcagttcaccatgattctcttctgtcacctctgctggcacaccagtggcaaggcccagaatggcgacctctctttagctcaatttctgggcctgaggtgctcagactgcccccaagatcaaatctctcctggctgtagtaacccagtggaatgaatttggacatgccccaatgcttctatatgctaagtgaaatctgtgtctgtaatttgttggggggtggatagggtggggtctccatctactttttgtcaccatcatctgaaatggggaaatatgtaaataaatatatcagcaaagca

SEQ ID NO: 428343 - DNA, 2289 bp, Homo sapiens
  misc_feature (687)..(687): n is a, c, g, or t
  misc_feature (689)..(690): n is a, c, g, or t
  misc_feature (696)..(696): n is a, c, g, or t
  misc_feature (846)..(846): n is a, c, g, or t
gagcgcagagcgtgagccgcgacctccgcgcaggtggtcgcgccggtctccgcggaaatgttgtccaaagttcttccagtcctcctaggcatcttattgatcctccagtcgagaacatgtatacagagaagtgctcaaatcataagtgtacagctgatgagttgtcaaaaaatgaccacagcggtgtaaagaaagccaaatcaaggacccgaatgtgagcaggacctcagaagccccctttgtcactgcctcccagcaaaggcagcactatccggacttctaacaccatcggtgagtttcataccttggcagatggcctttaacatttttgtttaattcaattattcttactaatcttcttctttttcttggctgtggtgcatggctgtggagctcagggtggactcctgttgggcagccagttcctggatggctgtctgtgggtggaggactcctgcctttcctgtttagacacccacaaaggctgctctttagcctccttcccttcatccccttcccctgcccccagtgcaacgagtattacacaaccaacaaaaccgcaaaatattcccacaattttctggtcctctctgggagaggccgctctggcttttcctctcagccctggccctctgcctgctcctcactcctggttggtgctggtcaggctgactagaggccaaggcnanncacagngggccagcgctcagacataaatgccctcttcatttcacgtgtaacattcttttaaaatctaggtcttggttttgttgattttttcttaaataaaagagtgatcataaaagagggacagcatagaaagtccccaaagagcagcaaggtttnaaagaaattcacaagcctaatctgtcactgtcttataatttgctattaccagtcacaatttaactaggttttgtgttgaaaacttgttttggtttgcttctgtcccaagaggcactagctggggcccctacagagtgcagggcagagcttcatttttcgtttgaatgttctagggtcgagggacctcagactgaatcaaagaatgaagcctcttcccgtgatgttgtctatggcccccagccccagcctctggaaaatcagctcctctctgaggaaacaaagtcaactgagactgagactgggagcagagttggcaaactgccagaagcctctcgcatcctgaacactatcctgagtaattatgaccacaaactgcgccctggcattggagagaagcccactgtggtcactgttgagatctccgtcaacagccttggtcctctctctatcctagacatggaatacaccattgacatcatcttctcccagacctggtacgacgaacgcctctgttacaacgacacctttgagtctcttgttctgaatggcaatgtggtgagccagctatggatcccggacaccttttttaggaattctaagaggacccacgagcatgagatcaccatgcccaaccagatggtccgcatctacaaggatggcaaggtgttgtacacaattaggatgaccattgatgccggatgctcactccacatgctcagatttccaatggattctcactcttgccctctatctttctctagctgtgagtaccttcttaagtttctggggccccagaaacatgctgggctccttctttttctcatccttgccatttacatttttctgcctctgcttttcttctaaaatgctgccaaggttgtgcaggacttccatcctccaccctcatttcctttcctgccaacaatactgtgttgctcatcccttccacgtgcctctgaagcgtatctcaagtatgtctgctcctctccatctccactggcactaccttggtttaggcctttgttatcttccacctggacttttgccacatcttcactttgaaactgcacatgtccaaaatgaaattcattgtctcctccaaacctctaccaccaaaacaagtgtgttgcttctgggttcccatctgtctcattgaagaggaccatcactcacccagttgcgcaaatcaagaactttgatgttccctctccctcacctcctgcatctaatcaatcagcacatcctgttggtgtttcctcccagtctctatcgatgctgtctatttctctgcaccctgtacagctttgacttccacctgcgttaatttaattctgcctggattactacactggcctccttgacaacatgttgtcctcacagaaggaccagagtgacctagctgaagggtcacctaggttgggtcacttcttagtctcgaatctg

SEQ ID NO: 428344 - DNA, 2067 bp, Homo sapiens
ggagaaccaccctgatgttcacagtggggtgggcggtaagcaagagtcaagctggtttctccggggaagcgggtgcctatttgaaggcgagtaaagacgtaggagaccgaggaaagtgtgtgggaggcgttgacctgccccttgtcctggccccgccactgcccacttcagcttctgccggaccctcctggagcacacggtgtcagctgagagcatcccctgccacttgcctcggacacctggcaccagcctcacgtggcatgactcccgcagccagagggcggccagcagcaggccaatcaagctcctgcagcagcccggcacagacaccccccagggccggctgtactctgaccactatggcctgtaccatacaagcccctcgctgggtggcctgacccggcccgtggtcctgtggagtcagcaggacgtctgcaagtggctcaagaagcactgtccccacaactacctcgtctacgtggaggccttctcccagcatgccatcaccggccgggcactgctgcggctgaatgcggagaagctgcagcggatggggctggcccaggaggcccagaggcaggaggtgctgcagcaggtgctccgcctgcaggtgcgtgaggaggggcggagcctgcagctgctcagccaagcttccttcgggaaaatgtcctagctgctgctgaggcttgaacccagaccccagcactgtgatgggagtccacggctagggaggaggccaagctggccccgcagcgcctcttggaccctgcgggatgccggggcggccaggctggcccaacggacagacaggaccaggatcacacctccaggcgcctctggttggacattccaggtcgtgccctggggctgggtgggtagggggctgcttgagtgtggcccacctcctgggacctgagcccaagccctcccctggtgcagctggcagcatgtggggcagctgcctggagccagaaccggtttggatgtcccccctagactcccagggagtctgtttatttacattcccctctccacgtgatgtcggtcccccatcgcctgctgagtcacttgtctgtccacccacccagcccagttctaggtcgttccccagcacctccaggttggcccacacaggtaccataagctgcctcggctccctgtggcttgtgcccatgcacctgccagggcccagcaggccaacccatcatctagagtagtggccatcagcacccgcctaacgggcaccatgccaagcactttcatcattatttatacatcgtcaccacaccccctctattcatgagaagtaaagctgagaaaggaccagattgaccaagcgccagagacaaaatgtggcacaacgagaaccccagccctgtccaggtggctccgcgcccagggcccaggcttagcagtgctccctgccctatctttgggaaaatcttgcttttatggtcttcccccctcgccctcaagaacaagggccttgtgcgtgggccttcccattgctgctttcccaagaaggcctggattcaggggagaggccttcccagggccactccccttacaccctcccagaggcctgagcaacccctctctgggtggtttggggctggtgctgcctggcggaaggacagtgagggcggccctagccgcctccaccctcttgcgcctctgccctctcccagtccccctgtggcttctgaaaatctcagggacagatgaggctgagcccctagtcccctctgtgtgctttgagcctccagactcgaggctggtcactgcaggtcccaggtggaatttggacaactggcctggccgctcccatcctgtaagcccccaccacggggagaccctcatccctgcccctgtgtggctgcgcaagtattctgcccgcctcccaccatcagccttcgcccaaggggcccttctgcctctgcttccctcccttctcctctgtcttgccctggcccacgcacgcctgtctcgtcttccttgttttgctgcactcacttttttatactctgacaaaaaaaaaaaatcagaaataaagctggttcccaagtg

SEQ ID NO: 428345 - DNA, 2009 bp, Homo sapiens
ggccccatgttcaccgagctgaggtccaagctgagccccccgcgtggccgcgccggggccgtgcgcgcgggcttcggggagcgccgggatgtggacgccactgcccacttcagcttctgccggaccctcctggagcacacggtgtcagctgagagcatcccctgccacttgcctcggacacctggcaccagcctcacgtggcatgactcccgcagccagagggcggccagcagcaggccaatcaagctcctgcagcagcccggcacagacaccccccagggccggctgtactctgaccactatggcctgtaccatacaagcccctcgctgggtggcctgacccggcccgtggtcctgtggagtcagcaggacgtctgcaagtggctcaagaagcactgtccccacaactacctcgtctacgtggaggccttctcccagcatgccatcaccggccgggcactgctgcggctgaatgcggagaagctgcagcggatggggctggcccaggaggcccagaggcaggaggtgctgcagcaggtgctccgcctgcaggtgcgtgaggaggggcggagcctgcagctgctcagccaagcttccttcgggaaaatgtcctagctgctgctgaggcttgaacccagaccccagcactgtgatgggagtccacggctagggaggaggccaagctggccccgcagcgcctcttggaccctgcgggatgccggggcggccaggctggcccaacggacagacaggaccaggatcacacctccaggcgcctctggttggacattccaggtcgtgccctggggctgggtgggtagggggctgcttgagtgtggcccacctcctgggacctgagcccaagccctcccctggtgcagctggcagcatgtggggcagctgcctggagccagaaccggtttggatgtcccccctagactcccagggagtctgtttatttacattcccctctccacgtgatgtcggtcccccatcgcctgctgagtcacttgtctgtccacccacccagcccagttctaggtcgttccccagcacctccaggttggcccacacaggtaccataagctgcctcggctccctgtggcttgtgcccatgcacctgccagggcccagcaggccaacccatcatctagagtagtggccatcagcacccgcctaacgggcaccatgccaagcactttcatcattatttatacatcgtcaccacaccccctctattcatgagaagtaaagctgagaaaggaccagattgaccaagcgccagagacaaaatgtggcacaacgagaaccccagccctgtccaggtggctccgcgcccagggcccaggcttagcagtgctccctgccctatctttgggaaaatcttgcttttatggtcttcccccctcgccctcaagaacaagggccttgtgcgtgggccttcccattgctgctttcccaagaaggcctggattcaggggagaggccttcccagggccactccccttacaccctcccagaggcctgagcaacccctctctgggtggtttggggctggtgctgcctggcggaaggacagtgagggcggccctagccgcctccaccctcttgcgcctctgccctctcccagtccccctgtggcttctgaaaatctcagggacagatgaggctgagcccctagtcccctctgtgtgctttgagcctccagactcgaggctggtcactgcaggtcccaggtggaatttggacaactggcctggccgctcccatcctgtaagcccccaccacggggagaccctcatccctgcccctgtgtggctgcgcaagtattctgcccgcctcccaccatcagccttcgcccaaggggcccttctgcctctgcttccctcccttctcctctgtcttgccctggcccacgcacgcctgtctcgtcttccttgttttgctgcactcacttttttatactctgacaaaaaaaaaaaatcagaaataaagctggttcccaagtg

SEQ ID NO: 428346 - DNA, 2184 bp, Homo sapiens
ggagaaccaccctgatgttcacagtggggtgggcggtaagcaagagtcaagctggtttctccggggaagcgggtgcctatttgaaggcgagtaaagacgtaggagaccgaggaaagtgtgtgggaggcgttgacctgccccttgtcctggccccggctctgttcacttgcagataccatacagagccttcattcattcattcattgacaatgaatgtggggtgcccctctgtaaccagacctggatcaagacgcctgcctccccagactcagccactgcccacttcagcttctgccggaccctcctggagcacacggtgtcagctgagagcatcccctgccacttgcctcggacacctggcaccagcctcacgtggcatgactcccgcagccagagggcggccagcagcaggccaatcaagctcctgcagcagcccggcacagacaccccccagggccggctgtactctgaccactatggcctgtaccatacaagcccctcgctgggtggcctgacccggcccgtggtcctgtggagtcagcaggacgtctgcaagtggctcaagaagcactgtccccacaactacctcgtctacgtggaggccttctcccagcatgccatcaccggccgggcactgctgcggctgaatgcggagaagctgcagcggatggggctggcccaggaggcccagaggcaggaggtgctgcagcaggtgctccgcctgcaggtgcgtgaggaggggcggagcctgcagctgctcagccaagcttccttcgggaaaatgtcctagctgctgctgaggcttgaacccagaccccagcactgtgatgggagtccacggctagggaggaggccaagctggccccgcagcgcctcttggaccctgcgggatgccggggcggccaggctggcccaacggacagacaggaccaggatcacacctccaggcgcctctggttggacattccaggtcgtgccctggggctgggtgggtagggggctgcttgagtgtggcccacctcctgggacctgagcccaagccctcccctggtgcagctggcagcatgtggggcagctgcctggagccagaaccggtttggatgtcccccctagactcccagggagtctgtttatttacattcccctctccacgtgatgtcggtcccccatcgcctgctgagtcacttgtctgtccacccacccagcccagttctaggtcgttccccagcacctccaggttggcccacacaggtaccataagctgcctcggctccctgtggcttgtgcccatgcacctgccagggcccagcaggccaacccatcatctagagtagtggccatcagcacccgcctaacgggcaccatgccaagcactttcatcattatttatacatcgtcaccacaccccctctattcatgagaagtaaagctgagaaaggaccagattgaccaagcgccagagacaaaatgtggcacaacgagaaccccagccctgtccaggtggctccgcgcccagggcccaggcttagcagtgctccctgccctatctttgggaaaatcttgcttttatggtcttcccccctcgccctcaagaacaagggccttgtgcgtgggccttcccattgctgctttcccaagaaggcctggattcaggggagaggccttcccagggccactccccttacaccctcccagaggcctgagcaacccctctctgggtggtttggggctggtgctgcctggcggaaggacagtgagggcggccctagccgcctccaccctcttgcgcctctgccctctcccagtccccctgtggcttctgaaaatctcagggacagatgaggctgagcccctagtcccctctgtgtgctttgagcctccagactcgaggctggtcactgcaggtcccaggtggaatttggacaactggcctggccgctcccatcctgtaagcccccaccacggggagaccctcatccctgcccctgtgtggctgcgcaagtattctgcccgcctcccaccatcagccttcgcccaaggggcccttctgcctctgcttccctcccttctcctctgtcttgccctggcccacgcacgcctgtctcgtcttccttgttttgctgcactcacttttttatactctgacaaaaaaaaaaaatcagaaataaagctggttcccaagtg

SEQ ID NO: 428347 - DNA, 1743 bp, Homo sapiens
  misc_feature (12)..(12): n is a, c, g, or t
  misc_feature (34)..(34): n is a, c, g, or t
  misc_feature (38)..(38): n is a, c, g, or t
aggctccgcccntcctcacgcacctgcaggcggnaccntgctgcagcacctcctgcctctgggcctcctgggcagccccatccgctgcagcttctccgcattcagccgcagcagtgcccggcctggggagaggaaagaggggcggagcctgcagctgctcagccaaggtcagtgtgaggtgccagagaggcctgggggctgatggagaagcccctctgagtgtggggtgggatgacctcaggaggtcggctgcaggccccagtaagcgccctaatgcagatgatgccaaagaccccaccccattctcaccctcttccatcacacagcttccttcgggaaaatgtcctagctgctgctgaggcttgaacccagaccccagcactgtgatgggagtccacggctagggaggaggccaagctggccccgcagcgcctcttggaccctgcgggatgccggggcggccaggctggcccaacggacagacaggaccaggatcacacctccaggcgcctctggttggacattccaggtcgtgccctggggctgggtgggtagggggctgcttgagtgtggcccacctcctgggacctgagcccaagccctcccctggtgcagctggcagcatgtggggcagctgcctggagccagaaccggtttggatgtcccccctagactcccagggagtctgtttatttacattcccctctccacgtgatgtcggtcccccatcgcctgctgagtcacttgtctgtccacccacccagcccagttctaggtcgttccccagcacctccaggttggcccacacaggtaccataagctgcctcggctccctgtggcttgtgcccatgcacctgccagggcccagcaggccaacccatcatctagagtagtggccatcagcacccgcctaacgggcaccatgccaagcactttcatcattatttatacatcgtcaccacaccccctctattcatgagaagtaaagctgagaaaggaccagattgaccaagcgccagagacaaaatgtggcacaacgagaaccccagccctgtccaggtggctccgcgcccagggcccaggcttagcagtgctccctgccctatctttgggaaaatcttgcttttatggtcttcccccctcgccctcaagaacaagggccttgtgcgtgggccttcccattgctgctttcccaagaaggcctggattcaggggagaggccttcccagggccactccccttacaccctcccagaggcctgagcaacccctctctgggtggtttggggctggtgctgcctggcggaaggacagtgagggcggccctagccgcctccaccctcttgcgcctctgccctctcccagtccccctgtggcttctgaaaatctcagggacagatgaggctgagcccctagtcccctctgtgtgctttgagcctccagactcgaggctggtcactgcaggtcccaggtggaatttggacaactggcctggccgctcccatcctgtaagcccccaccacggggagaccctcatccctgcccctgtgtggctgcgcaagtattctgcccgcctcccaccatcagccttcgcccaaggggcccttctgcctctgcttccctcccttctcctctgtcttgccctggcccacgcacgcctgtctcgtcttccttgttttgctgcactcacttttttatactctgacaaaaaaaaaaaatcagaaataaagctggttcccaagtg

SEQ ID NO: 428348 - DNA, 2312 bp, Homo sapiens
ggagaaccaccctgatgttcacagtggggtgggcggtaagcaagagtcaagctggtttctccggggaagcgggtgcctatttgaaggcgagtaaagacgtaggagaccgaggaaagtgtgtgggaggcgttgacctgccccttgtcctggccccgccactgcccacttcagcttctgccggaccctcctggagcacacggtgtcagctgagagcatcccctgccacttgcctcggacacctggcaccagcctcacgtggcatgactcccgcagccagagggcggccagcagcaggccaatcaagctcctgcagcagcccggcacagacaccccccagggccggctgtactctgaccactatggcctgtaccatacaagcccctcgctgggtggcctgacccggcccgtggtcctgtggagtcagcaggacgtctgcaagtggctcaagaagcactgtccccacaactacctcgtctacgtggaggccttctcccagcatgccatcaccggccgggcactgctgcggctgaatgcggagaagctgcagcggatggggctggcccaggaggcccagaggcaggaggtgctgcagcaggtgctccgcctgcaggtgcgtgaggaggggcggagcctgcagctgctcagccaagcttccttcgggaaaatgtcctagctgctgctgaggcttgaacccagaccccagcactgtgatgggagtccacggctagggaggaggccaagctggccccgcagcgcctcttggaccctgcgggatgccggggcggccaggctggcccaacggacagacaggaccaggatcacacctccaggcgcctctggttggacattccaggtcgtgccctggggctgggtgggtagggggctgcttgagtgtggcccacctcctgggacctgagcccaagccctcccctggtgcagctggcagcatgtggggcagctgcctggagccagaaccggtttggatgtcccccctagactcccagggagtctgtttatttacattcccctctccacgtgatgtcggtcccccatcgcctgctgagtcacttgtctgtccacccacccagcccagttctaggtcgttccccagcacctccaggttggcccacacaggtaccataagctgcctcggctccctgtggcttgtgcccatgcacctgccagggcccagcaggccaacccatcatctagagtagtggccatcagcacccgcctaacgggcaccatgccaagcactttcatcattatttatacatcgtcaccacaccccctctattcatgagaagtaaagctgagaaaggaccagattgaccaagcgccagagacaaaatgtggcacaacgagaaccccagccctgtccaggtggctccgcgcccagggcccaggcttagcagtgctccctgccctatcttggcgctggtcaatctggtcctttctcagctttacttctcatgaatagagggggtgtggtgacgatgtataaataatgatgaaagtgcttggcatggtgcccgttaggcgggtgctgatggccactactctagatgatgggttggcctgctgggccctggcaggtgcatgggcacaagccacagggagccgaggcagcttatggtacctgtgtgggccaacctggaggtgctggggaacgacctagaactgggctgggtgggtggacagacaagtgactcagcaggcgatgggggaccgacatcacgtggagaggggaatgtaaataaacagactccctgggagtctaggggagaggccttcccagggccactccccttacaccctcccagaggcctgagcaacccctctctgggtggtttggggctggtgctgcctggcggaaggacagtgagggcggccctagccgcctccaccctcttgcgcctctgccctctcccagtccccctgtggcttctgaaaatctcagggacagatgaggctgagcccctagtcccctctgtgtgctttgagcctccagactcgaggctggtcactgcaggtcccaggtggaatttggacaactggcctggccgctcccatcctgtaagcccccaccacggggagaccctcatccctgcccctgtgtggctgcgcaagtattctgcccgcctcccaccatcagccttcgcccaaggggcccttctgcctctgcttccctcccttctcctctgtcttgccctggcccacgcacgcctgtctcgtcttccttgttttgctgcactcacttttttatactctgacaaaaaaaaaaaatcagaaataaagctggttcccaagtg

SEQ ID NO: 428349 - DNA, 772 bp, Homo sapiens
ggaatttggacaactggcctggccgctcccatcctgtaagcccccaccacggggagaccctcatccctgcccctgtgtggctgcgcaagtattctgcccgcctcccaccatcagccttcgcccaaggggcccttctgcctctgcttccctcccttctcctctgtcttgccctggcccacgcacgcctgtctcgtcttccttgttttgctgcactcacttttttatactctgacaaaaaaaaaaaatcagaaataaagctggttcccaagtgctggcggtgctgggtctgcgaggagagggcgtctgggcagccgcggccaccagggggcagtggcgtcacgccctggaggggcgtctgggcaaccccgcgcagaggctggaaacagggctcaagtcacgcctgtgggcggtccccagtgctggacacaacgcccgacacgctggaagggacggcccagacagcgcgtgagggtcccgcggctgccgtgacagaggaccacggaggggtgctgagaacagcagacattcattctctctggagttctggaggccgcagtccaaaatccagctccctcagggcctcctggggcgactcctcacctctccagcttccagtggctgccgggggaactcgggcgcatgggcattacccgtctccgcctctgtaatcagatcacctcctcctcttctgtctctcaaatctccctctgtctctctcttataaggatgcttggatttggggccacctgggtaatacaggataatctcctca

SEQ ID NO: 428350 - DNA, 539 bp, Homo sapiens
  misc_feature (23)..(23): n is a, c, g, or t
ataattaggagtcatcttaaatnaaagaaagttatggtttaaggttgttggctgtaacacaggcagtcgacaagtactttaagcttcctcatgcttccagtaaaccaccccggatttcaggaagccttgtggacacttcatataaaacattaagatttgcattcagagcatcactgaaaactgccatctatcgaataactactacatttggtgaacatctgaatgctgtgcaagcatctgcagaacatcagaaaagacttcaacagttcttggagttcaaagaatagttaagtaatataaactgtgttcattacactgctgatacaactacagatgggacagtaaatgttcagcattcttggatcagaagaaaacggactaattagatgcttcctttgtcgtggtggttgctttgaaaactatactttaatgggagaaatcatggaaagaaattctcaacagaataactgaaaactgccttttctgtaccgattgctttttgtgtgtgtggtataataaaatctttattcaattttaca

SEQ ID NO: 428351 - DNA, 4818 bp, Homo sapiens
tccaggctagtcgagcctgtgttatcggccgaggcagagggcggttcctggagttacagccgcgtttgcgggacgtgtctgcgcggcagtcctggcctgttgagcttgtccagacgaagcctcgcagggatgggttggagcctgggccgggcttcgctcaggcagcgtttgaggcagacccagcagggtcctcctggggccttcctgcctttgaactgcggtggcgggcgggcgcacggtctcctgtacgccctagactaggggccgccatctccatggccacggccgtgagccggccctgcgccggcaggtcgcgggacatactgtggcgcgttttgggctggaggatagttgcaagtattgtttggtcagtgctatttctacccatctgcaccacagtatttataattttcagcaggattgatttgtttcatcctatacagtggctgtctgattctttcagtgacctgtatagttcctatgtaatcttttacttcctgctgctgtcagtggtaataataataataagtattttcaatgtggagttctatgcagttgtgccttctattccttgctccagactagctctgatagggaagatcattcatcctcagcaactcatgcactcatttattcatgctgcaatgggaatggtgatggcctggtgtgctgcagtgataacccagggccagtacagctttcttgtggttccctgcactggtactaacagctttggtagccctgctgcgcaaacctgcttaaatgaatatcatctttttttcctactgactggagcatttatgggctatagctatagcctcctgtattttgttaacaacatgaactatcttccatttcccatcatacagcaatacaagttcttgcgttttaggagatctctgctcttattagttaaacacagttgtgtggaatcactgttcctggttagaaatttctgcattttatattattttcttggctatattcccaaagcttggattagcactgctatgaaccttcacatagatgagcaggttcataggccacttgacacagtgagtggcctcttaaatctctcgttactctaccatgtctggctgtgtggtgtctttctcctgacgacttggtatgtctcatggatactcttcaaaatctatgccacagaggctcatgtgtttcctgttcaaccaccatttgcagaagggtcagatgagtgccttccaaaagtgttaaatagcaatcctccccccatcataaagtatttagccttgcaggacctgatgttgctttctcaatattctccttcacgaagacaagaagttttcagcctcagccaaccaggtggacatccccacaattggacagccatttcaagggagtgtttgaatcttttaaatggtatgactcagaaactgattctctatcaagaagctgctgctacgaatgggagagtgtcttcatcttacccagtggaacctaagaaattaaattctccagaagaaactgcttttcagacaccaaaatctagccagatgcctcggccttcagtgccaccattagttaaaacatcactgttttcttcaaaattatctacacctgatgttgtgagcccatttgggaccccatttggctctagtgtaatgaatcggatggctggaatttttgatgtaaacacctgctatgggtcaccgcaaagtcctcagctaataagaagggggccaagattgtggacatcagcttctgatcagcaaatgactgaattttctaatccttctccatctacctctattagtgctgagggtaagacaatgagacaacccagtgtgatttattcatggattcagaataaacgtgaacagattaagaatttcttgtcaaaacgggtgctgataatgtattttttcagtaagcacccagaggcctccattcaggctgttttttcagatgcccaaatgcatatttgggcattagaaggtctgtcgcacttagtagcagcatcatttacagaggatagatttggagttgtccagacgacactaccagctatccttaatactttgttgacactgcaagaggcagtcgacaagtactttaagcttcctcatgcttccagtaaaccaccccggatttcaggaagccttgtggacacttcatataaaacattaagatttgcattcagagcatcactgaaaactgccatctatcgaataactactacatttggtgaacatctgaatgctgtgcaagcatctgcagaacatcagaaaagacttcaacagttcttggagttcaaagaatagttaagtaatataaactgtgttcattacactgctgatacaactacagatgggacagtaaatgttcagcattcttggatcagaagaaaacggactaattagatgcttcctttgtcgtggtggttgctttgaaaactatactttaatgggagaaatcatggaaagaaattctcaacagaataactgaaaactgccttttctgtaccgattgctttttgtgtgtgtggtataataaaatctttattcaattttacagaagcattgatggcagtcgaaatgtctctagctcatataacttaatagtaataactaaaaaacttttagaatttacttttgaaaggagggaagccagttctgaaatgagtataggttgatttcatagtcttcttaattaagagtttagctctttgtaaactcaaaatacataaactttttaagtgtagtttcatttactgaaggataaaaatggtaacagtgcagcaatattcacaaaaaatattgtctaacggacatattttgttaatctgttaggttgggtttttgtttccagggacaaattaaatttgtatgattacccaaaaaagggtctcagtttacagatgctaactctatataaaggaatgtggaaaaactcagttcttaagttacaagattaaaaattcacatttggtctttaagaaacaattgactgacatctatgaatttattttgtatcatgctagtaaacacgaagtattaatgtatgggtattttcccagctagttttgctttctttttctggagcaaaacattaagtgattgcagagtttttcaagcaagagaaaaaggtttgcaaaaaaacccaggaaatgttcccttttttccccaccattcatcttcattagatcaaattctgtgaaacttgtctggtctctcaaagggagcagcctctgtagtgttaaatggctaattaaaataggaagatctttatagccagaaacaacttagtcatcaaatagcaagtgaaaccaaaacgtcagagggattactgtacttggaagtatgttgtgtgtcccaaatgtgaacgaagtattgttagaatttattagatcagcttctttggagatcaaagattggaaatcctagtcatagatattcactggactggctttggactgaaatgctcctttgtaattcttttcctattgtcttttccttctagtgtcccaaaatattttctttaaagtcagcacagtactgtatatgaatctttaatgtggtatcatatatgtctacttttgtctgattcatcgatgtattatatctttataattgaatattttagctccgggtcctgttgccccttcaagcagtacatgccaaattataaataggtgctactggccttgagcatatcactgtgggacagttccccaattgtcaagtgtttagatatgtagactattgccatttgtttttttgttttggttttgctttgtgtctgaagctgaattgatttcttttttttgaatgtgaaagttgaatttcaaacgtagtcatttcttacagatggccaagacagaaaattgtggctaggttgactgagaactgttgtcttccatgtattaacacaattaagctttttatattccactctctgtgctgaccctggctgaggcattttgggagacaaggactctgaatcttctgcttccattaaagaagaactgtgatattcaacattggatttctgagaataaagataggatgattcctttgaactttgacttacttgtataaaatgtccagctaggttaggtttttgccatttcctatatactttgggtaaagctacatttgatgagcaatgtgaatgtttctgagaatgttcattcctgttttctcttaagagaatgtgctgtgtactaaatacaggccacatagtgtctgcctgttgaagatctggaaactgcctccccagatctgtattgtatttggtaggtaagggggtcagtttctttttctcattgtgtgttgataatctacacaccatctgttggaaccagggtgttattatggggaactcctcctgtgtactaggaggaggaccttagggagaccaagaggagagaagcatttcctttgatgaagtcacatcctgtctatgagcccactaatgctgtaacattggcctgaaagagagtgttctttaaaagcctttctcggctgttagtataaaaacatgatggtatcagctcttagcatgtttgcttgacccttatggaaggtataaatccacagaacttccttcccagagaactgggaaattgtcctagaaataaaccttgtacagttgagtggacatggataagcaacaatttgttactttgcaggatttgttccttggtaattgtttggtgtgtcatcctgtaaatattcatgatagtctgtttatatccttttgtatatcgttgatactggattgggtagaaaaataaattggcaatttaaaaaaatggaacagttaattgaaaaaaaagtg

SEQ ID NO: 428352 - DNA, 4708 bp, Homo sapiens
tccaggctagtcgagcctgtgttatcggccgaggcagagggcggttcctggagttacagccgcgtttgcgggacgtgtctgcgcggcagtcctggcctgttgagcttgtccagacgaagcctcgcagggatgggttggagcctgggccgggcttcgctcaggcagcgtttgaggcagacccagcagggtcctcctggggccttcctgcctttgaactgcggtggcgggcgggcgcacggtctcctgtacgccctagactaggggccgccatctccatggccacggccgtgagccggccctgcgccggcaggtcgcgggacatactgtggcgcgttttgggctggaggatagttgcaagtattgtttggtcagtgctatttctacccatctgcaccacagtatttataattttcagcaggattgatttgtttcatcctatacagtggctgtctgattctttcagtgacctgtatagttcctatgtaatcttttacttcctgctgctgtcagtggtaataataataataagtattttcaatgtggagttctatgcagttgtgccttctattccttgctccagactagctctgatagggaagatcattcatcctcagcaactcatgcactcatttattcatgctgcaatgggaatggtgatggcctggtgtgctgcagtgataacccagggccagtacagctttcttgtggttccctgcactggtactaacagctttggtagccctgctgcgcaaacctgcttaaatgaatatcatctttttttcctactgactggagcatttatgggctatagctatagcctcctgtattttgttaacaacatgaactatcttccatttcccatcatacagcaatacaagttcttgcgttttaggagatctctgctcttattagttaaacacagttgtgtggaatcactgttcctggttagaaatttctgcattttatattattttcttggctatattcccaaagcttggattagcactgctatgaaccttcacatagatgagcaggttcataggccacttgacacagtgagtggcctcttaaatctctcgttactctaccatgtctggctgtgtggtgtctttctcctgacgacttggtatgtctcatggatactcttcaaaatctatgccacagaggctcatgtgtttcctgttcaaccaccatttgcagaagggtcagatgagtgccttccaaaagtgttaaatagcaatcctccccccatcataaagtatttagccttgcaggacctgatgttgctttctcaatattctccttcacgaagacaagaagttttcagcctcagccaaccaggtggacatccccacaattggacagccatttcaagggagtgtttgaatcttttaaatggtatgactcagaaactgattctctatcaagaagctgctgctacgaatgggagagtgtcttcatcttacccagtggaacctaagaaattaaattctccagaagaaactgcttttcagacaccaaaatctagccagatgcctcggccttcagtgccaccattagttaaaacatcactgttttcttcaaaattatctacacctgatgttgtgagcccatttgggaccccatttggctctagtgtaatgaatcggatggctggaatttttgatgtaaacacctgctatgggtcaccgcaaagtcctcagctaataagaagggggccaagattgtggacatcagcttctgatcagcaaatgactgaattttctaatccttctccatctacctctattagtgctgaggcacccagaggcctccattcaggctgttttttcagatgcccaaatgcatatttgggcattagaaggtctgtcgcacttagtagcagcatcatttacagaggatagatttggagttgtccagacgacactaccagctatccttaatactttgttgacactgcaagaggcagtcgacaagtactttaagcttcctcatgcttccagtaaaccaccccggatttcaggaagccttgtggacacttcatataaaacattaagatttgcattcagagcatcactgaaaactgccatctatcgaataactactacatttggtgaacatctgaatgctgtgcaagcatctgcagaacatcagaaaagacttcaacagttcttggagttcaaagaatagttaagtaatataaactgtgttcattacactgctgatacaactacagatgggacagtaaatgttcagcattcttggatcagaagaaaacggactaattagatgcttcctttgtcgtggtggttgctttgaaaactatactttaatgggagaaatcatggaaagaaattctcaacagaataactgaaaactgccttttctgtaccgattgctttttgtgtgtgtggtataataaaatctttattcaattttacagaagcattgatggcagtcgaaatgtctctagctcatataacttaatagtaataactaaaaaacttttagaatttacttttgaaaggagggaagccagttctgaaatgagtataggttgatttcatagtcttcttaattaagagtttagctctttgtaaactcaaaatacataaactttttaagtgtagtttcatttactgaaggataaaaatggtaacagtgcagcaatattcacaaaaaatattgtctaacggacatattttgttaatctgttaggttgggtttttgtttccagggacaaattaaatttgtatgattacccaaaaaagggtctcagtttacagatgctaactctatataaaggaatgtggaaaaactcagttcttaagttacaagattaaaaattcacatttggtctttaagaaacaattgactgacatctatgaatttattttgtatcatgctagtaaacacgaagtattaatgtatgggtattttcccagctagttttgctttctttttctggagcaaaacattaagtgattgcagagtttttcaagcaagagaaaaaggtttgcaaaaaaacccaggaaatgttcccttttttccccaccattcatcttcattagatcaaattctgtgaaacttgtctggtctctcaaagggagcagcctctgtagtgttaaatggctaattaaaataggaagatctttatagccagaaacaacttagtcatcaaatagcaagtgaaaccaaaacgtcagagggattactgtacttggaagtatgttgtgtgtcccaaatgtgaacgaagtattgttagaatttattagatcagcttctttggagatcaaagattggaaatcctagtcatagatattcactggactggctttggactgaaatgctcctttgtaattcttttcctattgtcttttccttctagtgtcccaaaatattttctttaaagtcagcacagtactgtatatgaatctttaatgtggtatcatatatgtctacttttgtctgattcatcgatgtattatatctttataattgaatattttagctccgggtcctgttgccccttcaagcagtacatgccaaattataaataggtgctactggccttgagcatatcactgtgggacagttccccaattgtcaagtgtttagatatgtagactattgccatttgtttttttgttttggttttgctttgtgtctgaagctgaattgatttcttttttttgaatgtgaaagttgaatttcaaacgtagtcatttcttacagatggccaagacagaaaattgtggctaggttgactgagaactgttgtcttccatgtattaacacaattaagctttttatattccactctctgtgctgaccctggctgaggcattttgggagacaaggactctgaatcttctgcttccattaaagaagaactgtgatattcaacattggatttctgagaataaagataggatgattcctttgaactttgacttacttgtataaaatgtccagctaggttaggtttttgccatttcctatatactttgggtaaagctacatttgatgagcaatgtgaatgtttctgagaatgttcattcctgttttctcttaagagaatgtgctgtgtactaaatacaggccacatagtgtctgcctgttgaagatctggaaactgcctccccagatctgtattgtatttggtaggtaagggggtcagtttctttttctcattgtgtgttgataatctacacaccatctgttggaaccagggtgttattatggggaactcctcctgtgtactaggaggaggaccttagggagaccaagaggagagaagcatttcctttgatgaagtcacatcctgtctatgagcccactaatgctgtaacattggcctgaaagagagtgttctttaaaagcctttctcggctgttagtataaaaacatgatggtatcagctcttagcatgtttgcttgacccttatggaaggtataaatccacagaacttccttcccagagaactgggaaattgtcctagaaataaaccttgtacagttgagtggacatggataagcaacaatttgttactttgcaggatttgttccttggtaattgtttggtgtgtcatcctgtaaatattcatgatagtctgtttatatccttttgtatatcgttgatactggattgggtagaaaaataaattggcaatttaaaaaaatggaacagttaattgaaaaaaaagtg

SEQ ID NO: 428353 - DNA, 3853 bp, Homo sapiens
  misc_feature (44)..(44): n is a, c, g, or t
agtaacatgatacgatcgagctcggacccagtgcgcaacgcgtnctattgtggagaagaccaccacatcctttggtttcacttttaggtgacttataaagtaatagggagaaatgagggcagatcattttgctagctctaactgaagaattccagtcaatcaatactgtggctgttatcggctttataaaagactactattcccagcatgcctcaaggcacctccaggaagaccttgactcccagcattctgtactttggaactccgagtcccagaatgcaacattcctcctacttcctctcagggggccgtcgagactacagttcccagcatgcagcgccgccacctgcttctggcgccccgctggaccctgcttcgaagggaccgtttggtcgccagagggcggttcctggagttacagccgcgtttgcgggacgtgtctgcgcggcagtcctggcctgttgagcttgtccagacgaagcctcgcagggatgggttggagcctgggccgggcttcgctcaggcagcgtttgaggcagacccagcagggtcctcctggggccttcctgcctttgaactgcggtggcgggcgggcgcacggtctcctgtacgccctagactaggggccgccatctccatggccacggccgtgagccggccctgcgccggcaggtcgcgggacatactgtggcgcattctttcagtgacctgtatagttcctatgtaatcttttacttcctgctgctgtcagtggtaataataataataagtattttcaatgtggagttctatgcagttgtgccttctattccttgctccagactagctctgatagggaagatcattcatcctcagcaactcatgcactcatttattcatgctgcaatgggaatggtgatggcctggtgtgctgcagtgataacccagggccagtacagctttcttgtggttccctgcactggtactaacagctttggtagccctgctgcgcaaacctgcttaaatgaatatcatctttttttcctactgactggagcatttatgggctatagctatagcctcctgtattttgttaacaacatgaactatcttccatttcccatcatacaggcagtcgacaagtactttaagcttcctcatgcttccagtaaaccaccccggatttcaggaagccttgtggacacttcatataaaacattaagatttgcattcagagcatcactgaaaactgccatctatcgaataactactacatttggtgaacatctgaatgctgtgcaagcatctgcagaacatcagaaaagacttcaacagttcttggagttcaaagaatagttaagtaatataaactgtgttcattacactgctgatacaactacagatgggacagtaaatgttcagcattcttggatcagaagaaaacggactaattagatgcttcctttgtcgtggtggttgctttgaaaactatactttaatgggagaaatcatggaaagaaattctcaacagaataactgaaaactgccttttctgtaccgattgctttttgtgtgtgtggtataataaaatctttattcaattttacagaagcattgatggcagtcgaaatgtctctagctcatataacttaatagtaataactaaaaaacttttagaatttacttttgaaaggagggaagccagttctgaaatgagtataggttgatttcatagtcttcttaattaagagtttagctctttgtaaactcaaaatacataaactttttaagtgtagtttcatttactgaaggataaaaatggtaacagtgcagcaatattcacaaaaaatattgtctaacggacatattttgttaatctgttaggttgggtttttgtttccagggacaaattaaatttgtatgattacccaaaaaagggtctcagtttacagatgctaactctatataaaggaatgtggaaaaactcagttcttaagttacaagattaaaaattcacatttggtctttaagaaacaattgactgacatctatgaatttattttgtatcatgctagtaaacacgaagtattaatgtatgggtattttcccagctagttttgctttctttttctggagcaaaacattaagtgattgcagagtttttcaagcaagagaaaaaggtttgcaaaaaaacccaggaaatgttcccttttttccccaccattcatcttcattagatcaaattctgtgaaacttgtctggtctctcaaagggagcagcctctgtagtgttaaatggctaattaaaataggaagatctttatagccagaaacaacttagtcatcaaatagcaagtgaaaccaaaacgtcagagggattactgtacttggaagtatgttgtgtgtcccaaatgtgaacgaagtattgttagaatttattagatcagcttctttggagatcaaagattggaaatcctagtcatagatattcactggactggctttggactgaaatgctcctttgtaattcttttcctattgtcttttccttctagtgtcccaaaatattttctttaaagtcagcacagtactgtatatgaatctttaatgtggtatcatatatgtctacttttgtctgattcatcgatgtattatatctttataattgaatattttagctccgggtcctgttgccccttcaagcagtacatgccaaattataaataggtgctactggccttgagcatatcactgtgggacagttccccaattgtcaagtgtttagatatgtagactattgccatttgtttttttgttttggttttgctttgtgtctgaagctgaattgatttcttttttttgaatgtgaaagttgaatttcaaacgtagtcatttcttacagatggccaagacagaaaattgtggctaggttgactgagaactgttgtcttccatgtattaacacaattaagctttttatattccactctctgtgctgaccctggctgaggcattttgggagacaaggactctgaatcttctgcttccattaaagaagaactgtgatattcaacattggatttctgagaataaagataggatgattcctttgaactttgacttacttgtataaaatgtccagctaggttaggtttttgccatttcctatatactttgggtaaagctacatttgatgagcaatgtgaatgtttctgagaatgttcattcctgttttctcttaagagaatgtgctgtgtactaaatacaggccacatagtgtctgcctgttgaagatctggaaactgcctccccagatctgtattgtatttggtaggtaagggggtcagtttctttttctcattgtgtgttgataatctacacaccatctgttggaaccagggtgttattatggggaactcctcctgtgtactaggaggaggaccttagggagaccaagaggagagaagcatttcctttgatgaagtcacatcctgtctatgagcccactaatgctgtaacattggcctgaaagagagtgttctttaaaagcctttctcggctgttagtataaaaacatgatggtatcagctcttagcatgtttgcttgacccttatggaaggtataaatccacagaacttccttcccagagaactgggaaattgtcctagaaataaaccttgtacagttgagtggacatggataagcaacaatttgttactttgcaggatttgttccttggtaattgtttggtgtgtcatcctgtaaatattcatgatagtctgtttatatccttttgtatatcgttgatactggattgggtagaaaaataaattggcaatttaaaaaaatggaacagttaattgaaaaaaaagtg

SEQ ID NO: 428354 - DNA, 3146 bp, Homo sapiens
tccaggctagtcgagcctgtgttatcggccgaggcagagggcggttcctggagttacagccgcgtttgcgggacgtgtctgcgcggcagtcctggcctgttgagcttgtccagacgaagcctcgcagggatgggttggagcctgggccgggcttcgctcaggcagcgtttgaggcagacccagcagggtcctcctggggccttcctgcctttgaactgcggtggcgggcgggcgcacggtctcctgtacgccctagactaggggccgccatctccatggccacggccgtgagccggccctgcgccggcaggtcgcgggacatactgtggcgcgttttgggctggaggatagttgcaagtattgtttggtcagtgctatttctacccatctgcaccacagtatttataattttcagcaggattgatttgtttcatcctatacagtggctgtctgattctttcagtgacctgtatagttcctatgtaatcttttacttcctgctgctgtcagtggtaataataataataagtattttcaatgtggagttctatgcagttgtgccttctattccttgctccagactagctctgatagggaagatcattcatcctcagcaactcatgcactcatttattcatgctgcaatgggaatggtgatggcctggtgtgctgcagtgataacccagggccagtacagctttcttgtggttccctgcactggtactaacagctttggtagccctgctgcgcaaacctgcttaaatgaatatcatctttttttcctactgactggagcatttatgggctatagctatagcctcctgtattttgttaacaacatgaactatcttccatttcccatcatacagcaatacaagttcttgcgttttaggagatctctgctcttattagttaaacacagttgtgtggaatcactgttcctggttagaaatttctgcattttatattattttcttggctatattcccaaagcttggattagcactgctatgaaccttcacatagatgagcaggttcataggccacttgacacagtgagtggcctcttaaatctctcgttactctaccatgtctggctgtgtggtgtctttctcctgacgacttggtatgtctcatggatactcttcaaaatctatgccacagaggctcatgtgtttcctgttcaaccaccatttgcagaagggtcagatgagtgccttccaaaagtgttaaatagcaatcctccccccatcataaagtatttagccttgcaggacctgatgttgctttctcaatattctccttcacgaagacaagaagttttcagcctcagccaaccaggtggacatccccacaattggacagccatttcaagggagtgtttgaatcttttaaatggtatgactcagaaactgattctctatcaagaagctgctgctacgaatgggagagtgtcttcatcttacccagtggaacctaagaaattaaattctccaggcagtcgacaagtactttaagcttcctcatgcttccagtaaaccaccccggatttcaggaagccttgtggacacttcatataaaacattaagatttatagccagaaacaacttagtcatcaaatagcaagtgaaaccaaaacgtcagagggattactgtacttggaagtatgttgtgtgtcccaaatgtgaacgaagtattgttagaatttattagatcagcttctttggagatcaaagattggaaatcctagtcatagatattcactggactggctttggactgaaatgctcctttgtaattcttttcctattgtcttttccttctagtgtcccaaaatattttctttaaagtcagcacagtactgtatatgaatctttaatgtggtatcatatatgtctacttttgtctgattcatcgatgtattatatctttataattgaatattttagctccgggtcctgttgccccttcaagcagtacatgccaaattataaataggtgctactggccttgagcatatcactgtgggacagttccccaattgtcaagtgtttagatatgtagactattgccatttgtttttttgttttggttttgctttgtgtctgaagctgaattgatttcttttttttgaatgtgaaagttgaatttcaaacgtagtcatttcttacagatggccaagacagaaaattgtggctaggttgactgagaactgttgtcttccatgtattaacacaattaagctttttatattccactctctgtgctgaccctggctgaggcattttgggagacaaggactctgaatcttctgcttccattaaagaagaactgtgatattcaacattggatttctgagaataaagataggatgattcctttgaactttgacttacttgtataaaatgtccagctaggttaggtttttgccatttcctatatactttgggtaaagctacatttgatgagcaatgtgaatgtttctgagaatgttcattcctgttttctcttaagagaatgtgctgtgtactaaatacaggccacatagtgtctgcctgttgaagatctggaaactgcctccccagatctgtattgtatttggtaggtaagggggtcagtttctttttctcattgtgtgttgataatctacacaccatctgttggaaccagggtgttattatggggaactcctcctgtgtactaggaggaggaccttagggagaccaagaggagagaagcatttcctttgatgaagtcacatcctgtctatgagcccactaatgctgtaacattggcctgaaagagagtgttctttaaaagcctttctcggctgttagtataaaaacatgatggtatcagctcttagcatgtttgcttgacccttatggaaggtataaatccacagaacttccttcccagagaactgggaaattgtcctagaaataaaccttgtacagttgagtggacatggataagcaacaatttgttactttgcaggatttgttccttggtaattgtttggtgtgtcatcctgtaaatattcatgatagtctgtttatatccttttgtatatcgttgatactggattgggtagaaaaataaattggcaatttaaaaaaatggaacagttaattgaaaaaaaagtg

SEQ ID NO: 428355 - DNA, 2782 bp, Homo sapiens
tccaggctagtcgagcctgtgttatcggccgaggcagagggcggttcctggagttacagccgcgtttgcgggacgtgtctgcgcggcagtcctggcctgttgagcttgtccagacgaagcctcgcagggatgggttggagcctgggccgggcttcgctcaggcagcgtttgaggcagacccagcagggtcctcctggggccttcctgcctttgaactgcggtggcgggcgggcgcacggtctcctgtacgccctagactaggggccgccatctccatggccacggccgtgagccggccctgcgccggcaggtcgcgggacatactgtggcgcgttttgggctggaggatagttgcaagtattgtttggtcagtgctatttctacccatctgcaccacagtatttataattttcagcaggattgatttgtttcatcctatacagtggctgtctgattctttcagtgacctgtatagttcctatgtaatcttttacttcctgctgctgtcagtggtaataataataataagtattttcaatgtggagttctatgcagttgtgccttctattccttgctccagactagctctgatagggaagatcattcatcctcagcaactcatgcactcatttattcatgctgcaatgggaatggtgatggcctggtgtgctgcagtgataacccagggccagtacagctttcttgtggttccctgcactggtactaacagctttggtagccctgctgcgcaaacctgcttaaatgaatatcatctttttttcctactgactggagcatttatgggctatagctatagcctcctgtattttgttaacaacatgaactatcttccatttcccatcatacagcaatacaagttcttgcgttttaggagatctctgctcttattagttaaacacagttgtgtggaatcactgttcctggttagaaatttctgcattttatattattttcttggctatattcccaaagcttggattagcactgctatgaaccttcacatagatgagcaggttcataggccacttgacacagtgagtggcctcttaaatctctcgttactctaccatgtctggctgtgtggtgtctttctcctgacgacttggtatgtctcatggatactcttcaaaatctatgccacagaggctcatgtgtttcctgttcaaccaccatttgcagaagggtcagatgagtgccttccaaaagtgttaaatagcaatcctccccccatcataaagtatttagccttgcaggacctgatgttgctttctcaatattctccttcacgaagacaagaagttttcagcctcagccaaccaggtggacatccccacaattggacagccatttcaagggagtgtttgaatcttttaaatggtatgactcagaaactgattctctatcaagaagctgctgctacgaatgggagagtgtcttcatcttacccagtggaacctaagaaattaaattctccagaagaaactgcttttcagacaccaaaatctagccagatgcctcggccttcagtgccaccattagttaaaacatcactgttttcttcaaaattatctacacctgatgttgtgagcccatttgggaccccatttggctctagtgtaatgaatcggatggctggaatttttgatgtaaacacctgctatgggtcaccgcaaagtcctcagctaataagaagggggccaagattgtggacatcagcttctgatcagcaaatgactgaattttctaatccttctccatctacctctattagtgctgagggtaagacaatgagacaacccagtgtgatttattcatggattcagaataaacgtgaacagattaagaatttcttgtcaaaacgggtgctgataatgtattttttcagtaagcacccagaggcctccattcaggctgttttttcagatgcccaaatgcatatttgggcattagaaggtctgtcgcacttagtagcagcatcatttacagaggatagatttggagttgtccagacgacactaccagctatccttaatactttgttgacactgcaagaggcagtcgacaagtactttaagcttcctcatgcttccagtaaaccaccccggatttcaggaagccttgtggacacttcatataaaacattaagatttgcattcagagcatcactgaaaactgccatctatcgaataactactacatttggtgaacatctgaacaaactgaagacttggggtgagcaaagtattccagaaatgaatccctggtgctttgtgattcatgctggaaaaacaccaacagatcacaacaccttgagaaacagaaccagagagaaaaccacaaatgccaagcctgtttatatttagttttattcatgtttactgctttcctcttgtgaaatgatctagctaggcaggatgagggatactagcttagtaactaaactgtatttatatttatcacaattataaatgaactttagaagacacgagagattgctctgctgtttttgtatgcaatcaatgaatagtttaagacttccaatttaaattaaagttaaataaagttaaaaattcaatttgtcagtcaccctagccacatttgaagtacttaataactacatgtgtttagtagctactgtattggacaacagaagtataacatctttccctacttccagaaagttttatcagatagtgctattctagacaatacacttagaacttaatgttttttcatttactcttttcaaagaccctgtgaa

SEQ ID NO: 428356 - DNA, 1487 bp, Homo sapiens
tccaggctagtcgagcctgtgttatcggccgaggcagagggcggttcctggagttacagccgcgtttgcgggacgtgtctgcgcggcagtcctggcctgttgagcttgtccagacgaagcctcgcagggatgggttggagcctgggccgggcttcgctcaggcagcgtttgaggcagacccagcagggtcctcctggggccttcctgcctttgaactgcggtggcgggcgggcgcacggtctcctgtacgccctagactaggggccgccatctccatggccacggccgtgagccggccctgcgccggcaggtcgcgggacatactgtggcgcgttttgggctggaggatagttgcaagtattgtttggtcagtgctatttctacccatctgcaccacagtatttataattttcagcaggattgatttgtttcatcctatacagtggctgtctgattctttcagtgacctgtatagttcctatgtaatcttttacttcctgctgctgtcagtggtaataataataataagtattttcaatgtggagttctatgcagttgtgccttctattccttgctccagactagctctgatagggaagatcattcatcctcagcaactcatgcactcatttattcatgctgcaatgggaatggtgatggcctggtgtgctgcagtgataacccagggccagtacagctttcttgtggttccctgcactggtactaacagctttggtagccctgctgcgcaaacctgcttaaatgaatatcatctttttttcctactgactggagcatttatgggctatagctatagcctcctgtattttgttaacaacatgaactatcttccatttcccatcatacagcaatacaagttcttgcgttttaggagatctctgctcttattagttaaacacagttgtgtggaatcactgttcctggttagaaatttctgcattttatattattttcttggctatattcccaaagcttggattagcactgctatgaaccttcacatagatgagcaggttcataggccacttgacacagtgagtggcctcttaaatctctcgttactctaccatgtctggctgtgtggtgtctttctcctgacgacttggtatgtctcatggatactcttcaaaatctatgccacagaggctcatgtgtttcctgttcaaccaccatttgcagaagggtcagatgagtgccttccaaaagtgttaaatagcaatcctccccccatcataaagtatttagccttgcaggacctgatgttgctttctcaatattctccttcacgaagacaagaagttttcagcctcagccaaccagcaccttgtataggaattcccatgaattatgacttctcattctgttttatcagagtgcatatatgtcctacttcaggaaaagtaaaacagtcatttacgaaagaaagtcaatctgtatcctaagcattttaataaaaagttaaaaca

SEQ ID NO: 428357 - DNA, 308 bp, Homo sapiens
aaactgtagccccgatttaggtctgttcttcccttaaagctccctcatgtacctcataagaaagtattagggaaagagctttataaagatatcgaaggagaggagtctgtcaacattgttatttagacataatatttgtgtctcaatgtggagacttaagtgtgttaatatttagattgcatttttcctagaggattaatagtaatttctgcattcacaggcaggttcataggccacttgacacagtgagtggcctcttaaatctctcgttactctaccatgtctggctgtgtggtgtctttctcctg

SEQ ID NO: 428358 - DNA, 5180 bp, Homo sapiens
  misc_feature (44)..(44): n is a, c, g, or t
agtaacatgatacgatcgagctcggacccagtgcgcaacgcgtnctattgtggagaagaccaccacatcctttggtttcacttttaggtgacttataaagtaatagggagaaatgagggcagatcattttgctagctctaactgaagaattccagtcaatcaatactgtggctgttatcggctttataaaagactactattcccagcatgcctcaaggcacctccaggaagaccttgactcccagcattctgtactttggaactccgagtcccagaatgcaacattcctcctacttcctctcagggggccgtcgagactacagttcccagcatgcagcgccgccacctgcttctggcgccccgctggaccctgcttcgaagggaccgtttggtcgccagagggcggttcctggagttacagccgcgtttgcgggacgtgtctgcgcggcagtcctggcctgttgagcttgtccagacgaagcctcgcagggatgggttggagcctgggccgggcttcgctcaggcagcgtttgaggcagacccagcagggtcctcctggggccttcctgcctttgaactgcggtggcgggcgggcgcacggtctcctgtacgccctagactaggggccgccatctccatggccacggccgtgagccggccctgcgccggcaggtcgcgggacatactgtggcgcgttttgggctggaggatagttgcaagtattgtttggtcagtgctatttctacccatctgcaccacagtatttataattttcagcaggattgatttgtttcatcctatacagtggctgtctgattctttcagtgacctgtatagttcctatgtaatcttttacttcctgctgctgtcagtggtaataataataataagtattttcaatgtggagttctatgcagttgtgccttctattccttgctccagactagctctgatagggaagatcattcatcctcagcaactcatgcactcatttattcatgctgcaatgggaatggtgatggcctggtgtgctgcagtgataacccagggccagtacagctttcttgtggttccctgcactggtactaacagctttggtagccctgctgcgcaaacctgcttaaatgaatatcatctttttttcctactgactggagcatttatgggctatagctatagcctcctgtattttgttaacaacatgaactatcttccatttcccatcatacagcaatacaagttcttgcgttttaggagatctctgctcttattagttaaacacagttgtgtggaatcactgttcctggttagaaatttctgcattttatattattttcttggctatattcccaaagcttggattagcactgctatgaaccttcacatagatgagcaggttcataggccacttgacacagtgagtggcctcttaaatctctcgttactctaccatgtctggctgtgtggtgtctttctcctgacgacttggtatgtctcatggatactcttcaaaatctatgccacagaggctcatgtgtttcctgttcaaccaccatttgcagaagggtcagatgagtgccttccaaaagtgttaaatagcaatcctccccccatcataaagtatttagccttgcaggacctgatgttgctttctcaatattctccttcacgaagacaagaagttttcagcctcagccaaccaggtggacatccccacaattggacagccatttcaagggagtgtttgaatcttttaaatggtatgactcagaaactgattctctatcaagaagctgctgctacgaatgggagagtgtcttcatcttacccagtggaacctaagaaattaaattctccagaagaaactgcttttcagacaccaaaatctagccagatgcctcggccttcagtgccaccattagttaaaacatcactgttttcttcaaaattatctacacctgatgttgtgagcccatttgggaccccatttggctctagtgtaatgaatcggatggctggaatttttgatgtaaacacctgctatgggtcaccgcaaagtcctcagctaataagaagggggccaagattgtggacatcagcttctgatcagcaaatgactgaattttctaatccttctccatctacctctattagtgctgagggtaagacaatgagacaacccagtgtgatttattcatggattcagaataaacgtgaacagattaagaatttcttgtcaaaacgggtgctgataatgtattttttcagtaagcacccagaggcctccattcaggctgttttttcagatgcccaaatgcatatttgggcattagaaggtctgtcgcacttagtagcagcatcatttacagaggatagatttggagttgtccagacgacactaccagctatccttaatactttgttgacactgcaagaggcagtcgacaagtactttaagcttcctcatgcttccagtaaaccaccccggatttcaggaagccttgtggacacttcatataaaacattaagatttgcattcagagcatcactgaaaactgccatctatcgaataactactacatttggtgaacatctgaatgctgtgcaagcatctgcagaacatcagaaaagacttcaacagttcttggagttcaaagaatagttaagtaatataaactgtgttcattacactgctgatacaactacagatgggacagtaaatgttcagcattcttggatcagaagaaaacggactaattagatgcttcctttgtcgtggtggttgctttgaaaactatactttaatgggagaaatcatggaaagaaattctcaacagaataactgaaaactgccttttctgtaccgattgctttttgtgtgtgtggtataataaaatctttattcaattttacagaagcattgatggcagtcgaaatgtctctagctcatataacttaatagtaataactaaaaaacttttagaatttacttttgaaaggagggaagccagttctgaaatgagtataggttgatttcatagtcttcttaattaagagtttagctctttgtaaactcaaaatacataaactttttaagtgtagtttcatttactgaaggataaaaatggtaacagtgcagcaatattcacaaaaaatattgtctaacggacatattttgttaatctgttaggttgggtttttgtttccagggacaaattaaatttgtatgattacccaaaaaagggtctcagtttacagatgctaactctatataaaggaatgtggaaaaactcagttcttaagttacaagattaaaaattcacatttggtctttaagaaacaattgactgacatctatgaatttattttgtatcatgctagtaaacacgaagtattaatgtatgggtattttcccagctagttttgctttctttttctggagcaaaacattaagtgattgcagagtttttcaagcaagagaaaaaggtttgcaaaaaaacccaggaaatgttcccttttttccccaccattcatcttcattagatcaaattctgtgaaacttgtctggtctctcaaagggagcagcctctgtagtgttaaatggctaattaaaataggaagatctttatagccagaaacaacttagtcatcaaatagcaagtgaaaccaaaacgtcagagggattactgtacttggaagtatgttgtgtgtcccaaatgtgaacgaagtattgttagaatttattagatcagcttctttggagatcaaagattggaaatcctagtcatagatattcactggactggctttggactgaaatgctcctttgtaattcttttcctattgtcttttccttctagtgtcccaaaatattttctttaaagtcagcacagtactgtatatgaatctttaatgtggtatcatatatgtctacttttgtctgattcatcgatgtattatatctttataattgaatattttagctccgggtcctgttgccccttcaagcagtacatgccaaattataaataggtgctactggccttgagcatatcactgtgggacagttccccaattgtcaagtgtttagatatgtagactattgccatttgtttttttgttttggttttgctttgtgtctgaagctgaattgatttcttttttttgaatgtgaaagttgaatttcaaacgtagtcatttcttacagatggccaagacagaaaattgtggctaggttgactgagaactgttgtcttccatgtattaacacaattaagctttttatattccactctctgtgctgaccctggctgaggcattttgggagacaaggactctgaatcttctgcttccattaaagaagaactgtgatattcaacattggatttctgagaataaagataggatgattcctttgaactttgacttacttgtataaaatgtccagctaggttaggtttttgccatttcctatatactttgggtaaagctacatttgatgagcaatgtgaatgtttctgagaatgttcattcctgttttctcttaagagaatgtgctgtgtactaaatacaggccacatagtgtctgcctgttgaagatctggaaactgcctccccagatctgtattgtatttggtaggtaagggggtcagtttctttttctcattgtgtgttgataatctacacaccatctgttggaaccagggtgttattatggggaactcctcctgtgtactaggaggaggaccttagggagaccaagaggagagaagcatttcctttgatgaagtcacatcctgtctatgagcccactaatgctgtaacattggcctgaaagagagtgttctttaaaagcctttctcggctgttagtataaaaacatgatggtatcagctcttagcatgtttgcttgacccttatggaaggtataaatccacagaacttccttcccagagaactgggaaattgtcctagaaataaaccttgtacagttgagtggacatggataagcaacaatttgttactttgcaggatttgttccttggtaattgtttggtgtgtcatcctgtaaatattcatgatagtctgtttatatccttttgtatatcgttgatactggattgggtagaaaaataaattggcaatttaaaaaaatggaacagttaattgaaaaaaaagtg

SEQ ID NO: 428359 - DNA, 4725 bp, Homo sapiens
tccaggctagtcgagcctgtgttatcggccgaggcagagggcggttcctggagttacagccgcgtttgcgggacgtgtctgcgcggcagtcctggcctgttgagcttgtccagacgaagcctcgcagggatgggttggagcctgggccgggcttcgctcaggcagcgtttgaggcagacccagcagggtcctcctggggccttcctgcctttgaactgcggtggcgggcgggcgcacggtctcctgtacgccctagactaggggccgccatctccatggccacggccgtgagccggccctgcgccggcaggtcgcgggacatactgtggcgcgttttgggctggaggatagttgcaagtattgtttggtcagtgctatttctacccatctgcaccacagtatttataattttcagcaggattgatttgtttcatcctatacagtggctgtctgattctttcagtgacctgtatagttcctatgtaatcttttacttcctgctgctgtcagtggtaataataataataagtattttcaatgtggagttctatgcagttgtgccttctattccttgctccagactagctctgatagggaagatcattcatcctcagcaactcatgcactcatttattcatgctgcaatgggaatggtgatggcctggtgtgctgcagtgataacccagggccagtacagctttcttgtggttccctgcactggtactaacagctttggtagccctgctgcgcaaacctgcttaaatgaatatcatctttttttcctactgactggagcatttatgggctatagctatagcctcctgtattttgttaacaacatgaactatcttccatttcccatcatacagcaatacaagttcttgcgttttaggagatctctgctcttattagttaaacacagttgtgtggaatcactgttcctggttagaaatttctgcattttatattattttcttggctatattcccaaagcttggattagcactgctatgaaccttcacatagatgagcaggttcataggccacttgacacagtgagtggcctcttaaatctctcgttactctaccatgtctggctgtgtggtgtctttctcctgacgacttggtatgtctcatggatactcttcaaaatctatgccacagaggctcatgtgtttcctgttcaaccaccatttgcagaagggtcagatgagtgccttccaaaagtgttaaatagcaatcctccccccatcataaagtatttagccttgcaggacctgatgttgctttctcaatattctccttcacgaagacaagaagttttcagcctcagccaaccaggtggacatccccacaattggacagccatttcaagggagtgtttgaatcttttaaatggtatgactcagaaactgattctctatcaagaagctgctgctacgaatgggagagtgtcttcatcttacccagtggaacctaagaaattaaattctccagaagaaactgcttttcagacaccaaaatctagccagatgcctcggccttcagtgccaccattagttaaaacatcactgttttcttcaaaattatctacacctgatgttgtgagcccatttgggaccccatttggctctagtgtaatgaatcggatggctggaatttttgatgtaaacacctgctatgggtcaccgcaaagtcctcagctaataagaagggggccaagattgtggacatcagcttctgatcagcaaatgactgaattttctaatccttctccatctacctctattagtgctgagggtaagacaatgagacaacccagtgtgatttattcatggattcagaataaacgtgaacagattaagaatttcttgtcaaaacgggtgctgataatgtattttttcagtaagcacccagaggcctccattcaggctgttttttcagatgcccaaatgcatatttgggcattagaaggtctgtcgcacttagtagcagcatcatttacagaggatagatttggagttgtccagacgacactaccagctatccttaatactttgttgacactgcaagaggcagtcgacaagtactttaagcttcctcatgcttccagtaaaccaccccggatttcaggaagccttgtggacacttcatataaaacattaagatttgcattcagagcatcactgaaaactgccatctatcgaataactactacatttggtgaacatctgaatgctgtgcaagcatctgcagaacatcagaaaagacttcaacagttcttggagttcaaagaatagttaagtaatataaactgtgttcattacactgctgatacaactacagatgggacagtaaatgttcagcattcttggatcagaagaaaacggactaattagatgcttcctttgtcgtggtggttgctttgaaaactatactttaatgggagaaatcatggaaagaaattctcaacagaataactgaaaactgccttttctgtaccgattgctttttgtgtgtgtggtataataaaatctttattcaattttacagaagcattgatggcagtcgaaatgtctctagctcatataacttaatagtaataactaaaaaacttttagaatttacttttgaaaggagggaagccagttctgaaatgagtataggttgatttcatagtcttcttaattaagagtttagctctttgtaaactcaaaatacataaactttttaagtgtagtttcatttactgaaggataaaaatggtaacagtgcagcaatattcacaaaaaatattgtctaacggacatattttgttaatctgttaggttgggtttttgtttccagggacaaattaaatttgtatgattacccaaaaaagggtctcagtttacagatgctaactctatataaaggaatgtggaaaaactcagttcttaagttacaagattaaaaattcacatttggtctttaagaaacaattgactgacatctatgaatttattttgtatcatgctagtaaacacgaagtattaatgtatgggtattttcccagctagttttgctttctttttctggagcaaaacattaagtgattgcagagtttttcaagcaagagaaaaaggtttgcaaaaaaacccaggaaatgttcccttttttccccaccattcatcttcattagatcaaattctgtgaaacttgtctggtctctcaaagggagcagcctctgtagtgttaaatggctaattaaaataggaagatctttatagccagaaacaacttagtcatcaaatagcaagtgaaaccaaaacgtcagagggattactgtacttggaagtatgttgtgtgtcccaaatgtgaacgaagtattgttagaatttattagatcagcttctttggagatcaaagattggaaatcctagtcatagatattcactggactggctttggactgaaatgctcctttgtaattcttttcctattgtcttttccttctagtgtcccaaaatattttctttaaagtcagcacagtactgtatatgaatctttaatgtggtatcatatatgtctacttttgtctgattcatcgatgtattatatctttataattgaatattttagctccgggtcctgttgccccttcaagcagtacatgccaaattataaataggtgctactggccttgagcatatcactgtgggacagttccccaattgtcaagtgtttagatatgtagactattgccatttgtttttttgttttggttttgctttgtgtctgaagctgaattgatttcttttttttgaatgtgaaagttgaatttcaaacgtagtcatttcttacagatggccaagacagaaaattgtggctaggttgactgagaactgttgtcttccatgtattaacacaattaagctttttatattccactctctgtgctgaccctggctgaggcattttgggagacaaggactctgaatcttctgcttccattaaagaagaactgtgatattcaacattggatttctgagaataaagataggatgattcctttgaactttgacttacttgtataaaatgtccagctaggttaggtttttgccatttcctatatactttgggtaaagctacatttgatgagcaatgtgaatgtttctgagaatgttcattcctgttttctcttaagagaatgtgctgtgtactaaatacaggccacatagtgtctgcctgttgaagatctggaaactgcctccccagatctgtattgtatttggtaggtaagggggtcagtttctttttctcattgtgtgttgataatctacacaccatctgttggaaccagggtgttattatggggaactcctcctgtgtactaggaggaggaccttagggagaccaagaggagagaagcatttcctttgatgaagtcacatcctgtctatgagcccactaatgctgtaacattggcctgaaagagagtgttctttaaaagcctttctcggctgttagtataaaaacatgatggtatcaggctataccacccatctgtctcagcctcccaaagtgctgggattacaggtgtgagccaccgcgccaggcctcagaccacttcttttgggtggcaatggtttggatatcgtttgtcctcactaaaatatcatgttgagattcgagccccagtgtggcaggtgttgggatgtggggcctcataggagctgtgtggtc

SEQ ID NO: 428360 - DNA, 2552 bp, Homo sapiens
tccaggctagtcgagcctgtgttatcggccgaggcagagggcggttcctggagttacagccgcgtttgcgggacgtgtctgcgcggcagtcctggcctgttgagcttgtccagacgaagcctcgcagggatgggttggagcctgggccgggcttcgctcaggcagcgtttgaggcagacccagcagggtcctcctggggccttcctgcctttgaactgcggtggcgggcgggcgcacggtctcctgtacgccctagactaggggccgccatctccatggccacggccgtgagccggccctgcgccggcaggtcgcgggacatactgtggcgcgttttgggctggaggatagttgcaagtattgtttggtcagtgctatttctacccatctgcaccacagtatttataattttcagcaggattgatttgtttcatcctatacagtggctgtctgattctttcagtgacctgtatagttcctatgtaatcttttacttcctgctgctgtcagtggtaataataataataagtattttcaatgtggagttctatgcagttgtgccttctattccttgctccagactagctctgatagggaagatcattcatcctcagcaactcatgcactcatttattcatgctgcaatgggaatggtgatggcctggtgtgctgcagtgataacccagggccagtacagctttcttgtggttccctgcactggtactaacagctttggtagccctgctgcgcaaacctgcttaaatgaatatcatctttttttcctactgactggagcatttatgggctatagctatagcctcctgtattttgttaacaacatgaactatcttccatttcccatcatacagcaatacaagttcttgcgttttaggagatctctgctcttattagttaaacacagttgtgtggaatcactgttcctggttagaaatttctgcattttatattattttcttggctatattcccaaagcttggattagcactgctatgaaccttcacatagatgagcaggttcataggccacttgacacagtgagtggcctcttaaatctctcgttactctaccatgtctggctgtgtggtgtctttctcctgacgacttggtatgtctcatggatactcttcaaaatctatgccacagaggctcatgtgtttcctgttcaaccaccatttgcagaagggtcagatgagtgccttccaaaagtgttaaatagcaatcctccccccatcataaagtatttagccttgcaggacctgatgttgctttctcaatattctccttcacgaagacaagaagttttcagcctcagccaaccaggtggacatccccacaattggacagccatttcaagggagtgtttgaatcttttaaatggtatgactcagaaactgattctctatcaagaagctgctgctacgaatgggagagtgtcttcatcttacccagtggaacctaagaaattaaattctccagaagaaactgcttttcagacaccaaaatctagccagatgcctcggccttcagtgccaccattagttaaaacatcactgttttcttcaaaattatctacacctgatgttgtgagcccatttgggaccccatttggctctagtgtaatgaatcggatggctggaatttttgatgtaaacacctgctatgggtcaccgcaaagtcctcagctaataagaagggggccaagattgtggacatcagcttctgatcagcaaatgactgaattttctaatccttctccatctacctctattagtgctgagggtaagacaatgagacaacccagtgtgatttattcatggattcagaataaacgtgaacagattaagaatttcttgtcaaaacgggtgctgataatgtattttttcagtaagcacccagaggcctccattcaggctgttttttcagatgcccaaatgcatatttgggcattagaaggtctgtcgcacttagtagcagcatcatttacagaggatagatttggagttgtccagacgacactaccagctatccttaatactttgttgacactgcaagaggcagtcgacaagtactttaagcttcctcatgcttccagtaaaccaccccggatttcaggaagccttgtggacacttcatataaaacattaagatttgcattcagagcatcactgaaaactgccatctatcgaataactactacatttggtgaacatctgaatgctgtgcaagcatctgcagaacatcagaaaagacttcaacagttcttggagttcaaagaatagttaagtaatataaactgtgttcattacactgctgatacaactacagatgggacagtaaatgttcagcattcttggatcagaagaaaacggactaattagatgcttcctttgtcgtggtggttgctttgaaaactatactttaatgggagaaatcatggaaagaaattctcaacagaataactgaaaactgccttttctgtaccgattgctttttgtgtgtgtggtataataaaatctttattcaattttaca

SEQ ID NO: 428361 - DNA, 1346 bp, Homo sapiens
tccaggctagtcgagcctgtgttatcggccgaggcagagggcggttcctggagttacagccgcgtttgcgggacgtgtctgcgcggcagtcctggcctgttgagcttgtccagacgaagcctcgcagggatgggttggagcctgggccgggcttcgctcaggcagcgtttgaggcagacccagcagggtcctcctggggccttcctgcctttgaactgcggtggcgggcgggcgcacggtctcctgtacgccctagactaggggccgccatctccatggccacggccgtgagccggccctgcgccggcaggtcgcgggacatactgtggcgcgttttgggctggaggatagttgcaagtattgtttggtcagtgctatttctacccatctgcaccacagtatttataattttcagcaggattgatttgtttcatcctatacagtggctgtctgattctttcagtgacctgtatagttcctatgtaatcttttacttcctgctgctgtcagtggtaataataataataagtattttcaatgtggagttctatgcagttgtgccttctattccttgctccagactagctctgatagggaagatcattcatcctcagcaactcatgcactcatttattcatgctgcaatgggaatggtgatggcctggtgtgctgcagtgataacccagggccagtacagctttcttgtggttccctgcactggtactaacagctttggtagccctgctgcgcaaacctgcttaaatgaatatcatctttttttcctactgactggagcatttatgggctatagctatagcctcctgtattttgttaacaacatgaactatcttccatttcccatcatacaggcagtcgacaagtactttaagcttcctcatgcttccagtaaaccaccccggatttcaggaagccttgtggacacttcatataaaacattaagatttgcattcagagcatcactgaaaactgccatctatcgaataactactacatttggtgaacatctgaatgctgtgcaagcatctgcagaacatcagaaaagacttcaacagttcttggagttcaaagaatagttaagtaatataaactgtgttcattacactgctgatacaactacagatgggacagtaaatgttcagcattcttggatcagaagaaaacggactaattagatgcttcctttgtcgtggtggttgctttgaaaactatactttaatgggagaaatcatggaaagaaattctcaacagaataactgaaaactgccttttctgtaccgattgctttttgtgtgtgtggtataataaaatctttattcaattttaca

SEQ ID NO: 428362 - DNA, 3040 bp, Homo sapiens
cggggcggggaccgtagcgggtgcagtccagctgctctggacgctgaggccccggcttctcttgctggggtgtcgattcgggagggctgagggcgcggccgagagaacggggcggtcaccgccgccgtggcccgcgcgtcccgcgctctccttgcagtgcaggccccagccgctctcgggcgcggcgtgggggaggcggccctgcaggtgcgtacccggggtccgacacgtgcggggcttcctgcgagctgagtccccgctgcgcgtcttcaggcctttgtaagttgtcaaatttcccaccggcccagctcatcgagcttcttcccagctgtgaacaggagggcctgttccctaattcttgccgaaattgttccaactgctggtgttctgcaagatggagccaggaggagagcccacaggtgctaaagagagcagtaccctgatggagtcccttgcagctgtgaaggctgctttcctggcgcaggccccgagtggcagccggtcagccgaggtgcaggcagctcagagcacggagcctgccgcagaggcaggcgctcccgagggagagggccacagaggggggcctccccgggcgttggggtctcttggcctttgtgaaaaccaggaagccagagagaggcccggaggttcccctcgaggcccggtcacttctgagaaaactggaggacagagtggcctcgagtcagacgtccctccgaacgcaggccccggcgcagagggcgggggcagctggaaggggcggcctttcccgtgcggcgcctgtggccgcagcttcaagtgctcctcggacgcggcaaagcaccggagcatccactcgggggagaaaccgtacgagtgcagcgactgcgggaaggccttcatccacagctcgcacgtggtccggcaccagcgggcgcacagcggggagaggccctacgcgtgcgccgagtgcggcaaggccttcggccagagcttcaacctcctccggcaccagcgcgtgcacacgggcgagaagccctacgcgtgcgccgactgcggcaaggccttcggccagaggtcggacgccgccaagcaccgccgcacccacaccggggagaggctgtacgcgtgcggcgagtgcgggaagcgcttcctgcacagctcgaacgtggtccggcaccggcggacccaccacggggagaacccgtacgagtgccgggagtgcggccaggccttcagccagagctccaacctcctccagcaccagcgcgtgcacacgggggagcggcccttcgcctgccaggactgcggccgcgccttcagccgcagctccttcctccgcgagcactgccgcatccacaccggggagaagccccaccagtgcggccactgcgggcgcgcgttccgggcgctgtcgggcttcttccggcaccagcgactccacacgggcgagaagccgttccgctgcaccgagtgcggccgcgccttccgcctgagcttccacctcatccagcaccggcgggtgcatggcgccgagtgagccggggctgcggcggaagagatgccggcggcctggtgggcgcgaggccgaggccgggggaggctcctgtccgccccgtgcgcggtgaggaagtaacagccggctgcgcgcctggttctcgggttgcgaaagcctcgccaggcctgcatccgccttggcttgggagcaatcaggagagacagggctcggggaaggcgagcgctgcccgcgggaggcgattcccagaggcggggaggtctcaggggtctgtcccgggccggccgcccgcctctgagactccccgcctcccacggtcagctgctgcggggcagtggccggtgattgaatcggtcattcctccgcaaccaggcctccatcaaaaccctgcatgagatgagggcctcgggcttcgggttggtgaaggcggggtgggggggcagttaggaagggggcgcccagacagggcatggaagcctcgcgtcctcccccgtaccttgcgggtcggtggttcatccatgtatttcaacgccttttcacagccggttcatatggtcccgacttctgtgtgcttagaaaattatggaacttggccgggtgcggtggctcccgcctgtaatcctagcactttgggaggccgaggcgggcggatcacacggtcaagagatcaagaccatcctggccaacatggcaaaacccccatctcgactaaaaatacaaaaaattaattgggcgtggtggcgtgcgcctgtaatctcagctacttgggagcctggggcaggagaatcacttgaacctgggaggcggaggttgcagtgagcggagatctgggcactgtactttagcctgggcgacagagagacccatctcaaaaaaaaaaattggaacctgagaagggggtcgtggggtccccggggcccaccgtctgcacttggcatctgaagtcggggtggtcttgtgggactgaccccttaccctgtgggttctgcactagctccgggcaattggtgacagaatcgagttaaattgtaggacatcgcgttggtgtctgagagggagttggagagctggttggtgtggagggaaaggcttacacacatgtgatttcagaagcgttctgtgggtagaggaatcgttttctctttgagactgttatgagtatgtacaaatgttatttcctgtaaaatattttcattttttaaaatgttattttctagatagaaaagtagaagtgtctctttggggagcgtttttgggggcgtatagtaaagctctgtcatcatgaattaagcgaggtgggctttgagtttcttgggatgacagggaaatgtgagccgcctactggccgtgagcccctggggtgcggttgcaggattcgcccatcctggtctgggtgtggcttgtgaccacctcctgcagttctctgcccaggtaaggactaattgggaagaattctgggtcctgagctggctgccgcttccaagacagtcgctttgagggctcttggcaccgattttgttaaaatgcatgagcttagggttgtgc

SEQ ID NO: 428363 - DNA, 862 bp, Homo sapiens
ttacattaaatttttttatgtagttgaatttgtcagacatctgatgtcaggcttagaaaaatcattcctcattccaaaactttaccattcaaataagttgttcttttcttctggtttaacatttttatattcaaatccttataactaccaagaaaattttaaaacccatgggaatttctctagacatttgaagactgctggagggcgcgggcttcctcagcatggagctaggaagctgtggccacgcccacctgtgctctgcgtcagccctgggtggagggggacccgcagagcctggaccagagttcctgggcatcccacagaacagaacacccgcttctgggagtgtctgttgagccaggaccttgattgctagtgacaggagtgggcccagctgggtgatgcagctcccacagggcctgttctgacagtttcctctgaaggcattctgacctcactgcccctggcccctgtacctagccctggctgtgatttattttccttttcttttacctaagcagaaattgttccaactgctggtgttctgcaagatggagccaggaggagagcccacaggtgctaaagagagcagtaccctgatggagtcccttgcaggtgaggggacatgtccacagtcgggcccagagttccagggcaggaattgaacaggaatacaggaaaaacaccatgtctcagtcactgacgcagagcatatactgtgtccttgggcgcagggtgagggagggaggtaaacgcaggcccatcagatctcctgggcatctgtttggtgactgtctttgccagtgaactgagagcttttggttagaaagtctggcagccccaggctctgcctctgggaagg

SEQ ID NO: 428364 - DNA, 705 bp, Homo sapiens
cggggcggggaccgtagcgggtgcagtccagctgctctggacgctgaggccccggcttctcttgctggggtgtcgattcgggagggctgagggcgcggccgagagaacggggcggtcaccgccgccgtggcccgcgcgtcccgcgctctccttgcagtgcaggccccagccgctctcgggcgcggcgtgggggaggcggccctgcaggtgcgtacccggggtccgacacgtgcggggcttcctgcgagctgagtccccgctgcgcgtcttcaggcctttgtaagttgtcaaatttcccaccggcccagctcatcgagcttcttcccagctgtgaacaggagggcctgttccctaattcttgccgaaattgttccaactgctggtgttctgcaagatggagccaggaggagagcccacaggtgctaaagagagcagtaccctgatggagtcccttgcaggtgaggggacatgtccacagtcgggcccagagttccagggcaggaattgaacaggaatacaggaaaaacaccatgtctcagtcactgacgcagagcatatactgtgtccttgggcgcagggtgagggagggaggtaaacgcaggcccatcagatctcctgggcatctgtttggtgactgtctttgccagtgaactgagagcttttggttagaaagtctggcagccccaggctctgcctctgggaagg

SEQ ID NO: 428365 - DNA, 3791 bp, Homo sapiens
ggccgtcgcggactcgggagatggaggaaaaggagatattacggcggcagatccgcctactgcagggtctgattgatgactacaaaaccctccacggcaatgccccggcccctggtaccccagcagcttctgggtggcagccacccacttaccacagtggcagagcctttagtgcccgctaccctcgtccaagccggaggggctactcttcccaccatgggccttcgtggcgcaagaaatactccctcgtgaatcggcccccgggaccctcagaccctcctgccgaccatgctgtgcggccgttgcacggggcccgggggggccagcctcctgtcccgcagcagcatgtccttgagagacaggtccagctcagtcagggtcagaacgtggtcatcaaagttaaaccgccatcaaagtctggctctgccagtgcctcaggggcccagcggggctctttggaagaatttgaggacaccccctggagtgaccaaaggccccgggaaggtgaaggtgagccccctcggggacagctgcagccctcgaggccaacaagagccagggggacctgcagtgtggaagatcctcttctggtctgccagaaggagcctggtaagcccaggatggtgaagtcagtgggcagtgtgggcgacagcccccgggagccccgccggacagtcagtgagagtgtgattgccgtcaaggcgagcttcccatcctccgctctgcccccacgcactggcgtggccctgggccggaagctgggttctcattccgtggccagctgtgctccacagctccttggggacaggagagtagatgctggccacacagatcagccagttccgtctggctcagtggggggccccgccagaccggcctcaggacccaggcaggcccgggaggcctcgctggttgtgacctgtcgaactaacaagttccggaaaaacaactacaaatgggtggctgcctcctcgaagagtccccgggttgctcggagggccctcagtcccagagtggctgcagagaatgtgtgcaaggcctctgctggcatggcaaacaaggtggagaagccgcagctcatagctgacccagagcccaagcccaggaagccagccacgtcctccaagccagggtctgcccccagcaagtacaagtggaaggcctccagcccctctgcctcctcctcttcctccttccgttggcagtcggaggccagcagcaaggaccatgcctcccagctctccccagtcctgtctaggtccccgtcgggggacagaccagcagtaggacacagtggcttgaagcccctctctggggagaccccgctctcggcttacaaagtgaagagccgcaccaagatcatccggagacgcggcagcacaagccttcctggagacaagaaaagcggcacctcacctgccgccaccgccaagagccacctcagcctccggcggagacaggccctcagggggaagagcagccctgtcctgaagaagacccccaacaagggcctggtacaggtcaccacgcaccgactatgtcgcctgccaccgagccgggcccacctccccaccaaggaagcgtccagcctgcatgccgtgcggactgcacccaccagcaaggtgatcaagacccgctaccgcattgtcaagaagacgccggcctcgcctctcagcgccccgcccttccccctgtctctgccctcctggcgggcccggcggctctcactatccaggtccctggtgctgaaccgcctgcgtccagttgccagcgggggtgggaaagcccaaccgggctccccttggtggcggagcaaaggctaccgctgcatcggaggggtcctctacaaagtatctgccaacaagctctccaagacctccggccagcccagtgatgcgggcagcaggcccctcctgcgcacaggccggctggatcctgcaggcagctgtagccgttccctggccagccgggcagtgcagcgcagcctggccatcatccggcaggcgcggcagcgcagggagaagaggaaggagtactgcatgtactacaaccgcttcggcaggtgcaaccgtggcgagcgctgcccctacatccacgatcccgagaaggtggccgtgtgcaccaggtttgtccggggcacctgcaagaaaacggatgggacctgccccttctcccaccatgtgtccaaggagaagatgccggtgtgctcctacttcctgaagggcatctgcagcaacagcaactgtccctatagccacgtgtacgtgtcccgcaaggccgaggtctgcagcgacttcctcaaaggctactgccccctgggtgcaaagtgcaagaagaaacacacgctgctgtgccccgactttgcccgcaggggggcgtgtccccgcggcgcccagtgccagctgctccaccgtacccagaaacgccacagtcggcgggcagccacgtcccccgccccagggcccagcgacgcaaccgccaggagcagggtctcggccagccacgggcccaggaagccttcagcatcccagcgccccaccaggcagacgcccagctcggctgccctcactgcggctgccgtggctgcacctccccactgcccaggggggtcagcctctccctcatcctcgaaggcttcctcctcctcctcctcctcctcatcccctcccgcttccttggaccacgaggcaccatctctccaggaggctgccttagcagcagcgtgctccaacaggctctgcaagctgccttccttcatctccctgcagtcctcgccgagcccaggagcccagcccagggtccgggcccctagggcccccctcaccaaggactcagggaagcctctgcacatcaaaccacgtctgtgaggaccccagggaccggcctgcacctacctcagaccctcatccttggagaggaaagaggctctgtccaccactctaccccacaggagggccgcccgccaccaagcctcacctgggggccacagggacactgctctgcctgcctggccctcaaccttccatgaccagcgtgtgcgcagggcctggtcttcctcccccaagccaggcccctgtccccaccccaccaccttccagggtgccaggcagggctggcctccaggcctgtccccgactgccattggcaacagtggccctgcagcccccagccctccccacccaggttttcggcccagtgaagaggccactggccaggcctcccaggcaggtgttttatgttcagcaataaaggttctatccgtaaaaaaaaaaaaaaaaaaaaaagggcggccgctcgccgagttttatacagttgtatcacatcgaaaagtgtctttactgttttctgtgtggccatcatgtttaagttgaggaaaactcagttcttaaattatctgggaagggtctggattctctatttttgagattgactttatcacaatatgattcttacatctttataccatttacaattgtgttttagatctacagagttagaaattcgaaaactattccaggactaattcttaatcggcattatttatacaagaggtcaagtaacatttactagcgcaatactgcacttgtaaatgaattataaacgctcttctggaatatatttaaataaccattaaagaactgcttattcattctggacactgcatgttgatgttgaatcaactgatgccagcagaaagctattttgatttgtgaacatactgccttatttaaagggtcctgattgcttgtattttaagacattcattaaaaagaaaccaggaaacacttttg

SEQ ID NO: 428366 - DNA, 2960 bp, Homo sapiens
ttccaccaccggcaccaccacccgcacgcgtcaatatacgtctaggtagccgagcgctgggttcccgggaggcctcgctggttgtgacctgtcgaactaacaagttccggaaaaacaactacaaatgggtggctgcctcctcgaagagtccccgggttgctcggagggccctcagtcccagagtggctgcagagaatgtgtgcaaggcctctgctggcatggcaaacaaggtggagaagccgcagctcatagctgacccagagcccaagcccaggaagccagccacgtcctccaagccagggtctgcccccagcaagtacaagtggaaggcctccagcccctctgcctcctcctcttcctccttccgttggcagtcggaggccagcagcaaggaccatgcctcccagctctccccagtcctgtctaggtccccgtcgggggacagaccagcagtaggacacagtggcttgaagcccctctctggggagaccccgctctcggcttacaaagtgaagagccgcaccaagatcatccggagacgcggcagcacaagccttcctggagacaagaaaagcggcacctcacctgccgccaccgccaagagccacctcagcctccggcggagacaggccctcagggggaagagcagccctgtcctgaagaagacccccaacaagggcctggtacaggtcaccacgcaccgactatgtcgcctgccaccgagccgggcccacctccccaccaaggaagcgtccagcctgcatgccgtgcggactgcacccaccagcaaggtgatcaagacccgctaccgcattgtcaagaagacgccggcctcgcctctcagcgccccgcccttccccctgtctctgccctcctggcgggcccggcggctctcactatccaggtccctggtgctgaaccgcctgcgtccagttgccagcgggggtgggaaagcccaaccgggctccccttggtggcggagcaaaggctaccgctgcatcggaggggtcctctacaaagtatctgccaacaagctctccaagacctccggccagcccagtgatgcgggcagcaggcccctcctgcgcacaggccggctggatcctgcaggcagctgtagccgttccctggccagccgggcagtgcagcgcagcctggccatcatccggcaggcgcggcagcgcagggagaagaggaaggagtactgcatgtactacaaccgcttcggcaggtgcaaccgtggcgagcgctgcccctacatccacgatcccgagaaggtggccgtgtgcaccaggtttgtccggggcacctgcaagaaaacggatgggacctgccccttctcccaccatgtgtccaaggagaagatgccggtgtgctcctacttcctgaagggcatctgcagcaacagcaactgtccctatagccacgtgtacgtgtcccgcaaggccgaggtctgcagcgacttcctcaaaggctactgccccctgggtgcaaagtgcaagaagaaacacacgctgctgtgccccgactttgcccgcaggggggcgtgtccccgcggcgcccagtgccagctgctccaccgtacccagaaacgccacagtcggcgggcagccacgtcccccgccccagggcccagcgacgcaaccgccaggagcagggtctcggccagccacgggcccaggaagccttcagcatcccagcgccccaccaggcagacgcccagctcggctgccctcactgcggctgccgtggctgcacctccccactgcccaggggggtcagcctctccctcatcctcgaaggcttcctcctcctcctcctcctcctcatcccctcccgcttccttggaccacgaggcaccatctctccaggaggctgccttagcagcagcgtgctccaacaggctctgcaagctgccttccttcatctccctgcagtcctcgccgagcccaggagcccagcccagggtccgggcccctagggcccccctcaccaaggactcagggaagcctctgcacatcaaaccacgtctgtgaggaccccagggaccggcctgcacctacctcagaccctcatccttggagaggaaagaggctctgtccaccactctaccccacaggagggccgcccgccaccaagcctcacctgggggccacagggacactgctctgcctgcctggccctcaaccttccatgaccagcgtgtgcgcagggcctggtcttcctcccccaagccaggcccctgtccccaccccaccaccttccagggtgccaggcagggctggcctccaggcctgtccccgactgccattggcaacagtggccctgcagcccccagccctccccacccaggttttcggcccagtgaagaggccactggccaggcctcccaggcaggtgttttatgttcagcaataaaggttctatccgtaaaaaaaaaaaaaaaaaaaaaagggcggccgctcgccgagttttatacagttgtatcacatcgaaaagtgtctttactgttttctgtgtggccatcatgtttaagttgaggaaaactcagttcttaaattatctgggaagggtctggattctctatttttgagattgactttatcacaatatgattcttacatctttataccatttacaattgtgttttagatctacagagttagaaattcgaaaactattccaggactaattcttaatcggcattatttatacaagaggtcaagtaacatttactagcgcaatactgcacttgtaaatgaattataaacgctcttctggaatatatttaaataaccattaaagaactgcttattcattctggacactgcatgttgatgttgaatcaactgatgccagcagaaagctattttgatttgtgaacatactgccttatttaaagggtcctgattgcttgtattttaagacattcattaaaaagaaaccaggaaacacttttg

SEQ ID NO: 428367 - DNA, 3009 bp, Homo sapiens
ggccgtcgcggactcgggagatggaggaaaaggagatattacggcggcagatccgcctactgcagggtctgattgatgactacaaaaccctccacggcaatgccccggcccctggtaccccagcagcttctgggtggcagccacccacttaccacagtggcagagcctttagtgcccgctaccctcgtccaagccggaggggctactcttcccaccatgggccttcgtggcgcaagaaatactccctcgtgaatcggcccccgggaccctcagaccctcctgccgaccatgctgtgcggccgttgcacggggcccgggggggccagcctcctgtcccgcagcagcatgtccttgagagacaggtccagctcagtcagggtcagaacgtggtcatcaaagttaaaccgccatcaaagtctggctctgccagtgcctcaggggcccagcggggctctttggaagaatttgaggacaccccctggagtgaccaaaggccccgggaaggtgaaggtgagccccctcggggacagctgcagccctcgaggccaacaagagccagggggacctgcagtgtggaagatcctcttctggtctgccagaaggagcctggtaagcccaggatggtgaagtcagtgggcagtgtgggcgacagcccccgggagccccgccggacagtcagtgagagtgtgattgccgtcaaggcgagcttcccatcctccgctctgcccccacgcactggcgtggccctgggccggaagctgggttctcattccgtggccagctgtgctccacagctccttggggacaggagagtagatgctggccacacagatcagccagttccgtctggctcagtggggggccccgccagaccggcctcaggacccaggcaggcccgggaggcctcgctggttgtgacctgtcgaactaacaagttccggaaaaacaactacaaatgggtggctgcctcctcgaagagtccccgggttgctcggagggccctcagtcccagagtggctgcagagaatgtgtgcaaggcctctgctggcatggcaaacaaggtggagaagccgcagctcatagctgacccagagcccaagcccaggaagccagccacgtcctccaagccagggtctgcccccagcaagtacaagtggaaggcctccagcccctctgcctcctcctcttcctccttccgttggcagtcggaggccagcagcaaggaccatgcctcccagctctccccagtcctgtctaggtccccgtcgggggacagaccagcagtaggacacagtggcttgaagcccctctctggggagaccccgctctcggcttacaaagtgaagagccgcaccaagatcatccggagacgcggcagcacaagccttcctggagacaagaaaagcggcacctcacctgccgccaccgccaagagccacctcagcctccggcggagacaggccctcagggggaagagcagccctgtcctgaagaagacccccaacaagggcctggtacaggtcaccacgcaccgactatgtcgcctgccaccgagccgggcccacctccccaccaaggaagcgtccagcctgcatgccgtgcggactgcacccaccagcaaggtgatcaagacccgctaccgcattgtcaagaagacgccggcctcgcctctcagcgccccgcccttccccctgtctctgccctcctggcgggcccggcggctctcactatccaggtccctggtgctgaaccgcctgcgtccagttgccagcgggggtgggaaagcccaaccgggctccccttggtggcggagcaaaggctaccgctgcatcggaggggtcctctacaaagtatctgccaacaagctctccaagacctccggccagcccagtgatgcgggcagcaggcccctcctgcgcacaggccggctggatcctgcaggcagctgtagccgttccctggccagccgggcagtgcagcgcagcctggccatcatccggcaggcgcggcagcgcagggagaagaggaaggagtactgcatgtactacaaccgcttcggcaggtgcaaccgtggcgagcgctgcccctacatccacgatcccgagaaggtggccgtgtgcaccaggtttgtccggggcacctgcaagaaaacggatgggacctgccccttctcccaccatgtgtccaaggagaagatgccggtgtgctcctacttcctgaagggcatctgcagcaacagcaactgtccctatagccacgtgtacgtgtcccgcaaggccgaggtctgcagcgacttcctcaaaggctactgccccctgggtgcaaagtgcaagaagaaacacacgctgctgtgccccgactttgcccgcaggggggcgtgtccccgcggcgcccagtgccagctgctccaccgtacccagaaacgccacagtcggcgggcagccacgtcccccgccccagggcccagcgacgcaaccgccaggagcagggtctcggccagccacgggcccaggaagccttcagcatcccagcgccccaccaggcagacgcccagctcggctgccctcactgcggctgccgtggctgcacctccccactgcccaggggggtcagcctctccctcatcctcgaaggcttcctcctcctcctcctcctcctcatcccctcccacggctcccaataaaaatgtgaaaacaaaaaaaaaaaaaaaaaaaaaaaaaaaaaaaaaaaaaaacctcgacggagggcaaaaacagaggaggcgcgcgcagaaaacaacgacggcaacacacacaacgcaggcgcgaggccacatcacggtggttcacgacgcacccacttctgtggacacagggggggaaaccaatgcggggccccccaaaaggagagcgacaaactacttcgcgacaaccacggtaccctcggcttaatgcactgcgacacaacagtacacagcacacgcgacccaataaccagacacatacacacagccacacgacagcaccaaag

SEQ ID NO: 428368 - DNA, 2191 bp, Homo sapiens
ggccgtcgcggactcgggagatggaggaaaaggagatattacggcggcagatccgcctactgcagggtctgattgatgactacaaaaccctccacggcaatgccccggcccctggtaccccagcagcttctgggtggcagccacccacttaccacagtggcagagcctttagtgcccgctaccctcgtccaagccggaggggctactcttcccaccatgggccttcgtggcgcaagaaatactccctcgtgaatcggcccccgggaccctcagaccctcctgccgaccatgctgtgcggccgttgcacggggcccgggggggccagcctcctgtcccgcagcagcatgtccttgagagacaggtccagctcagtcagggtcagaacgtggtcatcaaagttaaaccgccatcaaagtctggctctgccagtgcctcaggggcccagcggggctctttggaagaatttgaggacaccccctggagtgaccaaaggccccgggaaggtgaaggtgagccccctcggggacagctgcagccctcgaggccaacaagagccagggggacctgcagtgtggaagatcctcttctggtctgccagaaggagcctggtaagcccaggatggtgaagtcagtgggcagtgtgggcgacagcccccgggagccccgccggacagtcagtgagagtgtgattgccgtcaaggcgagcttcccatcctccgctctgcccccacgcactggcgtggccctgggccggaagctgggttctcattccgtggccagctgtgctccacagctccttggggacaggagagtagatgctggccacacagatcagccagttccgtctggctcagtggggggccccgccagaccggcctcaggacccaggcaggcccgggaggcctcgctggttgtgacctgtcgaactaacaagttccggaaaaacaactacaaatgggtggctgcctcctcgaagagtccccgggttgctcggagggccctcagtcccagagtggctgcagagaatgtgtgcaaggcctctgctggcatggcaaacaaggtggagaagccgcagctcatagctgacccagagcccaagcccaggaagccagccacgtcctccaagccagggtctgcccccagcaagtacaagtggaaggcctccagcccctctgcctcctcctcttcctccttccgttggcagtcggaggccagcagcaaggaccatgcctcccagctctccccagtcctgtctaggtccccgtcgggggacagaccagcagtaggacacagtggcttgaagcccctctctggggagaccccgctctcggcttacaaagtgaagagccgcaccaagatcatccggagacgcggcagcacaagccttcctggagacaagaaaagcggcacctcacctgccgccaccgccaagagccacctcagcctccggcggagacaggccctcagggggaagagcagccctgtcctgaagaagacccccaacaagggcctggtacaggtcaccacgcaccgactatgtcgcctgccaccgagccgggcccacctccccaccaaggaagcgtccagcctgcatgccgtgcggactgcacccaccagcaaggtgatcaagacccgctaccgcattgtcaagaagacgccggcctcgcctctcagcgccccgcccttccccctgtctctgccctcctggcgggcccggcggctctcactatccagataccactgtccttgcaagggccgcatgaagtttgctgaggtcaccacgcctttccagggagctgagccggatttgctgtgtggtcttcggaggggctgtcccagggcctgggagtggggggatgtctgctgtgagtctctttagacagcagtgacctgaggggtccttgagggcctaggcaggattcctggccagcctgcccctcagtagctggcacagacagagtgggtcctgggccgatgacccagcccaaagggtggcacaggtgcagagggtcgcgggcccgccaaggacagctgcacctggccgcctggcacctctgccggacgagctgaactcggcactccggggccatgaagtcccactaatacttgtttttttgcagctgacatacaaaacaccaatagcttcagctgaaatggatttttaaaagtgtcattttatggagaaaatta

SEQ ID NO: 428369 - DNA, 3197 bp, Homo sapiens
ttacattaaatttttttatgtagttgaatttgtcagacatctgatgtcaggcttagaaaaatcattcctcattccaaaactttaccattcaaataagttgttcttttcttctggtttaacatttttatattcaaatccttataactaccaagaaaattttaaaacccatgggaatttctctagacatttgaagactgctggagggcgcgggcttcctcagcatggagctaggaagctgtggccacgcccacctgtgctctgcgtcagccctgggtggagggggacccgcagagcctggaccagagttcctgggcatcccacagaacagaacacccgcttctgggagtgtctgttgagccaggaccttgattgctagtgacaggagtgggcccagctgggtgatgcagctcccacagggcctgttctgacagtttcctctgaaggcattctgacctcactgcccctggcccctgtacctagccctggctgtgatttattttccttttcttttacctaagcagaaattgttccaactgctggtgttctgcaagatggagccaggaggagagcccacaggtgctaaagagagcagtaccctgatggagtcccttgcagctgtgaaggctgctttcctggcgcaggccccgagtggcagccggtcagccgaggtgcaggcagctcagagcacggagcctgccgcagaggcaggcgctcccgagggagagggccacagaggggggcctccccgggcgttggggtctcttggcctttgtgaaaaccaggaagccagagagaggcccggaggttcccctcgaggcccggtcacttctgagaaaactggaggacagagtggcctcgagtcagacgtccctccgaacgcaggccccggcgcagagggcgggggcagctggaaggggcggcctttcccgtgcggcgcctgtggccgcagcttcaagtgctcctcggacgcggcaaagcaccggagcatccactcgggggagaaaccgtacgagtgcagcgactgcgggaaggccttcatccacagctcgcacgtggtccggcaccagcgggcgcacagcggggagaggccctacgcgtgcgccgagtgcggcaaggccttcggccagagcttcaacctcctccggcaccagcgcgtgcacacgggcgagaagccctacgcgtgcgccgactgcggcaaggccttcggccagaggtcggacgccgccaagcaccgccgcacccacaccggggagaggctgtacgcgtgcggcgagtgcgggaagcgcttcctgcacagctcgaacgtggtccggcaccggcggacccaccacggggagaacccgtacgagtgccgggagtgcggccaggccttcagccagagctccaacctcctccagcaccagcgcgtgcacacgggggagcggcccttcgcctgccaggactgcggccgcgccttcagccgcagctccttcctccgcgagcactgccgcatccacaccggggagaagccccaccagtgcggccactgcgggcgcgcgttccgggcgctgtcgggcttcttccggcaccagcgactccacacgggcgagaagccgttccgctgcaccgagtgcggccgcgccttccgcctgagcttccacctcatccagcaccggcgggtgcatggcgccgagtgagccggggctgcggcggaagagatgccggcggcctggtgggcgcgaggccgaggccgggggaggctcctgtccgccccgtgcgcggtgaggaagtaacagccggctgcgcgcctggttctcgggttgcgaaagcctcgccaggcctgcatccgccttggcttgggagcaatcaggagagacagggctcggggaaggcgagcgctgcccgcgggaggcgattcccagaggcggggaggtctcaggggtctgtcccgggccggccgcccgcctctgagactccccgcctcccacggtcagctgctgcggggcagtggccggtgattgaatcggtcattcctccgcaaccaggcctccatcaaaaccctgcatgagatgagggcctcgggcttcgggttggtgaaggcggggtgggggggcagttaggaagggggcgcccagacagggcatggaagcctcgcgtcctcccccgtaccttgcgggtcggtggttcatccatgtatttcaacgccttttcacagccggttcatatggtcccgacttctgtgtgcttagaaaattatggaacttggccgggtgcggtggctcccgcctgtaatcctagcactttgggaggccgaggcgggcggatcacacggtcaagagatcaagaccatcctggccaacatggcaaaacccccatctcgactaaaaatacaaaaaattaattgggcgtggtggcgtgcgcctgtaatctcagctacttgggagcctggggcaggagaatcacttgaacctgggaggcggaggttgcagtgagcggagatctgggcactgtactttagcctgggcgacagagagacccatctcaaaaaaaaaaattggaacctgagaagggggtcgtggggtccccggggcccaccgtctgcacttggcatctgaagtcggggtggtcttgtgggactgaccccttaccctgtgggttctgcactagctccgggcaattggtgacagaatcgagttaaattgtaggacatcgcgttggtgtctgagagggagttggagagctggttggtgtggagggaaaggcttacacacatgtgatttcagaagcgttctgtgggtagaggaatcgttttctctttgagactgttatgagtatgtacaaatgttatttcctgtaaaatattttcattttttaaaatgttattttctagatagaaaagtagaagtgtctctttggggagcgtttttgggggcgtatagtaaagctctgtcatcatgaattaagcgaggtgggctttgagtttcttgggatgacagggaaatgtgagccgcctactggccgtgagcccctggggtgcggttgcaggattcgcccatcctggtctgggtgtggcttgtgaccacctcctgcagttctctgcccaggtaaggactaattgggaagaattctgggtcctgagctggctgccgcttccaagacagtcgctttgagggctcttggcaccgattttgttaaaatgcatgagcttagggttgtgc

SEQ ID NO: 428370 - DNA, 1461 bp, Homo sapiens
ggccgtcgcggactcgggagatggaggaaaaggagatattacggcggcagatccgcctactgcagggtctgattgatgactacaaaaccctccacggcaatgccccggcccctggtaccccagcagcttctgggtggcagccacccacttaccacagtggcagagcctttagtgcccgctaccctcgtccaagccggaggggctactcttcccaccatgggccttcgtggcgcaagaaatactccctcgtgaatcggcccccgggaccctcagaccctcctgccgaccatgctgtgcggccgttgcacggggcccgggggggccagcctcctgtcccgcagcagcatgtccttgagagacaggtccagctcagtcagggtcagaacgtggtcatcaaagttaaaccgccatcaaagtctggctctgccagtgcctcaggggcccagcggggctctttggaagaatttgaggacaccccctggagtgaccaaaggccccgggaaggtgaaggtgagccccctcggggacagctgcagccctcgaggccaacaagagccagggggacctgcagtgtggaagatcctcttctggtctgccagaaggagcctggtaagcccaggatggtgaagtcagtgggcagtgtgggcgacagcccccgggagccccgccggacagtcagtgagagtgtgattgccgtcaaggcgagcttcccatcctccgctctgcccccacgcactggcgtggccctgggccggaagctgggttctcattccgtggccagctgtgctccacagctccttggggacaggagagtagatgctggccacacagatcagccagttccgtctggctcagtggggggccccgccagaccggcctcaggacccaggcagggcaggtgttttatgttcagcaataaaggttctatccgtaaaaaaaaaaaaaaaaaaaaaagggcggccgctcgccgagttttatacagttgtatcacatcgaaaagtgtctttactgttttctgtgtggccatcatgtttaagttgaggaaaactcagttcttaaattatctgggaagggtctggattctctatttttgagattgactttatcacaatatgattcttacatctttataccatttacaattgtgttttagatctacagagttagaaattcgaaaactattccaggactaattcttaatcggcattatttatacaagaggtcaagtaacatttactagcgcaatactgcacttgtaaatgaattataaacgctcttctggaatatatttaaataaccattaaagaactgcttattcattctggacactgcatgttgatgttgaatcaactgatgccagcagaaagctattttgatttgtgaacatactgccttatttaaagggtcctgattgcttgtattttaagacattcattaaaaagaaaccaggaaacacttttg

SEQ ID NO: 428371 - DNA, 2326 bp, Homo sapiens
cggggcggggaccgtagcgggtgcagtccagctgctctggacgctgaggccccggcttctcttgctggggtgtcgattcgggagggctgagggcgcggccgagagaacggggcggtcaccgccgccgtggcccgcgcgtcccgcgctctccttgcagtgcaggccccagccgctctcgggcgcggcgtgggggaggcggccctgcaggtgcgtacccggggtccgacacgtgcggggcttcctgcgagctgagtccccgctgcgcgtcttcaggcctttgtaagttgtcaaatttcccaccggcccagctcatcgagcttcttcccagctgtgaacaggagggcctgttccctaattcttgccgaaattgttccaactgctggtgttctgcaagatggagccaggaggagagcccacaggtgctaaagagagcagtaccctgatggagtcccttgcaggccggctggatcctgcaggcagctgtagccgttccctggccagccgggcagtgcagcgcagcctggccatcatccggcaggcgcggcagcgcagggagaagaggaaggagtactgcatgtactacaaccgcttcggcaggtgcaaccgtggcgagcgctgcccctacatccacgatcccgagaaggtggccgtgtgcaccaggtttgtccggggcacctgcaagaaaacggatgggacctgccccttctcccaccatgtgtccaaggagaagatgccggtgtgctcctacttcctgaagggcatctgcagcaacagcaactgtccctatagccacgtgtacgtgtcccgcaaggccgaggtctgcagcgacttcctcaaaggctactgccccctgggtgcaaagtgcaagaagaaacacacgctgctgtgccccgactttgcccgcaggggggcgtgtccccgcggcgcccagtgccagctgctccaccgtacccagaaacgccacagtcggcgggcagccacgtcccccgccccagggcccagcgacgcaaccgccaggagcagggtctcggccagccacgggcccaggaagccttcagcatcccagcgccccaccaggcagacgcccagctcggctgccctcactgcggctgccgtggctgcacctccccactgcccaggggggtcagcctctccctcatcctcgaaggcttcctcctcctcctcctcctcctcatcccctcccgcttccttggaccacgaggcaccatctctccaggaggctgccttagcagcagcgtgctccaacaggctctgcaagctgccttccttcatctccctgcagtcctcgccgagcccaggagcccagcccagggtccgggcccctagggcccccctcaccaaggactcagggaagcctctgcacatcaaaccacgtctgtgaggaccccagggaccggcctgcacctacctcagaccctcatccttggagaggaaagaggctctgtccaccactctaccccacaggagggccgcccgccaccaagcctcacctgggggccacagggacactgctctgcctgcctggccctcaaccttccatgaccagcgtgtgcgcagggcctggtcttcctcccccaagccaggcccctgtccccaccccaccaccttccagggtgccaggcagggctggcctccaggcctgtccccgactgccattggcaacagtggccctgcagcccccagccctccccacccaggttttcggcccagtgaagaggccactggccaggcctcccaggcaggtgttttatgttcagcaataaaggttctatccgtaaaaaaaaaaaaaaaaaaaaaagggcggccgctcgccgagttttatacagttgtatcacatcgaaaagtgtctttactgttttctgtgtggccatcatgtttaagttgaggaaaactcagttcttaaattatctgggaagggtctggattctctatttttgagattgactttatcacaatatgattcttacatctttataccatttacaattgtgttttagatctacagagttagaaattcgaaaactattccaggactaattcttaatcggcattatttatacaagaggtcaagtaacatttactagcgcaatactgcacttgtaaatgaattataaacgctcttctggaatatatttaaataaccattaaagaactgcttattcattctggacactgcatgttgatgttgaatcaactgatgccagcagaaagctattttgatttgtgaacatactgccttatttaaagggtcctgattgcttgtattttaagacattcattaaaaagaaaccaggaaacacttttg

SEQ ID NO: 428372 - DNA, 2304 bp, Homo sapiens
atctggtagcaagagcagtctcttcgacactgaatctgccagcacctgatcttgggccagccttcagaactctacattattgagcagggggtgtgtgatttggttttatgtgaagctgccttccctaagacgttggcttttgcctacctagaagatttgcactcagaatttgatgaacagcatggaaagaaggtgcccactgtgtcccgaccctattcctttattgaatttgatactttcattcagaaaaccaagaagctctacattgacagttgtgctcgaagaaacctaggctccatcaacactgaattgcaagatgtgcagaggatcatggtggccaatatcgaagaagtgttacaacgaggagaagcactctcagcattggattcaaaggctaacaatttgtccagtctgtccaagaaataccgccaggatgcgaagtacttgaacatgcattccacttatgccaaacttgcagcagtagctgtatttttcatcatgttaatagtgtatgtccgattctggtggctgtgaaataatgaatacagtcactggtaagggagaacctagaacccagtaggtgtatattttcaggaaactgagctcacagagatgtgtattagaatccaagtggaacttctgcctctaaagaccttgcaagaaaagagatgccctgaaaatgaaaggttgcacctcatttaatgaagcttaaccctatgtagaaagtctctttcgggggcagaggctttctctgggtgccaagccatatatattagggaatagtagattgttaatttcgttttttccctcccagtgcattttaaaaacagcactggctggggcattctcattctctgatggagccatcaatgagatttaacttagtcaacctgtgctagcaacattctgaaattccttcaaagaaggcagtcctttgggaaggtgttttttttttttttttgactctaatcaacattccttttgttggtgacatttgtgattttcagtaatctgagtttttgatggccttttaaacaagactccagtatgtgaaagttaattgctgtgctccacagatcttgtctattggcccctgtagaaagttaacctttgttgttttccttttataatttgcttattgcacaattgctttagggtaagtgaattatattaagatgccttgaaattatagcactccttgattaagaagctaaaatgtttctctcatttactccttaaacaaaagacttaaattagtttgggtcattattacttttattttgcagcatttggtttgttattagcgtaagagcaagtataggatatggagaggcccctggcttcatgagaacaaaggcaggcccaggttataattacagctttctcctgccccttctttactttctctaccacagttttctccactgtttgttttcctcttgccacaatttgctaacatttaaaaaattttcctgcacccagtagtttcatatcctgtagacatcctcttaggacattctcaaatttcaaaataaaaaatattcatctatgtagttaattaaagttaaagtttttgcagatcaactactcaaactactaaatacatttacctgagaaaaagtctctgagagcacttcattcctgttttagttcgtgtaaattctctgagaatgttctggagatagataactcatttacagtggtttctattaactaattaaagtacccatgattttttccttttctgctcagggatgatggagatttccttttaccttctgaggtagaattttttaatggggaaaataggccttttaaatattattgccagggtctgcaatataacttaaaattcctgtacatactgcaaatatttctttaaattgcacaggaaaatgagcgaactttttatttcttaatatctttggcaaaaaactttaaccagtaagcaattttataaccctgagggatcatcaaagatactatcctgattcctggtaaggaaaaatatattatttccttataacaaggcaaggagaaatgctattttattcctgataatttatataactagaataatttttttcctttcttttatggacctaaatctgcaattgggaatttgtgcatgaaatatgaagttactttttatagataatccagtgcttttaagtccctaaaaggtcctgtgaagtaatgatgatgttataattaaaagctttgaagggtgaaactacatatggtacctagtattgggctctaaggagggaaggggcagctcattgttgagagttgcatgctgca

SEQ ID NO: 428373 - DNA, 2259 bp, Homo sapiens
atctggtagcaagagcagtctcttcgacactgaatctgccagcacctgatcttgggccagccttcagaactctacattattgagcagggggtgtgtgatttggttttatgtgaagctgccttccctaagacgttggcttttgcctacctagaagatttgcactcagaatttgatgaacagcatggaaagaaggtgcccactgtgtcccgaccctattcctttattgaatttgatactttcattcagaaaaccaagaagctctacattgacagttgtgctcgaagaaacctaggctccatcaacactgaattgcaagatgtgcagaggatcatggtggccaatatcgaagaagtgttacaacgaggagaagcactctcagcattggattcaaaggctaacaatttgtccagtctgtccaagaaataccgccaggatgcgaagtacttgaacatgcattccacttatgccaaacttgcagcagtagctgtatttttcatcatgttaatagtgtatgtccgattctggtggctgtgaaataatgaatacagtcactggtaagggagaacctagaacccagtaggtgtatattttcaggaaactgagctcacagagatgtgtattagaatccaagtggaacttctgcctctaaagaccttgcaagaaaagagatgccctgaaaatgaaaggttgcacctcatttaatgaagcttaaccctatgtagaaagtctctttcgggggcagaggctttctctgggtgccaagccatatatattagggaatagtagattgttaatttcgttttttccctcccagtgcattttaaaaacagcactggctggggcattctcattctctgatggagccatcaatgagatttaacttagtcaacctgtgctagcaacattctgaaattccttcaaagaaggcagtcctttgggaaggtgttttttttttttttttgactctaatcaacattccttttgttggtgacatttgtgattttcagtaatctgagtttttgatggccttttaaacaagactccagtatgtgaaagttaattgctgtgctccacagatcttgtctattggcccctgtagaaagttaacctttgttgttttccttttataatttgcttattgcacaattgctttagggtaagtgaattatattaagatgccttgaaattatagcactccttgattaagaagctaaaatgtttctctcatttactccttaaacaaaagacttaaattagtttgggtcattattacttttattttgcagcatttggtttgttattagcgtaagagcaagtataggatatggagaggcccctggcttcatgagaacaaaggcaggcccaggttataattacagctttctcctgccccttctttactttctctaccacagttttctccactgtttgttttcctcttgccacaatttgctaacatttaaaaaattttcctgcacccagtagtttcatatcctgtagacatcctcttaggacattctcaaatttcaaaataaaaaatattcatctatgtagttaattaaagttaaagtttttgcagatcaactactcaaactactaaatacatttacctgagaaaaagtctctgagagcacttcattcctgttttagttcgtgtaaattctctgagaatgttctggagatagataactcatttacagtggtttctattaactaattaaagtacccatgattttttccttttctgctcagggatgatggagatttccttttaccttctgaggtagaattttttaatggggaaaataggccttttaaatattattgccagggtctgcaatataacttaaaattcctgtacatactgcaaatatttctttaaattgcacaggaaaatgagcgaactttttatttcttaatatctttggcaaaaaactttaaccagtaagcaattttataaccctgagggatcatcaaagatactatcctgattcctggtaaggaaaaatatattatttccttataacaaggcaaggagaaatgctattttattcctgataatttatataactagaataatttttttcctttcttttatggacctaaatctgcaattgggaatttgtgcatgaaatatgaagttactttttatagataatccagtgcttttaagtccctaaaaggtcctgtgaagtaatgatgatgttataatttctaaggagggaaggggcagctcattgttgagagttgcatgctgca

SEQ ID NO: 428374 - DNA, 153 bp, Homo sapiens
ctggccaactcagaacttttaatttcctacctcagtactttgatggccatgaaagaaatggtcagttttcttcatcattctagatactttcattcagaaaaccaagaagctctacattgacagttgtgctcgaagaaacctaggctccatcaa

SEQ ID NO: 428375 - DNA, 783 bp, Homo sapiens
aaggctaacaatttgtccagtctgtccaagaaataccgccaggatgcgaagtacttgaacatgcattccacttatgccaaacttgcagcagtagctgtatttttcatcatgttaatagtgtatgtccgattctggtggctgtgaaataatgaatacagtcactggtaagggagaacctagaacccagtaggtgtatattttcaggaaactgagctcacagagatgtgtattagaatccaagtggaacttctgcctctaaagaccttgcaagaaaagagatgccctgaaaatgaaaggttgcacctcatttaatgaagcttaaccctatgtagaaagtctctttcgggggcagaggctttctctgggtgccaagccatatatattagggaatagtagattgttaatttcgttttttccctcccagtgcattttaaaaacagcactggctggggcattctcattctctgatggagccatcaatgagatttaacttagtcaacctgtgctagcaacattctgaaattccttcaaagaaggcagtcctttgggaaggtgtttttttttttgtttttttgtttttttgttttttttgactctaatcaacattccttttgttggtgacatttgtgattttcagtaatctgagtttttgatggccttttaaacaagactccagtatgtgaaagttaattgctgtgctccacagatcttgtctattggcccctgtagaaagttaacctttgttgttttccttttataatttgcttattgcacaattgcttt

SEQ ID NO: 428376 - DNA, 1984 bp, Homo sapiens
gtaattcgagcgtgggactgtgcaattctcggattgggaaagggaggagtggaaataaccccggcagtgccaggcttgctggtggtcaggaacagatgattccagccctgtgctgatcgcctgccttcctcctgccattcagaatgctgctgtctcgtgtacttactgttaaggatcctggaaaagggagtggttcctcctagctgcaaacaagggcgctacttttcttttctctttaatagaattacgttttataggtgtgtctaggcaacacaagggaatgtgaaagactttcagagggaatgtttgtgaatacatctggtgtgtactaaaaagctggaaaacccctaagtaaatgcaatatcgatagaaagcgagtttcttgaagagtcatctgctaaactccactagagtcatctctacaataacaatatcaactgaatataaaatattaatgccatggatgatctcagaaatgatttcctacaaagtcccaacctatcctggaacatttcttatgtgtgcttgggagattgcaagaggacaactcggctctaaaatcgatgcattaacatgtcattggaattgaccttgccaaaagatgcctccctaaatccacaagaatctccttgtttgaacacagtttctaatccagctgtaatgaagacagacaacagtcaaattaacaactgatcaggaggagaagttcatactccttgagctggatctatctgcacatgcacctggcccaggaagctgaaatgggagatctgatgagcagtggaggactgaaccaaagcccttggcttttgctccataccagtcagagtctcatcaggatatcatgttgcattgagtagtcatgtctccacaggcttttcttggctgcgactcttactcacgttttccttggttttgcccaccttacagtttacagtagtggtcaggtattttgtagtatgtccctcacttgggctttgcttgatgcttatctcctgagaaaactagggatatgtattttggggaggaaggccacagagatgaagtgacattcttttcacatcatatcaatgctacatactatcaaaagggcttatcactgttgatgttaattttaatcacctggctaagatattctttttcaggattttgactttaaagttaccctttatgcttttccttctcataaagtgctctttgaaatgaagtcactctgtgcagcagacatttaaaaagcaggaaattatggtgacagagtatctgtataaattatttgcagttcttttattttcagagtttggaattatagcactcctataaatcttattactaatggtgccacaaattgtgtactactgatatgtattagtgcacaacttaaagcatgtggacatgagctgtatttgaaaaaacattcagatggaagagctacctgatttgaagtgaatcttaattggaacttaatgatgcctcctagtaatttactattttagctgaacctacagtatcagctgtagcccagaaaatataagagctacaattcgtacaattcaacatcagctgccaaggcccacctggactgcacctgcaaaaccagctgtggtttctttgctctcacaattcatgtcagtgtttttcagccaatgcatcactggtttcgaattttatactgtccctctctcagtcctccacccctctagtttctaaatgatagagaataattaggtgaggtttaaactctcaggattattcagggtttgtggagagtaggaaggtttcttccaggttacagcacaatttaaggagcctggcaagaagcatccaatattagcaagtagaaaagcagcataagtatgaggttggaacttcccacgatacttagtacatggaaaaaaatgtagaacataccaaaaaaaaagcaaattgtaaaaaaatttcacaaataaaaatactgttatgaaaattaaattataaaaaaaaaata

SEQ ID NO: 428377 - DNA, 1095 bp, Homo sapiens
gtaattcgagcgtgggactgtgcaattctcggattgggaaagggaggagtggaaataaccccggcagtgccaggcttgctggtggtcaggaacagatgattccagccctgtgctgatcgcctgccttcctcctgccattcagaatgctgctgtctcgtgtacttactgttaaggatcctggaaaagggagtggttcctcctagctgcaaacaagggcgctacttttcttttctctttaatagaattacgttttataggtgtgtctaggcaacacaagggaatgtgaaagactttcagagggaatgtttgtgaatacatctggtgtgtactaaaaagctggaaaacccctaagtaaatgcaatatcgatagaaagcgagtttcttgaagagtcatctgctaaactccactagagtcatctctacacccataggtcaaataaaagattaataatttagacatatcagctgtaaattcataagaaccatatggatgtccaagtggaggtggaggaggtgattaagatggaaaaaggcaaccatgaatgaagacacacagatcctcaacctttaaaacaggtgtggttaagagaaaaaaaaattgccattaaggaatcagcaaataggatgtctgaagtgaggatatagcacctatctctgagattaaagtcatctgatcaaaaatgatgcctctgagactataacaaaggaatgaataatgaaatataagaatggggattctgcactaactctatggggaagaaaacaatgcagagacgaagcttcaccgtgttagccaggatggtctcgatctcctgacctcatgatctgcctgcctcggcctcccaaagtgctgggattacaggtgtgagccactgagcctggccccagttttaattgttaatacagtaatatcaatagatacaacctgcataaactaaagctctttggggccttccatgacattaagaacgtaagcggtctcaagatagagaagtttcaggactaccactgtacatttttgtaacatttattttatttcttgtattgctaatttatctttatatagttgctattttataagatgtaaactccttg

SEQ ID NO: 428378 - DNA, 840 bp, Homo sapiens
gtaattcgagcgtgggactgtgcaattctcggattgggaaagggaggagtggaaataaccccggcagtgccaggcttgctggtggtcaggaacagatgattccagccctgtgctgatcgcctgccttcctcctgccattcagaatgctgctgtctcgtgtacttactgttaaggatcctggaaaagggagtggttcctcctagctgcaaacaagggcgctacttttcttttctctttaatagaattacgttttataggtgtgtctaggcaacacaagggaatgtgaaagactttcagagggaatgtttgtgaatacatctggtgtgtactaaaaagctggaaaacccctaagtaaatgcaatatcgatagaaagcgagtttcttgaagagtcatctgctaaactccactagagtcatctctacaggtgtggttaagagaaaaaaaaattgccattaaggaatcagcaaataggatgtctgaagtgaggatatagcacctatctctgagattaaagtcatctgatcaaaaatgatgcctctgagactataacaaaggaatgaataatgaaatataagaatggggattctgcactaactctatggggaagaaaacaatgtctctgttcatcatgagaaatgctcagcgactgcagacataaagagaaagctttcaattaaagtttcaatgatgggataggaactgagaagtctgtggagttttctgcctaggagtacccttggaaaagccactgctatgcccaaccagcactgggaatcccagatcacatgcaatcataggagttgccctggaggcagaagctcagcacatgttctggtaca

SEQ ID NO: 428379 - DNA, 1353 bp, Homo sapiens
gtaattcgagcgtgggactgtgcaattctcggattgggaaagggaggagtggaaataaccccggcagtgccaggcttgctggtggtcaggaacagatgattccagccctgtgctgatcgcctgccttcctcctgccattcagaatgctgctgtctcgtgtacttactgttaaggatcctggaaaagggagtggttcctcctagctgcaaacaagggcgctacttttcttttctctttaatagaattacgttttataggtgtgtctaggcaacacaagggaatgtgaaagactttcagagggaatgtttgtgaatacatctggtgtgtactaaaaagctggaaaacccctaagtaaatgcaatatcgatagaaagcgagtttcttgaagagtcatctgctaaactccactagagtcatctctacaataacaatatcaactgaatataaaatattaatgccatggatgatctcagaaatgatttcctacaaagtcccaacctatcctggaacatttcttatgtgtgcttgggagattgcaagaggacaactcggctctaaaatcgatgcattaacatgtcattggaattgaccttgccaaaagatgcctccctaaatccacaagaatctccttgtttgaacacagtttctaatccagctgtaatgaagacagacaacagtcaaattaacaactgatcaggaggagaagttcatactccttgagctggatctatctgcacatgcacctggcccaggaagctgaaatgggagatctgatgagcagtggaggactgaaccaaagcccttggcttttgctccataccagtcagagtctcatcaggatatcatgttgcattgagtagtcatgtctccacaggcttttcttggctgcgactcttactcacgttttccttggttttgcccaccttacagtttacagtagtggtcagccgttctggacatacacatgggcagaagatgtagccgccttgtgtgaaaatttgagagctctctactccatcttccgctagtataaccctcattggctggaatcataatggtatctgcatctggaactggccactagtataacacctacaaaatgcacaacggccttcagaccatatgaaaagtctacagggtgagaatctgaaaatccagcaatgaggagaaaaaagttatctcccattaagaacactttccagaagctacacaattccagttattgattcatcccatttactagaacctgttcatctggctatgcccaaaaccaagggaaactgaaatagtggttaccatattctgtaactcagcctagcctagcttcagaagttttaataaagaaaataaaat

SEQ ID NO: 428380 - DNA, 1233 bp, Homo sapiens
gtaattcgagcgtgggactgtgcaattctcggattgggaaagggaggagtggaaataaccccggcagtgccaggcttgctggtggtcaggaacagatgattccagccctgtgctgatcgcctgccttcctcctgccattcagaatgctgctgtctcgtgtacttactgttaaggatcctggaaaagggagtggttcctcctagctgcaaacaagggcgctacttttcttttctctttaatagaattacgttttataggtgtgtctaggcaacacaagggaatgtgaaagactttcagagggaatgtttgtgaatacatctggtgtgtactaaaaagctggaaaacccctaagtaaatgcaatatcgatagaaagcgagtttcttgaagagtcatctgctaaactccactagagtcatctctacaataacaatatcaactgaatataaaatattaatgccatggatgatctcagaaatgatttcctacaaagtcccaacctatcctggaacatttcttatgtgtgcttgggagattgcaagaggacaactcggctctaaaatcgatgcattaacatgtcattggaattgaccttgccaaaagatgcctccctaaatccacaagaatctccttgtttgaacacagtttctaatccagctgtaatgaagacagacaacagtcaaattaacaactgatcaggaggagaagttcatactccttgagctggatctatctgcacatgcacctggcccaggaagctgaaatgggagatctgatgagcagtggaggactgaaccaaagcccttggcttttgctccataccagtcagccgttctggacatacacatgggcagaagatgtagccgccttgtgtgaaaatttgagagctctctactccatcttccgctagtataaccctcattggctggaatcataatggtatctgcatctggaactggccactagtataacacctacaaaatgcacaacggccttcagaccatatgaaaagtctacagggtgagaatctgaaaatccagcaatgaggagaaaaaagttatctcccattaagaacactttccagaagctacacaattccagttattgattcatcccatttactagaacctgttcatctggctatgcccaaaaccaagggaaactgaaatagtggttaccatattctgtaactcagcctagcctagcttcagaagttttaataaagaaaataaaat

SEQ ID NO: 428381 - DNA, 446 bp, Homo sapiens
ggaaagcccatctatggatacttatgtttatgagaatagagacttgactgtttaaatgtcagaggaatagagagtttggcaagcagaacaatcctatcagtgacggcctttggaaaaaatgggctatttttagtaaaagttttcataatgacatgatttaaagtaaaataaattagacttttgatttcaactctgtgttagagttctccagataaatggaaccaataaaaaatatttacaggaaatggctcacatattatggtggctaagaagtcctacgatctgctgtcttcaaactggagaaccataaatgtcaatggtgtaattcagtctgaatctgaaggcctaagaaccaagagaaatgatggtataattcctggtctgaatccaaaagcaggagaagatgtcccagttcaagcagaaggaataaattcattctttatctt

SEQ ID NO: 428382 - DNA, 466 bp, Homo sapiens
cttgcagtggagtaggtctgcaaatgttgtcacatgggaattggctgattgaattttctcaatgaggttcattgctggtggggccatgtggcccagccaggtgctctcacgctcactctctctgtttcattccctaaccctgcagtccactggggatcaggcattagaagttctacagtacctcttctccaatgacctggatgtgcctgtgggccacattgtgcatactggcatgctcaacgagggtggagggtatgaaaatgactgcagcatagcacgactgaacaagcgcaggtgagatgagctgccgtcccgctctgctccctccaacatgttgattccttaggggtgctgtagcagaggctctcaggcgcttctccgggaaccataaatcccagagtctaagaatcattacatgaaatcaaagccagtttattagcagtcctaaacaaaagaaatcaccagg

SEQ ID NO: 428383 - DNA, 6762 bp, Homo sapiens
agtctgtatactttttggttgggcagatctccaccgggtactgatttggggttggggcttcttccatcacatagccttgctgggaaaaggaggagaacgggaattgtgtggggtggttatggccagccctgctgcgttcagcaggccctgttggcagaggtgtattcgccagaatcggggtgcttagcatccatccttggagtgtctaagcaaagggacatattcctggtctctgcacccaggcctggctatagctgagcaagtctacagtagacctttcccattggctcagctgttcagaaggagagctggacatctcttgttcttttccatttagccctcaatctgattggccctcgagctgtggatgtgctgtctgagttgtcctatgcccctatgactccagaccacttcccaagcctcttttgcaaggagatgagtgtgggctatgcaaatgggatccgggtgatgagcatgacgcacacaggagagccaggattcatgctctacatccccatagagtacgccctgcatgtatacaatgaagtgatgagtgttggccagaaatacggaatccggaatgctgggtattacgctcttcgcagtctccgaattgagaagttttttgccttctggggtcaggatataaataacctcaccacgcccctggaatgtggacgagagtctcgggtgaaattagagaagggcatggatttcattggtcgcgacgccctcctgcagcagaagcagaatggagtgtataaacgcctcaccatgttcatcctggacgaccatgattcagacctagacctttggccttggtggggagagcccatttaccggaatgggcagtatgttggcaagaccaccagcagtgcctacagctacagcctggagcgccacgtttgcctgggctttgtgcacaatttttctgaggacacgggggaagagcaagtggtgacagcagatttcatcaaccggggagagtatgagattgacatcgcgggataccgcttccaggccaaggccaagctctaccctgtcgcctccctcttcacccagaagcgccgaaaggatgacatggagctgagtgacttacatgggaagtgatgccaccagggcagcctcacctcctccccatcatcttgtcctagagtgggcgtcaccttggagcttctcttccttccgcctctgttcctcttctggagcctttgcctcccatctcttatctccttgatataattttgaacttgacctactttaaacttttttgctctgcagccttccttgcccttccacctcctcctcctaatattcactctgggctcttcttcccttcccacccctcactcagcttctcgtggtggcaggaggtatgtctgacaggacagaagcaagctccactgtggacatgagtgatggtgacagctgctttcaaattctgcatctcaaggcagggcaagccggggtggtgcaggtctcagggcacgagtccctctcccttgggttccattttcttggagcagcctattagttctggtggggttgccgtgtgtcggatgcagccctgaggggcagctcgtgcctgcagcccggcagctcgttctcctgttctgctgtgctgtgggctggcactcgatacctctggcaagaggatgatcatctacctcactgataagaggcatcgcatggacgttctctggtctgtagtggagacaagcagttaacctagcaccatcctcatcctccctgcagaagccattagcagacctttgggccagggcagcctccctataattttcttcatctcttgctaatctctataataaggttgctttttctttcttagttgagtaaacaagtaagccacagtgtttgaaaggaaaaaaccatgttgccttgtgtgttgcttttcccagtcaaaagggtctgaccttagaaagtccccaccagtgatgctgagtgttctgctatggaaacaatgctgcttttctctcagctgtccaaagttcagccgttcctccttccccttctcccagtgcgtttgactttgtcaggtcagcctcacttgtccctttcacagttggcccataaagtcatgtttctctccctttagaatagggaggggaagggatcaggtgtgttgtcctgggcctttcaaccttgcgggctgtgctgagttccagagagctgccggaattccaggtttgactctccagcacagagcagagctacacagaggtgacccacgttagtccactgagagttctgagtccaaagggtgtacgttgcataaggctagagaccgcttttcctcctttccccccaggctctttgtttccctccacccacccttccatatcctctggagcaggagacaatgtgggtgcccagaagtgccctgcgctttcaggcagtgtctctgttttcccaaggtgaaacttagatatcatggactgttgtccagcctcaatgcttcattttccccttgcatatcaactgccctaatctgactttttttaagtgcaaataaactgctataagacattttggttagtaaaactctagcctttggcgtgttggtatcttggaagcattagctctgataggtctataagtgtattaagggacatccttccatttcattagagcagcttaaaatgctcaggtgtctgccttctctggtgtttctttgggatctctgtttacccacttacgctggctccttctagacatttcttgccacttccccaactagaccactcctagtgattactgactttagtgcccacctttttggaaggttctggttggcttgttagaggagcatatgattagaattctgtttgggggtctagttgtcttggagcaagtatgtacttaactagccgagagatgctgcctctaggcagagaggaggagaggtgttgccggctggagggccaaccagtgaacaccagctgtgaaggccttgggagaggaggaacaggcccttgggcagatgcaggcattaccagcagggagcagacttacctccgaagatggagacaggtgactgagagctgcaggcctcctctgctcttccaaacacgtagcatttgcacccctccaaagccatctttgtaaaggaaaacgtatttgtaattgaatccagaagaatttagttacacatagacataactcttcaaccttaactatggcaatacatttgtgctttaactgttacatagcagtatcaccacttaccaggatccaaatcgaaataataaaagctgtctccatagtttaaaatcgaatagtgccatcatcacagtatattagtcaaatagaagcttcatcagaaatgtatcccacatagagttttaagacttggattctcttctgcccttgttaatctccaactaattactacagattgacacgtttttaattagctgtcctttgtaagaagtcaggaaatctgatgctgtgtccaaaattatgcactgtttgttgaagtagaaccagaaatcctgacctcctgttaaatgacatcagtttccccctctgagcaacagactgcttgtcttgctaggagaggaggatggggggctgagcactcaggctgtccattgaaaccccttgtccatgaatagggtcatactcctaagactgatggggtgttgatcttctaggacatcacttgtttattcagtgccccaaacacagatttctcttctagcactttagagttgatccttgaagtctctcctggttcattcaaatacaagctgtgtgagtctggtggttttctgtgattggtctaatgtgagctctttgaacagacagatctgacagtgaatgactctcccctgcttctggcataactgctttgcctctgtctagtgtccaagcatcttagctgttcaagaggagagggcagcataacttcctgaccaccggtgtcagatatcagagcattctggactcctgagaggcagtggcctcttgagtgaacaggggaggccagtagatgccccagatccagagccgtggctgcaaatccagcaggaataaggagggacaaccacagcctcctcatccatgtgtcatttccaagggtttgccttgtgtctcagctcattctgggcagcacgtttgtcttctgtccctagagatttgaaggattttggactcttgtgaatgggtgactggacttggctttacagagttgggtgcttttttctctctgcaattacctgtcatagcattttgtgctcaccacgaaggatggtctctgccttctcttgtcggtgtatgccatctgaacctaggaacacaaagtatattggcctcaaacggagacccagggttgccagttttccgtgggccttcccctcccttgaaatgtctttaattacctccccttcatcgtcaggccacgtgtgacttctgttcttagcactgccagggtcattgacttccatctaagcttgcatcaggaagatgttccttctgtgatcattggtactgaagccagaaaagctctcattcaggaactctgaagagcaaaaagggacaaacactaactgctgagctgggccatttgatctcctttcaccttgcattgctgtcacagcaccttgtatgatggcaggacaggctccagcagagagaactgcacagtgaccactgtatttttcacgctcttccagggatccctgtcccccgacattgaagagatctcattcaggccagagacacagagaccacatagcccagtgattaaaccccggtttcactctggccccaggagtggagcctggccactcctgtttggttctcactgggaggcccactggccttggatcatctcctcatgcacacccggagttttacctgcttgcttgctttcctggactgctgtttgcaagaaagtaactaaaacatgaaaagtaaacctccagcttccacagtatattacctgccgttgcatgcatttgaaagttagcctcctcccttgccaccgtcttggtggcagtagcgatgcaagaatgatgggagctttccgagagcgttcagtgtttcactgaagacaggacccatagccttcatttctggctctgtgtctcctctggcatatggacacatttcctggcatttgcctgagtctacaccactttttgagaacctgaaatagaagggaatcttctgtggcccacagtctccatattggccctagaagactggcctggcggaggaatttgcgttggcttgctttcaggggttagctacaagattcagctttatatctctgttgcttcttggccagtgtagtcaataagggtcttctttaacatctaagatagaggtttggttggccgggcgtggtcgcttactcctgtaatcccagcactttgggaggcccagtgaggtgggagaattgcttgaacccaggaggcagaggttgcagtgagctgagattgcaccactgcactccagcctgggtaacagagtgagactcttgtctcaaaaaaaaaaaaaaaaaaaatctaagatagaggtttggtcaacagtgcttaataataaataagaacctcctgccattctaattttcctgctgcaccccatcccccacacacccctcacgaacattgatataagcagtattaacacagtataaagaatgttcaccttgcatatgtcatttcaggcacatggattcaggagaagcacagttgagtggaagaaatggtagacttgtgaggcttgccccaggccttgtgtacacgcaataagtggtgagccatgggtctctccgtcagcgcctccctccccgaccaccacttcaggccaacaatttaaggtgctgagttgtaaggctcctccattgtcagtacagggctcgcctttgtagccctgatcactaccagtacacttttcaagacaactgagtatttttgtatgcctttgccttccctttgtccatgaaacatgaagagttgtttatggttcttgacttctctgagcagagtgtctgcatctcttggagagttacacatttcttcatgagccatttttctcattcttagatgcacctgtttttatcctttgcagaccatcttctgccttcttattttcctgtctgtcaaagacagaaattacaggagatagggagggttttttagcatctctttcaaaagatgtatgtcagaatttcctttgcacaccaagaactggagcttagagccccactattctctaagccaggttctagtgccttacactccagaatgtcagatggtgggtgcagattggaagaaagagaaaagttcatctcggtgtgtgggttcccatccgccccacatagcctctccttcttcggaacaatgggcgtggggtagaaagctctttcagtgaagggtgttctagcagctcagttaacactttactctccagtcaacacttgggacatataaaaatgccattgtaactactgtagagtcctgtgactcatcgtttgtgtttgtcagtgtgcagttcagcttagcccttccctgttcctgtgtagttacaatctggccctgaagacatccgaggcacttcagtaagtgggatcttttctagagatcctgggtgactttgggtgcacagggtgaccgagcatttctgcccctgtgaatgtggcactaacactgtgcactgtctccaccaagcaaggtttccactgagtttcttctcatgttactgggtttgtaaatgaataaacacattttaactact

SEQ ID NO: 428384 - DNA, 6832 bp, Homo sapiens
cttgcagtggagtaggtctgcaaatgttgtcacatgggaattggctgattgaattttctcaatgaggttcattgctggtggggccatgtggcccagccaggtgctctcacgctcactctctctgtttcattccctaaccctgcagtccactggggatcaggcattagaagttctacagtacctcttctccaatgacctggatgtgcctgtgggccacattgtgcatactggcatgctcaacgagggtggagggtatgaaaatgactgcagcatagcacgactgaacaagcgcagtttcttcatgatctctccaaccgaccagcaggtccactgttgggcctggcttaagaaacacatgccgaaagacagcaacctgctcctggaggacgtcacctggaagtacacagccctcaatctgattggccctcgagctgtggatgtgctgtctgagttgtcctatgcccctatgactccagaccacttcccaagcctcttttgcaaggagatgagtgtgggctatgcaaatgggatccgggtgatgagcatgacgcacacaggagagccaggattcatgctctacatccccatagagtacgccctgcatgtatacaatgaagtgatgagtgttggccagaaatacggaatccggaatgctgggtattacgctcttcgcagtctccgaattgagaagttttttgccttctggggtcaggatataaataacctcaccacgcccctggaatgtggacgagagtctcgggtgaaattagagaagggcatggatttcattggtcgcgacgccctcctgcagcagaagcagaatggagtgtataaacgcctcaccatgttcatcctggacgaccatgattcagacctagacctttggccttggtggggagagcccatttaccggaatgggcagtatgttggcaagaccaccagcagtgcctacagctacagcctggagcgccacgtttgcctgggctttgtgcacaatttttctgaggacacgggggaagagcaagtggtgacagcagatttcatcaaccggggagagtatgagattgacatcgcgggataccgcttccaggccaaggccaagctctaccctgtcgcctccctcttcacccagaagcgccgaaaggatgacatggagctgagtgacttacatgggaagtgatgccaccagggcagcctcacctcctccccatcatcttgtcctagagtgggcgtcaccttggagcttctcttccttccgcctctgttcctcttctggagcctttgcctcccatctcttatctccttgatataattttgaacttgacctactttaaacttttttgctctgcagccttccttgcccttccacctcctcctcctaatattcactctgggctcttcttcccttcccacccctcactcagcttctcgtggtggcaggaggtatgtctgacaggacagaagcaagctccactgtggacatgagtgatggtgacagctgctttcaaattctgcatctcaaggcagggcaagccggggtggtgcaggtctcagggcacgagtccctctcccttgggttccattttcttggagcagcctattagttctggtggggttgccgtgtgtcggatgcagccctgaggggcagctcgtgcctgcagcccggcagctcgttctcctgttctgctgtgctgtgggctggcactcgatacctctggcaagaggatgatcatctacctcactgataagaggcatcgcatggacgttctctggtctgtagtggagacaagcagttaacctagcaccatcctcatcctccctgcagaagccattagcagacctttgggccagggcagcctccctataattttcttcatctcttgctaatctctataataaggttgctttttctttcttagttgagtaaacaagtaagccacagtgtttgaaaggaaaaaaccatgttgccttgtgtgttgcttttcccagtcaaaagggtctgaccttagaaagtccccaccagtgatgctgagtgttctgctatggaaacaatgctgcttttctctcagctgtccaaagttcagccgttcctccttccccttctcccagtgcgtttgactttgtcaggtcagcctcacttgtccctttcacagttggcccataaagtcatgtttctctccctttagaatagggaggggaagggatcaggtgtgttgtcctgggcctttcaaccttgcgggctgtgctgagttccagagagctgccggaattccaggtttgactctccagcacagagcagagctacacagaggtgacccacgttagtccactgagagttctgagtccaaagggtgtacgttgcataaggctagagaccgcttttcctcctttccccccaggctctttgtttccctccacccacccttccatatcctctggagcaggagacaatgtgggtgcccagaagtgccctgcgctttcaggcagtgtctctgttttcccaaggtgaaacttagatatcatggactgttgtccagcctcaatgcttcattttccccttgcatatcaactgccctaatctgactttttttaagtgcaaataaactgctataagacattttggttagtaaaactctagcctttggcgtgttggtatcttggaagcattagctctgataggtctataagtgtattaagggacatccttccatttcattagagcagcttaaaatgctcaggtgtctgccttctctggtgtttctttgggatctctgtttacccacttacgctggctccttctagacatttcttgccacttccccaactagaccactcctagtgattactgactttagtgcccacctttttggaaggttctggttggcttgttagaggagcatatgattagaattctgtttgggggtctagttgtcttggagcaagtatgtacttaactagccgagagatgctgcctctaggcagagaggaggagaggtgttgccggctggagggccaaccagtgaacaccagctgtgaaggccttgggagaggaggaacaggcccttgggcagatgcaggcattaccagcagggagcagacttacctccgaagatggagacaggtgactgagagctgcaggcctcctctgctcttccaaacacgtagcatttgcacccctccaaagccatctttgtaaaggaaaacgtatttgtaattgaatccagaagaatttagttacacatagacataactcttcaaccttaactatggcaatacatttgtgctttaactgttacatagcagtatcaccacttaccaggatccaaatcgaaataataaaagctgtctccatagtttaaaatcgaatagtgccatcatcacagtatattagtcaaatagaagcttcatcagaaatgtatcccacatagagttttaagacttggattctcttctgcccttgttaatctccaactaattactacagattgacacgtttttaattagctgtcctttgtaagaagtcaggaaatctgatgctgtgtccaaaattatgcactgtttgttgaagtagaaccagaaatcctgacctcctgttaaatgacatcagtttccccctctgagcaacagactgcttgtcttgctaggagaggaggatggggggctgagcactcaggctgtccattgaaaccccttgtccatgaatagggtcatactcctaagactgatggggtgttgatcttctaggacatcacttgtttattcagtgccccaaacacagatttctcttctagcactttagagttgatccttgaagtctctcctggttcattcaaatacaagctgtgtgagtctggtggttttctgtgattggtctaatgtgagctctttgaacagacagatctgacagtgaatgactctcccctgcttctggcataactgctttgcctctgtctagtgtccaagcatcttagctgttcaagaggagagggcagcataacttcctgaccaccggtgtcagatatcagagcattctggactcctgagaggcagtggcctcttgagtgaacaggggaggccagtagatgccccagatccagagccgtggctgcaaatccagcaggaataaggagggacaaccacagcctcctcatccatgtgtcatttccaagggtttgccttgtgtctcagctcattctgggcagcacgtttgtcttctgtccctagagatttgaaggattttggactcttgtgaatgggtgactggacttggctttacagagttgggtgcttttttctctctgcaattacctgtcatagcattttgtgctcaccacgaaggatggtctctgccttctcttgtcggtgtatgccatctgaacctaggaacacaaagtatattggcctcaaacggagacccagggttgccagttttccgtgggccttcccctcccttgaaatgtctttaattacctccccttcatcgtcaggccacgtgtgacttctgttcttagcactgccagggtcattgacttccatctaagcttgcatcaggaagatgttccttctgtgatcattggtactgaagccagaaaagctctcattcaggaactctgaagagcaaaaagggacaaacactaactgctgagctgggccatttgatctcctttcaccttgcattgctgtcacagcaccttgtatgatggcaggacaggctccagcagagagaactgcacagtgaccactgtatttttcacgctcttccagggatccctgtcccccgacattgaagagatctcattcaggccagagacacagagaccacatagcccagtgattaaaccccggtttcactctggccccaggagtggagcctggccactcctgtttggttctcactgggaggcccactggccttggatcatctcctcatgcacacccggagttttacctgcttgcttgctttcctggactgctgtttgcaagaaagtaactaaaacatgaaaagtaaacctccagcttccacagtatattacctgccgttgcatgcatttgaaagttagcctcctcccttgccaccgtcttggtggcagtagcgatgcaagaatgatgggagctttccgagagcgttcagtgtttcactgaagacaggacccatagccttcatttctggctctgtgtctcctctggcatatggacacatttcctggcatttgcctgagtctacaccactttttgagaacctgaaatagaagggaatcttctgtggcccacagtctccatattggccctagaagactggcctggcggaggaatttgcgttggcttgctttcaggggttagctacaagattcagctttatatctctgttgcttcttggccagtgtagtcaataagggtcttctttaacatctaagatagaggtttggttggccgggcgtggtcgcttactcctgtaatcccagcactttgggaggcccagtgaggtgggagaattgcttgaacccaggaggcagaggttgcagtgagctgagattgcaccactgcactccagcctgggtaacagagtgagactcttgtctcaaaaaaaaaaaaaaaaaaaatctaagatagaggtttggtcaacagtgcttaataataaataagaacctcctgccattctaattttcctgctgcaccccatcccccacacacccctcacgaacattgatataagcagtattaacacagtataaagaatgttcaccttgcatatgtcatttcaggcacatggattcaggagaagcacagttgagtggaagaaatggtagacttgtgaggcttgccccaggccttgtgtacacgcaataagtggtgagccatgggtctctccgtcagcgcctccctccccgaccaccacttcaggccaacaatttaaggtgctgagttgtaaggctcctccattgtcagtacagggctcgcctttgtagccctgatcactaccagtacacttttcaagacaactgagtatttttgtatgcctttgccttccctttgtccatgaaacatgaagagttgtttatggttcttgacttctctgagcagagtgtctgcatctcttggagagttacacatttcttcatgagccatttttctcattcttagatgcacctgtttttatcctttgcagaccatcttctgccttcttattttcctgtctgtcaaagacagaaattacaggagatagggagggttttttagcatctctttcaaaagatgtatgtcagaatttcctttgcacaccaagaactggagcttagagccccactattctctaagccaggttctagtgccttacactccagaatgtcagatggtgggtgcagattggaagaaagagaaaagttcatctcggtgtgtgggttcccatccgccccacatagcctctccttcttcggaacaatgggcgtggggtagaaagctctttcagtgaagggtgttctagcagctcagttaacactttactctccagtcaacacttgggacatataaaaatgccattgtaactactgtagagtcctgtgactcatcgtttgtgtttgtcagtgtgcagttcagcttagcccttccctgttcctgtgtagttacaatctggccctgaagacatccgaggcacttcagtaagtgggatcttttctagagatcctgggtgactttgggtgcacagggtgaccgagcatttctgcccctgtgaatgtggcactaacactgtgcactgtctccaccaagcaaggtttccactgagtttcttctcatgttactgggtttgtaaatgaataaacacattttaactact

SEQ ID NO: 428385 - DNA, 5440 bp, Homo sapiens
  misc_feature (3)..(3): n is a, c, g, or t
  misc_feature (27)..(28): n is a, c, g, or t
  misc_feature (73)..(73): n is a, c, g, or t
  misc_feature (87)..(87): n is a, c, g, or t
ccnaaacccccaaaaggttcccagganntaagggattcctggccttccacttcttcttccaaaaattcactcngggcttttcttccnttcccacccctcattcagctgctcgtggtggcaggaggtatgtctgacaggacagaagcaagctccccatcatcttgtcctagagtgggcgtcaccttggagcttctcttccttccgcctctgttcctcttctggagcctttgcctcccatctcttatctccttgatataattttgaacttgacctactttaaacttttttgctctgctgtgctgtgggctggcactcgatacctctggcaagaggatgatcatctacctcactgataagaggcatcgcatggacgttctctggtctgtagtggagacaagcagttaacctagcaccatcctcatcctccctgcagaagccattagcagacctttgggccagggcagcctccctataattttcttcatctcttgctaatctctataataaggttgctttttctttcttagttgagtaaacaagtaagccacagtgtttgaaaggaaaaaaccatgttgccttgtgtgttgcttttcccagtcaaaagggtctgaccttagaaagtccccaccagtgatgctgagtgttctgctatggaaacaatgctgcttttctctcagctgtccaaagttcagccgttcctccttccccttctcccagtgcgtttgactttgtcaggtcagcctcacttgtccctttcacagttggcccataaagtcatgtttctctccctttagaatagggaggggaagggatcaggtgtgttgtcctgggcctttcaaccttgcgggctgtgctgagttccagagagctgccggaattccaggtttgactctccagcacagagcagagctacacagaggtgacccacgttagtccactgagagttctgagtccaaagggtgtacgttgcataaggctagagaccgcttttcctcctttccccccaggctctttgtttccctccacccacccttccatatcctctggagcaggagacaatgtgggtgcccagaagtgccctgcgctttcaggcagtgtctctgttttcccaaggtgaaacttagatatcatggactgttgtccagcctcaatgcttcattttccccttgcatatcaactgccctaatctgactttttttaagtgcaaataaactgctataagacattttggttagtaaaactctagcctttggcgtgttggtatcttggaagcattagctctgataggtctataagtgtattaagggacatccttccatttcattagagcagcttaaaatgctcaggtgtctgccttctctggtgtttctttgggatctctgtttacccacttacgctggctccttctagacatttcttgccacttccccaactagaccactcctagtgattactgactttagtgcccacctttttggaaggttctggttggcttgttagaggagcatatgattagaattctgtttgggggtctagttgtcttggagcaagtatgtacttaactagccgagagatgctgcctctaggcagagaggaggagaggtgttgccggctggagggccaaccagtgaacaccagctgtgaaggccttgggagaggaggaacaggcccttgggcagatgcaggcattaccagcagggagcagacttacctccgaagatggagacaggtgactgagagctgcaggcctcctctgctcttccaaacacgtagcatttgcacccctccaaagccatctttgtaaaggaaaacgtatttgtaattgaatccagaagaatttagttacacatagacataactcttcaaccttaactatggcaatacatttgtgctttaactgttacatagcagtatcaccacttaccaggatccaaatcgaaataataaaagctgtctccatagtttaaaatcgaatagtgccatcatcacagtatattagtcaaatagaagcttcatcagaaatgtatcccacatagagttttaagacttggattctcttctgcccttgttaatctccaactaattactacagattgacacgtttttaattagctgtcctttgtaagaagtcaggaaatctgatgctgtgtccaaaattatgcactgtttgttgaagtagaaccagaaatcctgacctcctgttaaatgacatcagtttccccctctgagcaacagactgcttgtcttgctaggagaggaggatggggggctgagcactcaggctgtccattgaaaccccttgtccatgaatagggtcatactcctaagactgatggggtgttgatcttctaggacatcacttgtttattcagtgccccaaacacagatttctcttctagcactttagagttgatccttgaagtctctcctggttcattcaaatacaagctgtgtgagtctggtggttttctgtgattggtctaatgtgagctctttgaacagacagatctgacagtgaatgactctcccctgcttctggcataactgctttgcctctgtctagtgtccaagcatcttagctgttcaagaggagagggcagcataacttcctgaccaccggtgtcagatatcagagcattctggactcctgagaggcagtggcctcttgagtgaacaggggaggccagtagatgccccagatccagagccgtggctgcaaatccagcaggaataaggagggacaaccacagcctcctcatccatgtgtcatttccaagggtttgccttgtgtctcagctcattctgggcagcacgtttgtcttctgtccctagagatttgaaggattttggactcttgtgaatgggtgactggacttggctttacagagttgggtgcttttttctctctgcaattacctgtcatagcattttgtgctcaccacgaaggatggtctctgccttctcttgtcggtgtatgccatctgaacctaggaacacaaagtatattggcctcaaacggagacccagggttgccagttttccgtgggccttcccctcccttgaaatgtctttaattacctccccttcatcgtcaggccacgtgtgacttctgttcttagcactgccagggtcattgacttccatctaagcttgcatcaggaagatgttccttctgtgatcattggtactgaagccagaaaagctctcattcaggaactctgaagagcaaaaagggacaaacactaactgctgagctgggccatttgatctcctttcaccttgcattgctgtcacagcaccttgtatgatggcaggacaggctccagcagagagaactgcacagtgaccactgtatttttcacgctcttccagggatccctgtcccccgacattgaagagatctcattcaggccagagacacagagaccacatagcccagtgattaaaccccggtttcactctggccccaggagtggagcctggccactcctgtttggttctcactgggaggcccactggccttggatcatctcctcatgcacacccggagttttacctgcttgcttgctttcctggactgctgtttgcaagaaagtaactaaaacatgaaaagtaaacctccagcttccacagtatattacctgccgttgcatgcatttgaaagttagcctcctcccttgccaccgtcttggtggcagtagcgatgcaagaatgatgggagctttccgagagcgttcagtgtttcactgaagacaggacccatagccttcatttctggctctgtgtctcctctggcatatggacacatttcctggcatttgcctgagtctacaccactttttgagaacctgaaatagaagggaatcttctgtggcccacagtctccatattggccctagaagactggcctggcggaggaatttgcgttggcttgctttcaggggttagctacaagattcagctttatatctctgttgcttcttggccagtgtagtcaataagggtcttctttaacatctaagatagaggtttggttggccgggcgtggtcgcttactcctgtaatcccagcactttgggaggcccagtgaggtgggagaattgcttgaacccaggaggcagaggttgcagtgagctgagattgcaccactgcactccagcctgggtaacagagtgagactcttgtctcaaaaaaaaaaaaaaaaaaaatctaagatagaggtttggtcaacagtgcttaataataaataagaacctcctgccattctaattttcctgctgcaccccatcccccacacacccctcacgaacattgatataagcagtattaacacagtataaagaatgttcaccttgcatatgtcatttcaggcacatggattcaggagaagcacagttgagtggaagaaatggtagacttgtgaggcttgccccaggccttgtgtacacgcaataagtggtgagccatgggtctctccgtcagcgcctccctccccgaccaccacttcaggccaacaatttaaggtgctgagttgtaaggctcctccattgtcagtacagggctcgcctttgtagccctgatcactaccagtacacttttcaagacaactgagtatttttgtatgcctttgccttccctttgtccatgaaacatgaagagttgtttatggttcttgacttctctgagcagagtgtctgcatctcttggagagttacacatttcttcatgagccatttttctcattcttagatgcacctgtttttatcctttgcagaccatcttctgccttcttattttcctgtctgtcaaagacagaaattacaggagatagggagggttttttagcatctctttcaaaagatgtatgtcagaatttcctttgcacaccaagaactggagcttagagccccactattctctaagccaggttctagtgccttacactccagaatgtcagatggtgggtgcagattggaagaaagagaaaagttcatctcggtgtgtgggttcccatccgccccacatagcctctccttcttcggaacaatgggcgtggggtagaaagctctttcagtgaagggtgttctagcagctcagttaacactttactctccagtcaacacttgggacatataaaaatgccattgtaactactgtagagtcctgtgactcatcgtttgtgtttgtcagtgtgcagttcagcttagcccttccctgttcctgtgtagttacaatctggccctgaagacatccgaggcacttcagtaagtgggatcttttctagagatcctgggtgactttgggtgcacagggtgaccgagcatttctgcccctgtgaatgtggcactaacactgtgcactgtctccaccaagcaaggtttccactgagtttcttctcatgttactgggtttgtaaatgaataaacacattttaactact

SEQ ID NO: 428386 - DNA, 5862 bp, Homo sapiens
agtctgtatactttttggttgggcagatctccaccgggtactgatttggggttggggcttcttccatcacatagccttgctgggaaaaggaggagaacgggaattgtgtggggtggttatggccagccctgctgcgttcagcaggccctgttggcagaggtgtattcgccagaatcggggtgcttagcatccatccttggagtgtctaagcaaagggacatattcctggtctctgcacccaggcctggctatagctgagcaagtctacagtagacctttcccattggctcagctgttcagaaggagagctggacatctcttgttcttttccatttagccctcaatctgattggccctcgagctgtggatgtgctgtctgagttgtcctatgcccctatgactccagaccacttcccaagcctcttttgcaaggagatgagtgtgggctatgcaaatgggatccgggtgatgagcatgacgcacacaggagagccaggattcatgctctacatccccatagagtacgccctgcatgtatacaatgaagtgatgagtgttggccagaaatacggaatccggaatgctgggtattacgctcttcgcagtctccgaattgagaagttttttgccttctggggtcaggatataaataacctcaccacgcccctggaatgtggacgagagtctcgggtgaaattagagaagggcatggatttcattggtcgcgacgccctcctgcagcagaagcagaatggagtgtataaacgcctcaccatgttcatcctggacgaccatgattcagacctagacctttggccttggtggggagagcccatttaccggaatgggcagtatgttggcaagaccaccagcagtgcctacagctacagcctggagcgccacgtttgcctgggctttgtgcacaatttttctgaggacacgggggaagagcaagtggtgacagcagatttcatcaaccggggagagtatgagattgacatcgcgggataccgcttccaggccaaggccaagctctaccctgtcgcctccctcttcacccagaagcgccgaaaggatgacatggagctgagtgacttacatgggaagtgatgccaccagggcagcctcacctcctccccatcatcttgtcctagagtgggcgtcaccttggagcttctcttccttccgcctctgttcctcttctggagcctttgcctcccatctcttatctccttgatataattttgaacttgacctactttaaacttttttgctctgcagccttccttgcccttccacctcctcctcctaatattcactctgggctcttcttcccttcccacccctcactcagcttctcgtggtggcaggaggtatgtctgacaggacagaagcaagctccactgtggacatgagtgatggtgacagctgctttcaaattctgcatctcaaggcagggcaagccggggtggtgcaggtctcagggcacgagtccctctcccttgggttccattttcttggagcagcctattagttctggtggggttgccgtgtgtcggatgcagccctgaggggcagctcgtgcctgcagcccggcagctcgttctcctgttctgctgtgctgtgggctggcactcgatacctctggcaagaggatgatcatctacctcactgataagaggcatcgcatggacgttctctggtctgtagtggagacaagcagttaacctagcaccatcctcatcctccctgcagaagccattagcagacctttgggccagggcagcctccctataattttcttcatctcttgctaatctctataataaggttgctttttctttcttagttgagtaaacaagtaagccacagtgtttgaaaggaaaaaaccatgttgccttgtgtgttgcttttcccagtcaaaagggtctgaccttagaaagtccccaccagtgatgctgagtgttctgctatggaaacaatgctgcttttctctcagctgtccaaagttcagccgttcctccttccccttctcccagtgcgtttgactttgtcaggtcagcctcacttgtccctttcacagttggcccataaagtcatgtttctctccctttagaatagggaggggaagggatcaggtgtgttgtcctgggcctttcaaccttgcgggctgtgctgagttccagagagctgccggaattccaggtttgactctccagcacagagcagagctacacagaggtgacccacgttagtccactgagagttctgagtccaaagggtgtacgttgcataaggctagagaccgcttttcctcctttccccccaggctctttgtttccctccacccacccttccatatcctctggagcaggagacaatgtgggtgcccagaagtgccctgcgctttcaggcagtgtctctgttttcccaaggtgaaacttagatatcatggactgttgtccagcctcaatgcttcattttccccttgcatatcaactgccctaatctgactttttttaagtgcaaataaactgctataagacattttggttagtaaaactctagcctttggcgtgttggtatcttggaagcattagctctgataggtctataagtgtattaagggacatccttccatttcattagagcagcttaaaatgctcaggtgtctgccttctctggtgtttctttgggatctctgtttacccacttacgctggctccttctagacatttcttgccacttccccaactagaccactcctagtgattactgactttagtgcccacctttttggaaggttctggttggcttgttagaggagcatatgattagaattctgtttgggggtctagttgtcttggagcaagtatgtacttaactagccgagagatgctgcctctaggcagagaggaggagaggtgttgccggctggagggccaaccagtgaacaccagctgtgaaggccttgggagaggaggaacaggcccttgggcagatgcaggcattaccagcagggagcagacttacctccgaagatggagacaggtgactgagagctgcaggcctcctctgctcttccaaacacgtagcatttgcacccctccaaagccatctttgtaaaggaaaacgtatttgtaattgaatccagaagaatttagttacacatagacataactcttcaaccttaactatggcaatacatttgtgctttaactgttacatagcagtatcaccacttaccaggatccaaatcgaaataataaaagctgtctccatagtttaaaatcgaatagtgccatcatcacagtatattagtcaaatagaagcttcatcagaaatgtatcccacatagagttttaagacttggattctcttctgcccttgttaatctccaactaattactacagattgacacgtttttaattagctgtcctttgtaagaagtcaggaaatctgatgctgtgtccaaaattatgcactgtttgttgaagtagaaccagaaatcctgacctcctgttaaatgacatcagtttccccctctgagcaacagactgcttgtcttgctaggagaggaggatggggggctgagcactcaggctgtccattgaaaccccttgtccatgaatagggtcatactcctaagactgatggggtgttgatcttctaggacatcacttgtttattcagtgccccaaacacagatttctcttctagcactttagagttgatccttgaagtctctcctggttcattcaaatacaagctgtgtgagtctggtggttttctgtgattggtctaatgtgagctctttgaacagacagatctgacagtgaatgactctcccctgcttctggcataactgctttgcctctgtctagtgtccaagcatcttagctgttcaagaggagagggcagcataacttcctgaccaccggtgtcagatatcagagcattctggactcctgagaggcagtggcctcttgagtgaacaggggaggccagtagatgccccagatccagagccgtggctgcaaatccagcaggaataaggagggacaaccacagcctcctcatccatgtgtcatttccaagggtttgccttgtgtctcagctcattctgggcagcacgtttgtcttctgtccctagagatttgaaggattttggactcttgtgaatgggtgactggacttggctttacagagttgggtgcttttttctctctgcaattacctgtcatagcattttgtgctcaccacgaaggatggtctctgccttctcttgtcggtgtatgccatctgaacctaggaacacaaagtatattggcctcaaacggagacccagggttgccagttttccgtgggccttcccctcccttgaaatgtctttaattacctccccttcatcgtcaggccacgtgtgacttctgttcttagcactgccagggtcattgacttccatctaagcttgcatcaggaagatgttccttctgtgatcattggtactgaagccagaaaagctctcattcaggaactctgaagagcaaaaagggacaaacactaactgctgagctgggccatttgatctcctttcaccttgcattgctgtcacagcaccttgtatgatggcaggacaggctccagcagagagaactgcacagtgaccactgtatttttcacgctcttccagggatccctgtcccccgacattgaagagatctcattcaggccagagacacagagaccacatagcccagtgattaaaccccggtttcactctggccccaggagtggagcctggccactcctgtttggttctcactgggaggcccactggccttggatcatctcctcatgcacacccggagttttacctgcttgcttgctttcctggactgctgtttgcaagaaagtaactaaaacatgaaaagtaaacctccagcttccacagtatattacctgccgttgcatgcatttgaaagttagcctcctcccttgccaccgtcttggtggcagtagcgatgcaagaatgatgggagctttccgagagcgttcagtgtttcactgaagacaggacccatagccttcatttctggctctgtgtctcctctggcatatggacacatttcctggcatttgcctgagtctacaccactttttgagaacctgaaatagaagggaatcttctgtggcccacagtctccatattggccctagaagactggcctggcggaggaatttgcgttggcttgctttcaggggttagctacaagattcagctttatatctctgttgcttcttggccagtgtagtcaataagggtcttctttaacatctaagatagaggtttggttggccgggcgtggtcgcttactcctgtaatcccagcactttgggaggcccagtgaggtgggagaattgcttgaacccaggaggcagaggttgcagtgagctgagattgcaccactgcactccagcctgggtaacagagtgagactcttgtctcaaaaaaaaaaaaaaaaaaaatctaagatagaggtttggtcaacagtgcttaataataaataagaacctcctgccattctaattttcctgctgcaccccatcccccacacacccctcacgaacattgatataagcagtattaacacagtataaagaatgttcaccttgcatatgtcatttcaggcacatggattcaggagaagcacagttgagtggaagaaatggtagacttgtgaggcttgccccaggccttgtgtacacgcaataagtggtgagccatgggtctctccgtcagcgcctccctccccgaccacgttggccaacatcgggggtactctggaacaactatcacg

SEQ ID NO: 428387 - DNA, 824 bp, Homo sapiens
  misc_feature (821)..(821): n is a, c, g, or t
agtctgtatactttttggttgggcagatctccaccgggtactgatttggggttggggcttcttccatcacatagccttgctgggaaaaggaggagaacgggaattgtgtggggtggttatggccagccctgctgcgttcagcaggccctgttggcagaggtgtattcgccagaatcggggtgcttagcatccatccttggagtgtctaagcaaagggacatattcctggtctctgcacccaggcctggctatagctgagcaagtctacagtagacctttcccattggctcagctgttcagaaggagagctggacatctcttgttcttttccatttagccctcaatctgattggccctcgagctgtggatgtgctgtctgagttgtcctatgcccctatgactccagaccacttcccaagcctcttttgcaaggagatgagtgtgggctatgcaaatgggatccgggtgatgagcatgacgcacacaggagagccaggattcatgctctacatccccatagagtacgccctgcatgtatacaatgaagtgatgagtgttggccagaaatacggaatccggaatgctgggtattacgctcttcgcagtctccgaattgagaagttttttgccttctggggtcaggatataaataacctcaccacgcccctggaatgtggacgagagtctcgggtgaaattagagaagggcatggatttcattggtcgcgacgccctcctgcagcagaagcagaatggagtgtataaacgcctcaccatgttcatcctggactcatcatcaataaacactgttacagcaaaaanaaa

SEQ ID NO: 428388 - DNA, 996 bp, Homo sapiens
agtctgtatactttttggttgggcagatctccaccgggtactgatttggggttggggcttcttccatcacatagccttgctgggaaaaggaggagaacgggaattgtgtggggtggttatggccagccctgctgcgttcagcaggccctgttggcagaggtgtattcgccagaatcggggtgcttagcatccatccttggagtgtctaagcaaagggacatattcctggtctctgcacccaggcctggctatagctgagcaagtctacagtagacctttcccattggctcagctgttcagaaggagagctggacatctcttgttcttttccatttagccctcaatctgattggccctcgagctgtggatgtgctgtctgagttgtcctatgcccctatgactccagaccacttcccaagcctcttttgcaaggagatgagtgtgggctatgcaaatgggatccgggtgatgagcatgacgcacacaggagagccaggattcatgctctacatccccatagagtacgccctgcatgtatacaatgaagtgatgagtgttggccagaaatacggaatccggaatgctgggtattacgctcttcgcagtctccgaattgagaagttttttgccttctggggtcaggatataaataacctcaccacgcccctggaatgtggacgagagtctcgggtgaaattagagaagggcatggatttcattggtcgcgacgccctcctgcagcagaagcagaatggagtgtataaacgcctcaccatgttcatcctggacgaccatgattcagacctagacctttggccttggtggggagagcccatttaccggaatgggcagtatgttggcaagaccaccagcagtgcctacagctacagcctggagcgccacgtttgcctgggctttgtgcttttagagcttaagactgctgcagagtccggaggaagaggtcacctataagaatctgggacagggcagtaagct

SEQ ID NO: 428389 - DNA, 902 bp, Homo sapiens
agtctgtatactttttggttgggcagatctccaccgggtactgatttggggttggggcttcttccatcacatagccttgctgggaaaaggaggagaacgggaattgtgtggggtggttatggccagccctgctgcgttcagcaggccctgttggcagaggtgtattcgccagaatcggggtgcttagcatccatccttggagtgtctaagcaaagggacatattcctggtctctgcacccaggcctggctatagctgagcaagtctacagtagacctttcccattggctcagctgttcagaaggagagctggacatctcttgttcttttccatttagccctcaatctgattggccctcgagctgtggatgtgctgtctgagttgtcctatgcccctatgactccagaccacttcccaagcctcttttgcaaggagatgagtgtgggctatgcaaatgggatccgggtgatgagcatgacgcacacaggagagccaggattcatgctctacatccccatagagtacgccctgcatgtatacaatgaagtgatgagtgttggccagaaatacggaatccggaatgctgggtattacgctcttcgcagtctccgaattgagaagttttttgccttctggggtcaggatataaataacctcaccacgcccctggaatgtggacgagagtctcgggtgaaattagagaaggtactgtgtttacccagactccactttcactcagcatcccgagtagtgaatctgcactagactaggaagaagatctgatgtgacaggaaaagggggaaaagattgaggccttgatgttagcatcaggtaaatgaggacaagagtgccctgagaatgaaaactttataggataaaatatcttcaaatgaaccaccata

SEQ ID NO: 428390 - DNA, 883 bp, Homo sapiens
cttgcagtggagtaggtctgcaaatgttgtcacatgggaattggctgattgaattttctcaatgaggttcattgctggtggggccatgtggcccagccaggtgctctcacgctcactctctctgtttcattccctaaccctgcagtccactggggatcaggcattagaagttctacagtacctcttctccaatgacctggatgtgcctgtgggccacattgtgcatactggcatgctcaacgagggtggagggtatgaaaatgactgcagcatagcacgactgaacaagcgcagtttcttcatgatctctccaaccgaccagcaggtccactgttgggcctggcttaagaaacacatgccgaaagacagcaacctgctcctggaggacgtcacctggaagtacacagccctcaatctgattggccctcgagctgtggatgtgctgtctgagttgtcctatgcccctatgactccagaccacttcccaagcctcttttgcaaggagatgagtgtgggctatgcaaatgggatccgggtgatgagcatgacgcacacaggagagccaggattcatgctctacatccccatagagggcatggatttcattggtcgcgacgccctcctgcagcagaagcagaatggagtgtataaacgcctcaccatgttcatcctggacgaccatgattcagacctagacctttggccttggtggggagagcccatttaccggaatgggcagtatgttggcaagaccaccagcagtgcctacagctacagcctggagcgccacgtttgcctgggctttgtgcttttagagcttaagactgctgcagagtccggaggaagaggtcacctataagaatctgggacagggcagtaagct

SEQ ID NO: 428391 - DNA, 471 bp, Homo sapiens
tcaggacctggaagttaaccactttcgggatgaaattcttgccttgacgtctgtctccctcaacagtaaacagagggtgcagcactaatgaaaggtttccccaggcgtccctcccttgacaagtaatgtgagtgcccaggctgactgctgcctttgtccctgcaggagatgagtgtgggctatgcaaatgggatccgggtgatgagcatgacgcacacaggagagccaggattcatgctctacatccccatagaggtgagagggcacccttcccttcccttcccttcacttcccttcccttcccttcccttcccttcccacaaccactgtggggtgccagtgctcccagcagcgcgttcaccagcactggcaggtttggagagctgtatctgattgggccttgggagctgaggtaggctgcattgaagagatttgaccatttttaactaagttatataagtttttttgaat

SEQ ID NO: 428392 - DNA, 2819 bp, Homo sapiens
ggatgaggggtgaaatttaaaagctcctgaaaatgagtactgctgtgttgagcttttctttcctggggtatattaatttagttatatttagcagaagaggaatataaccaaatgtgactaaaatatagcagaaattcaggttgtttgtaaaaattttaataacaaatagcatttggcaagtctataggattcttcctatctggaaattctattttgttagagtgcgataggacatatggaaaaccaacacaaagtgctttagcattaaaactcaccatcaaatagatgtaatcttattaattacacattttgtattttaattatttcaaggagtgaagaaaacagggtgtttttgtttttgtagttctgattactcatttatgcattgttttgtttaagtaaattctgcctacaagtgaaaaggtcggtgcgctcttctgtgcaccatcctcacggtgctatttccgaatatctgaatattgatttctaacacctggatgaggctgtgaccgatcaacttggaacactgtaaaggttttcgaatgggatacgctgtaggcacgttttaagaagtattctgttcctaaagtccaggtatgattggattaatatttataaaattattattaggaattatttaagtggggccaggcatcttgcaacattttctgattttttttttctttctttctaatctcattttggtgatatttaaacaaacataaatgattgtaactttgcagcttttttatttaggtagctttaatttatttatgaaagttaatccatttctgatacgtggtttttaaaaatatgaaatggatttatatatactatattcctcaaatccactgtatgtggacttatattcattttctccttttttcggaattgaaacattttaatttcaaattcaaatagaacatttaaaatgatttcattattattacccatactgttgccactcatattgtaagtcagttttttcattgctggtacaatgactcagtatttctttataaaaatctgttgttctgaaaatcaacaaccttagaaggattttgtcttagaaaatttccttggctttagttttatatcatatttagaaaataataatgaaaagcatccccaaaatttcaatgatgtgaatttttaaattacctttatttctttaaactaattccattgattgttacttaaattttccacctggaatcatggatttaaaatttccccacctcatggggaaaaaactaacccagaagttcaaagcctttaaagtttcatctgattctggccttagaattgtccttaaaagctttctcctggccgataggaggaagcatatatcaaggaggttctttcccttcccattatcattttgtggcaagccttaagttaacaatgtgtctaccaagaacaattgagttttctaaaagtaataatgaagattatgcaattctaactgtagaagagatagctattaaaataatcagtagcctgggcatagtggctcacacctgtaatcccaatactttagaaggccaaggctggaggactgcttgagtccagaagtttaagaccagcctgggcaacacggggagaccctgtctctacaagaaattaaaaattagccaggcatagttggcacgtgcctgtagcaccagctacttgggaggttaaggtgggaggatcacttgagcctgggagatagaggcttgcagtgagccgtgatggcaccattgcactccaaccggggtgacagatgaggtcctctgtttacctccccccccaaaaaaaaaattcagtaggaattccttcatagaataacatgttatttattggtattgacttcttattagacagagctcatagtatttgttttctgctccgaacacttaaaaaatactaagacgtgatagtgaaaatagctttgaaaagaaactacatatggcaaaggtggggaggggggaagatgatgcattctgatcattataaagaatacttttcagggctctatcattttctccctttctctaatcatccagaatatggcgggtgtcccagtgttcaacagtatcatgctaatattccatttgatcggtagtccaagttctttggccagatagtgcaatgttgtgacaccgaccgaagcctttgttctggatctttcttcctattgaaggtggctgctggtggcttcataattttctgttttttttctcacaaagtaaatggtgggcatccatgtttacattgcaccttcccgtgctgtaattggcttgacaaagacaagcaggcttctctgttgagacttattgtgtttttagttttcatagacacttatttaatctttttaaattgtacagcaaggtgctctaagtaatattcgataaaatatatttaatagaaatttgcgtttgatattcatgaacatgaatacatgtatttttttaagaaataagtattgtgtaacactatggcattgcttctatagccaaagtataaaaatttctggaatactgacatgtaaagactacagttaattctgacactgtatcttattaaaataggatgatttgcattttgtaaaattatcctgcacatcaagctgcatgccttaaagcggaaactctaggactgtgttcatgggagagcagttcatctgttcagaacagtgaggcaaggtctgtagtgcttctttaactacctttggaaatactgtacaatgttagaataatttattttgctttacaggagtttgtcatgtattgactttaatattgtattttggtaataaattttttgttaaaaaaaac

SEQ ID NO: 428393 - DNA, 702 bp, Homo sapiens
attacataacttctttctagttaggaattaggacagtgtaagaaggccatctacaatcaagattgagagtggctctaacaagtgccatttttccttgttagctttcatttctcagccctttacaagattaaaatagtctgcagtttaatctctccaaagctttacggacagtgattctgtcctaaacaagacagtgactccaggatttctgaagactattgtggaagaagcatccattaaggccaagctataacatcagaaatggtgaatgaatacaagaaaattcttttgctgaaaggatttgagctcatggatgattatcattttacatcaattaagtccttactggcctatgatttaggactaactacaaaaatgcaagaggaatacaacagaattaagattacagatttgatggaaaaaaagttccaaggcgttgcctgtctagacaaactaatagaacttgccaaagatatgccatcacttaaaaaccttgttaacaatcttcgaaaagagaagtcaaaaggtaatagagaaaaccttgcacatagctactctgccttgagtctccccagtcttcagtagaaccccaccttggtcatagctggtacatcccttttccaatttataactcagcagtcatggggatgttggcacctcagagactgaccagttggcaatttagaacattctgtttcatat

SEQ ID NO: 428394 - DNA, 381 bp, Homo sapiens
attacataacttctttctagttaggaattaggacagtgtaagaaggccatctacaatcaagattgagagtggctctaacaagtgccatttttccttgttagctttcatttctcagccctttacaagattaaaatagtctgcagtttaatctctccaaagctttacggacagtgattctgtcctaaacaagacagtgactccagcctgggccacagagcaagactccatctcaaaaaaaaaaaaaaagaaatgattggtcttgggggccggggcggtggcttacgactgtaatcccagcactttgggaggccaaggcaggcagatcatgaggtgaggaattcgagaccagcctggccaacatggtgaaaccccatctctact

SEQ ID NO: 428395 - DNA, 1977 bp, Homo sapiens
attacataacttctttctagttaggaattaggacagtgtaagaaggccatctacaatcaagattgagagtggctctaacaagtgccatttttccttgttagctttcatttctcagccctttacaagattaaaatagtctgcagtttaatctctccaaagctttacggacagtgattctgtcctaaacaagacagtgactccaggatttctgaagactattgtggaagaagcatccattaaggccaagctataacatcagaaatggtgaatgaatacaagaaaattcttttgctgaaaggatttgagctcatggatgattatcattttacatcaattaagtccttactggcctatgatttaggactaactacaaaaatgcaagaggaatacaacagaattaagattacagatttgatggaaaaaaagttccaaggcgttgcctgtctagacaaactaatagaacttgccaaagatatgccatcacttaaaaaccttgttaacaatcttcgaaaagagaagtcaaaagttgctaagaaaattaaaacacaagaaaaagctccagtgaaaaaaataaaccaggaagaagtgggtcttgcggcacctgcacccaccgcaagaaacaaactgacatcggaagcaagagggaggattcctgtagctcagaaaagaaaaactccaaacaaagaaaagactgaagccaaaaggaataaggtgtcccaagagcagagtaagcccccaggtccctcaggagccagcacatctgcagctgtggatcatcccccactaccccagacctcatcatcaactccatccaacacttcgtttactccgaatcaggaaacccaggcccaacggcaggtggatgcaagaagaaatgttccccaaaacgacccagtgacagtggtggtactgaaagcaacagcgccatttaaatacgagtccccagaaaatgggaaaagcacaatgtttcatgctacagtggccagtaagactcaatatttccatgtgaaagtcttcgacatcaacttgaaagagaaatttgtaaggaagaaggtcattaccatatctgattactctgaatgtaaaggagtaatggaaataaaggaagcatcatctgtgtctgactttaatcaaaattttgaggtcccaaacagaattatcgaaatagcaaataaaactcccaagatcagtcaactttacaagcaagcatctggaacaatggtgtatgggttgtttatgttacaaaagaaaagcgtacacaagaagaacacaatttatgaaatacaggataatacaggatccatggatgtagtggggagtggaaaatggcacaatatcaagtgtgagaaaggagataaacttcgactcttctgccttcaactgagaacagttgaccgcaagctgaaactggtgtgtggaagtcacagcttcatcaaggtcatcaaggccaagaaaaacaaggaaggaccaatgaatgttaattgaaatatgaaagctgaaatgcaacaaacaacttccgcttaaaacaattaagttgttaataactgtgattttgtaaatttcagtaattcatttaaatgatgtttcagtagatatattctagcatattaagagcttttataactgagttatagattagtttgctttctggaataaaattttcttcttatactcaaaaaaaaaaaaaaagaaaaaaaaaagaaaaaaaggaaaaaaaaaaaaaaaaaaaaaaaaaaagaaaaaaaagaagggggggggggcataaaagaagaaccacgaaggggagcacaaaaaataggcaagaccaagcagatcagtgaaaaaaaagagggccaaataaaagaggcgcgcaaaaataagaaaaagaagcagaggcagtaaaaacaacgaaggaagagaaaaaaagaagaaagaaggaaaacgtggagagggaaaccacaacacagggaggggaaaaaaaacgggcagacaaaaact

SEQ ID NO: 428396 - DNA, 1710 bp, Homo sapiens
attacataacttctttctagttaggaattaggacagtgtaagaaggccatctacaatcaagattgagagtggctctaacaagtgccatttttccttgttagctttcatttctcagccctttacaagattaaaatagtctgcagtttaatctctccaaagctttacggacagtgattctgtcctaaacaagacagtgactccaggatttctgaagactattgtggaagaagcatccattaaggccaagctataacatcagaaatggtgaatgaatacaagaaaattcttttgctgaaaggatttgagctcatggatgattatcattttacatcaattaagtccttactggcctatgatttaggactaactacaaaaatgcaagaggaatacaacagaattaagattacagatttgatggaaaaaaagttccaaggcgttgcctgtctagacaaactaatagaacttgccaaagatatgccatcacttaaaaaccttgttaacaatcttcgaaaagagaagtcaaaagttgctaagaaaattaaaacacaagaaaaagctccagtgaaaaaaataaaccaggaagaagtgggtcttgcggcacctgcacccaccgcaagaaacaaactgacatcggaagcaagagggaggattcctgtagctcagaaaagaaaaactccaaacaaagaaaagactggagccagcacatctgcagctgtggatcatcccccactaccccagacctcatcatcaactccatccaacacttcgtttactccgaatcaggaaacccaggcccaacggcaggtggatgcaagaagaaatgttccccaaaacgacccagtgacagtggtggtactgaaagcaacagcgccatttaaatacgagtccccagaaaatgggaaaagcacaatgtttcatgctacagtggccagtaagactcaatatttccatgtgaaagtcttcgacatcaacttgaaagagaaatttgtaaggaagaaggtcattaccatatctgattactctgaatgtaaaggagtaatggaaataaaggaagcatcatctgtgtctgactttaatcaaaattttgaggtcccaaacagaattatcgaaatagcaaataaaactcccaagatcagtcaactttacaagcaagcatctggaacaatggtgtatgggttgtttatgttacaaaagaaaagcgtacacaagaagaacacaatttatgaaatacaggataatacaggatccatggatgtagtggggagtggaaaatggcacaatatcaagtgtgagaaaggagataaacttcgactcttctgccttcaactgagaacagttgaccgcaagctgaaactggtgtgtggaagtcacagcttcatcaaggtcatcaaggccaagaaaaacaaggaaggaccaatgaatgttaattgaaatatgaaagctgaaatgcaacaaacaacttccgcttaaaacaattaagttgttaataactgtgattttgtaaatttcagtaattcatttaaatgatgtttcagtagatatattctagcatattaagagcttttataactgagttatagattagtttgctttctggaataaaattttcttcttatactcttccttttttttagatattacattttgcttttatgacattcacgaggcaaaaaataaaatatctttttttgaaggacattaaaaaacaaa

SEQ ID NO: 428397 - DNA, 1764 bp, Homo sapiens
attacataacttctttctagttaggaattaggacagtgtaagaaggccatctacaatcaagattgagagtggctctaacaagtgccatttttccttgttagctttcatttctcagccctttacaagattaaaatagtctgcagtttaatctctccaaagctttacggacagtgattctgtcctaaacaagacagtgactccaggatttctgaagactattgtggaagaagcatccattaaggccaagctataacatcagaaatggtgaatgaatacaagaaaattcttttgctgaaaggatttgagctcatggatgattatcattttacatcaattaagtccttactggcctatgatttaggactaactacaaaaatgcaagaggaatacaacagaattaagattacagatttgatggaaaaaaagttccaaggcgttgcctgtctagacaaactaatagaacttgccaaagatatgccatcacttaaaaaccttgttaacaatcttcgaaaagagaagtcaaaagttgctaagaaaattaaaacacaagaaaaagctccagtgaaaaaaataaaccaggaagaagtgggtcttgcggcacctgcacccaccgcaagaaacaaactgacatcggaagcaagagggaggattcctgtagctcagaaaagaaaaactccaaacaaagaaaagactgaagccaaaaggaataaggtgtcccaagagcagagtaagcccccaggtccctcaggagccagcacatctgcagctgtggatcatcccccactaccccagacctcatcatcaactccatccaacacttcgtttactccgaatcaggaaacccaggcccaacggcaggtggatgcaagaagaaatgttccccaaaacgacccagtgacagtggtggtactgaaagcaacagcgccatttaaatacgagtccccagaaaatgggaaaagcacaatgtttcatgctacagtggccagtaagactcaatatttccatgtgaaagtcttcgacatcaacttgaaagagaaatttgtaaggaagaaggtcattaccatatctgattactctgaatgtaaaggagtaatggaaataaaggaagcatcatctgtgtctgactttaatcaaaattttgaggtcccaaacagaattatcgaaatagcaaataaaactcccaagatcagtcaactttacaagcaagcatctggaacaatggtgtatgggttgtttatgttacaaaagaaaagcgtacacaagaagaacacaatttatgaaatacaggataatacaggatccatggatgtagtggggagtggaaaatggcacaatatcaagtgtgagaaaggagataaacttcgactcttctgccttcaactgagaacagttgaccgcaagctgaaactggtgtgtggaagtcacagcttcatcaaggtcatcaaggccaagaaaaacaaggaaggaccaatgaatgttaattgaaatatgaaagctgaaatgcaacaaacaacttccgcttaaaacaattaagttgttaataactgtgattttgtaaatttcagtaattcatttaaatgatgtttcagtagatatattctagcatattaagagcttttataactgagttatagattagtttgctttctggaataaaattttcttcttatactcttccttttttttagatattacattttgcttttatgacattcacgaggcaaaaaataaaatatctttttttgaaggacattaaaaaacaaa

SEQ ID NO: 428398 - DNA, 1737 bp, Homo sapiens
attacataacttctttctagttaggaattaggacagtgtaagaaggccatctacaatcaagattgagagtggctctaacaagtgccatttttccttgttagctttcatttctcagccctttacaagattaaaatagtctgcagtttaatctctccaaagctttacggacagtgattctgtcctaaacaagacagtgactccaggatttctgaagactattgtggaagaagcatccattaaggccaagctataacatcagaaatggtgaatgaatacaagaaaattcttttgctgaaaggatttgagctcatggatgattatcattttacatcaattaagtccttactggcctatgatttaggactaactacaaaaatgcaagaggaatacaacagaattaagattacagatttgatggaaaaaaagttccaaggcgttgcctgtctagacaaactaatagaacttgccaaagatatgccatcacttaaaaaccttgttaacaatcttcgaaaagagaagtcaaaagttgctaagaaaattaaaacacaagaaaaagctccagtgaaaaaaataaaccaggaagaagtgggtcttgcggcacctgcacccaccgcaagaaacaaactgacatcggaagcaagagggaggattcctgtagctcagaaaagaaaaactccaaacaaagaaaagactgaagccaaaaggaataaggtgtcccaagagcagagtaagcccccaggtccctcaggagccagcacatctgcagctgtggatcatcccccactaccccagacctcatcatcaactccatccaacacttcgtttactccgaatcaggaaacccaggcccaacggcaggtggatgcaagaagaaatgttccccaaaacgacccagtgacagtggtggtactgaaagcaacagcgccatttaaatacgagtccccagaaaatgggaaaagcacaatgtttcatgctacagtggccagtaagactcaatatttccatgtgaaagtcttcgacatcaacttgaaagagaaatttgtaaggaagaaggtcattaccatatctgattactctgaatgtaaaggagtaatggaaataaaggaagcatcatctgtgtctgactttaatcaaaattttgaggtcccaaacagaattatcgaaatagcaaataaaactcccaagatcagtcaactttacaagcaagcatctggaacaatggtgtatgggttgtttatgttacaaaagaaaagcgtacacaagaagaacacaatttatgaaatacaggataatacaggatccatggatgtagtggggagtggaaaatggcacaatatcaagtgtgagaaaggagataaacttcgactcttctgccttcaactgagaacagttgaccgcaagctgaaactggtcatcaaggccaagaaaaacaaggaaggaccaatgaatgttaattgaaatatgaaagctgaaatgcaacaaacaacttccgcttaaaacaattaagttgttaataactgtgattttgtaaatttcagtaattcatttaaatgatgtttcagtagatatattctagcatattaagagcttttataactgagttatagattagtttgctttctggaataaaattttcttcttatactcttccttttttttagatattacattttgcttttatgacattcacgaggcaaaaaataaaatatctttttttgaaggacattaaaaaacaaa

SEQ ID NO: 428399 - DNA, 1266 bp, Homo sapiens
attacataacttctttctagttaggaattaggacagtgtaagaaggccatctacaatcaagattgagagtggctctaacaagtgccatttttccttgttagctttcatttctcagccctttacaagattaaaatagtctgcagtttaatctctccaaagctttacggacagtgattctgtcctaaacaagacagtgactccaggatttctgaagactattgtggaagaagcatccattaaggccaagctataacatcagaaatggtgaatgaatacaagaaaattcttttgctgaaaggatttgagctcatggatgattatcattttacatcaattaagtccttactggcctatgatttaggactaactacaaaaatgcaagaggaatacaacagaattaagattacagatttgatggaaaaaaagttccaaggcgttgcctgtctagacaaactaatagaacttgccaaagatatgccatcacttaaaaaccttgttaacaatcttcgaaaagagaagtcaaaagttgctaagaaaattaaaacacaagaaaaagctccagtgaaaaaaataaaccaggaagaagtgggtcttgcggcacctgcacccaccgcaagaaacaaactgacatcggaagcaagagggaggattcctgtagctcagaaaagaaaaactccaaacaaagaaaagactgaagccaaaaggaataaggtgtcccaagagcagagtaagcccccaggtccctcaggagccagcacatctgcagctgtggatcatcccccactaccccagacctcatcatcaactccatccaacacttcgtttactccgaatcaggaaacccaggcccaacggcaggtggatgcaagaagaaatgttccccaaaacgacccagtgacagtggtggtactgaaagcaacagcgccatttaaatacgagtccccagaaaatgggaaaagcacaatgtttcatgctacagtggccagtaagactcaatatttccatgtgaaagtcttcgacatcaacttgaaagagaaatttgtaaggaagaaggtcattaccatatctgattactctgaatgtaaaggagtaatggaaataaaggaagcatcatctgtgtctgactttaatcaaaattttgaggtcccaaacagaattatcgaaatagcaaataaaactcccaagatcagtcaactttacaagcaagcatctgggtcagatgttgccatctgggtcagatgttgccatctgggtcagatgttgcca

SEQ ID NO: 428400 - DNA, 779 bp, Homo sapiens
gtaataaattgtgacttgtagctttaacaaaaattaggttccctagttgcagctgccagggaaagctagtctaatatcaaagcaaaccatccttcttctcaagcacagagtttttaagataggagtgtgtgtgtattgacattttcctagcagtggctgaagtcaaggaccaggagatttagggcccacttggagttcttatggtgaaacagtagtagcttcctagagacctttaaagcttatctgtaatttgtatagttcagaagatactgtatacatcattatttctccctgctttcaaaacagggaagggggtgtgggagagtaacacactaaaaaaagggataagtaattaatttctggggatttacaggcgtgagccaccgcgcccggccgcatcctaggtaattcttatgcatgatacaggttgagaccagtgccatgtacagaagtgggaaaaatggcttatgaaactcagttgtatttagcacactgtgttagacataaaatttgaaaacccaacctggacaacacagtgagacccagtctctactaaaataaaataaataagtgaacattgaaaaccaatggatagtagaatgtattcagttcagtgagacatgaaacaatatttttgcttaattgaatcaaacatatgttaaaaaaaaaaaaaaaactcaccctactcccaaagcactcaataaattcttcagagaaaaggaagagctttttgtactacattgcctctaaaatcttctgtaggataagacattttaaga

SEQ ID NO: 428401 - DNA, 434 bp, Homo sapiens
ataggagtgtgtgtgtattgacattttcctagcagtggctgaagtcaaggaccaggagatttagggcccacttggagttcttatggtgaaacagtagtagcttcctagagacctttaaagcttatctgtaatttgtatagttcagaagatactgtatacatcattatttctccctgctttcaaaacagggaagggggtgtgggagagtaacacactaaaaaaagggataagtaattaatttctgggtaagaatttccttttggcttaaaatggactgatggtgtaagttcctccctttgcaagcagaagctttgaagatagtgagctagatgaagctctggacatcttgaatgaagtattctgtataagaaccaagtgtataataactgttagtaatagaggctgctcatagaaatgtcattgcattataattg

SEQ ID NO: 428402 - DNA, 401 bp, Homo sapiens
cgcggccgcgagtgccggcagctggcactgcccgcaccgggcaggcaccgggcgggaagagagagcgccctgcggctgccagctggctccaaggccgggtccagagccgggcgggacggccgcgacgggcgcattcgggtgggggctcatcaccgcccagccggcgtggggagccgggccctcttgagatgaggcgtgcgggagggtcctgagcactttagctcgcctaggatttgagctggggtgtgtgtctgctcccagctcaagtccctccgagtgccagagaggaaggcagggagaagcggagcacccctctttgggccaaggccaaggaggactgtggtgagcagtatggcttgtgaccgggtggggtctcccaggtagtagggggcgccaggaag

SEQ ID NO: 428403 - DNA, 1309 bp, Homo sapiens
cttttcccggcacatgcgcaccgcagcgggtcgcgcgccctaaggagtggcactttttaaaagtgcagccggagaccagcctacagccgcctgcatctgtatccagcgccaggtcccgccagtcccagctgcgcgcgccccccagtcccgcacccgttcggcccaggctaagttagccctcaccatgccggtcaaaggaggcaccaagtgcatcaaatacctgctgttcggatttaacttcatcttctggcttgccgggattgctgtccttgccattggactatggctccgattcgactctcagaccaagagcatcttcgagcaagaaactaataataataattccagcttctacacaggagtctatattctgatcggagccggcgccctcatgatgctggtgggcttcctgggctgctgcggggctgtgcaggagtcccagtgcatgctgggactgttcttcggcttcctcttggtgatattcgccattgaaatagctgcggccatctggggatattcccacaaggatgaggtgattaaggaagtccaggagttttacaaggacacctacaacaagctgaaaaccaaggatgagccccagcgggaaacgctgaaagccatccactatgcgttgaactgctgtggtttggctgggggcgtggaacagtttatctcagacatctgccccaagaaggacgtactcgaaaccttcaccgtgaagtcctgtcctgatgccatcaaagaggtcttcgacaataaattccacatcatcggcgcagtgggcatcggcattgccgtggtcatgatatttggcatgatcttcagtatgatcttgtgctgtgctatccgcaggaaccgcgagatggtctagagtcagcttacatccctgagcaggaaagtttacccatgaagattggtgggattttttgtttgtttgttttgttttgtttgttgtttgttgtttgtttttttgccactaattttagtattcattctgcattgctagataaaagctgaagttactttatgtttgtcttttaatgcttcattcaatattgacatttgtagttgagcggggggtttggtttgctttggtttatattttttcagttgtttgtttttgcttgttatattaagcagaaatcctgcaatgaaaggtactatatttgctagactctagacaagatattgtacataaaagaatttttttgtctttaaatagatacaaatgtctatcaactttaatcaagttgtaacttatattgaagacaatttgatacataataaaaaattatgacaatgtcctgga

SEQ ID NO: 428404 - DNA, 1665 bp, Homo sapiens
cttttcccggcacatgcgcaccgcagcgggtcgcgcgccctaaggagtggcactttttaaaagtgcagccggagaccagcctacagccgcctgcatctgtatccagcgccaggtcccgccagtcccagctgcgcgcgccccccagtcccgcacccgttcggcccaggctaagttagccctcaccatgccggtcaaaggaggcaccaagtgcatcaaatacctgctgttcggatttaacttcatcttctggcttgccgggattgctgtccttgccattggactatggctccgattcgactctcagaccaagagcatcttcgagcaagaaactaataataataattccagcttctacacaggagtctatattctgatcggagccggcgccctcatgatgctggtgggcttcctgggctgctgcggggctgtgcaggagtcccagtgcatgctgggactgttcttcggcttcctcttggtgatattcgccattgaaatagctgcggccatctggggatattcccacaaggatgaggtgattaaggaagtccaggagttttacaaggacacctacaacaagctgaaaaccaaggatgagccccagcgggaaacgctgaaagccatccactatgcgttgaactgctgtggtttggctgggggcgtggaacagtttatctcagacatctgccccaagaaggacgtactcgaaaccttcaccgtgaagtcctgtcctgatgccatcaaagaggtcttcgacaataaattccacatcatcggcgcagtgggcatcggcattgccgtggtcatgatatttggcatgatcttcagtatgatcttgtgctgtgctatccgcaggaaccgcgagatggtctagagtcagcttacatccctgagcaggaaagtttacccatgaagattggtgggattttttgtttgtttgttttgttttgtttgttgtttgttgtttgtttttttgccactaattttagtattcattctgcattgctagataaaagctgaagttactttatgtttgtcttttaatgcttcattcaatattgacatttgtagttgagcggggggtttggtttgctttggtttatattttttcagttgtttgtttttgcttgttatattaagcagaaatcctgcaatgaaaggtactatatttgctagactctagacaagatattgtacataaaagaatttttttgtctttaaatagatacaaatgtctatcaactttaatcaagttgtaacttatattgaagacaatttgatacataataaaaaattatgacaatgtcctggaaaaaaaaaaaaaaaaaaaaaaaaaaaaggggggggggggaaaaaaaccccgggggggccatggccccttttgtgcaaggggggccccaacgagggacgctaaaaaagccagcggggccgggaaacccggcgggccggcaacatcgcgtcggctccgggaggacccctccttcgggggccataggggccccccgagaataagccgggaaaaaactcgcgttgcggggaccccgctctcgggggaatccgcgtaataataggacgccaccaaacacccccgcccccctggccaccgcacgaccatcccacgacaccacccagcgacacgcacgcaacacaaccaaagcggcttacggc

SEQ ID NO: 428405 - DNA, 1514 bp, Homo sapiens
  misc_feature (1359)..(1359): n is a, c, g, or t
cttttcccggcacatgcgcaccgcagcgggtcgcgcgccctaaggagtggcactttttaaaagtgcagccggagaccagcctacagccgcctgcatctgtatccagcgccaggtcccgccagtcccagctgcgcgcgccccccagtcccgcacccgttcggcccaggctaagttagccctcaccatgccggtcaaaggaggcaccaagtgcatcaaatacctgctgttcggatttaacttcatcttctggcttgccgggattgctgtccttgccattggactatggctccgattcgactctcagaccaagagcatcttcgagcaagaaactaataataataattccagcttctacacaggagtctatattctgatcggagccggcgccctcatgatgctggtgggcttcctgggctgctgcggggctgtgcaggagtcccagtgcatgctgggactgttcttcggcttcctcttggtgatattcgccattgaaatagctgcggccatctggggatattcccacaaggatgaggtgattaaggaagtccaggagttttacaaggacacctacaacaagctgaaaaccaaggatgagccccagcgggaaacgctgaaagccatccactatgcgttgaactgctgtggtttggctgggggcgtggaacagtttatctcagacatctgccccaagaaggacgtactcgaaaccttcaccgtgaagtcctgtcctgatgccatcaaagaggtcttcgacaataaattccacatcatcggcgcagtgggcatcggcattgccgtggtcatgatatttggcatgatcttcagtatgatcttgtgctgtgctatccgcaggaaccgcgagatggtctagagtcagcttacatccctgagcaggaaagtttacccatgaagattggtgggattttttgtttgtttgttttgttttgtttgttgtttgttgtttgtttttttgccactaattttagtattcattctgcattgctagataaaagctgaagttactttatgtttgtcttttaatgcttcattcaatattgacatttgtagttgagcggggggtttggtttgctttggtttatattttttcagttgtttgtttttgcttgttatattaagcagaaatcctgcaatgaaaggtactatatttgctagactctagacaagatattgtacataaaagaatttttttgtctttaaatagatacaaatgtctatcaactttaatcaagttgtaacttatattgaagacaatttgatacataataaaaaattatgacaatgtcctggaaaaaaaaaaaaaaaaaaaaaaaaaaaagggggggggtaagggtcctggtngggggttgggcagaagaatgtgttttaagttgcctgtggcccaaaagccggggggaaggggggggttgggggaaaattttggtatgaatgtctgtgtgaaaaggcggtctgtgcagactattccatttggtccacaacaacaaaaacaaaaaagg

SEQ ID NO: 428406 - DNA, 1504 bp, Homo sapiens
  misc_feature (1349)..(1349): n is a, c, g, or t
cttttcccggcacatgcgcaccgcagcgggtcgcgcgccctaaggagtggcactttttaaaagtgcagccggagaccagcctacagccgcctgcatctgtatccagcgccaggtcccgccagtcccagctgcgcgcgccccccagtcccgcacccgttcggcccaggctaagttagccctcaccatgccggtcaaaggaggcaccaagtgcatcaaatacctgctgttcggatttaacttcatcttctggcttgccgggattgctgtccttgccattggactatggctccgattcgactctcagaccaagagcatcttcgagcaagaaactaataataataattccagcttctacacaggagtctatattctgatcggagccggcgccctcatgatgctggtgggcttcctgggctgctgcggggctgtgcaggagtcccagtgcatgctgggactgttcttcggcttcctcttggtgatattcgccattgaaatagctgcggccatctggggatattcccacaaggatgaggtgattaaggaagtccaggagttttacaaggacacctacaacaagctgaaaaccaaggatgagccccagcgggaaacgctgaaagccatccactatgcgttgaactgctgtggtttggctgggggcgtggaacagtttatctcagacatctgccccaagaaggacgtactcgaaaccttcaccgtgaagtcctgtcctgatgccatcaaagaggtcttcgacaataaattccacatcatcggcgcagtgggcatcggcattgccgtggtcatgatatttggcatgatcttcagtatgatcttgtgctgtgctatccgcaggaaccgcgagatggtctagagtcagcttacatccctgagcaggaaagtttacccatgaagattggtgggattttttgtttgtttgttttgttttgtttgttgtttgttgtttgtttttttgccactaattttagtattcattctgcattgctagataaaagctgaagttactttatgtttgtcttttaatgcttcattcaatattgacatttgtagttgagcggggggtttggtttgctttggtttatattttttcagttgtttgtttttgcttgttatattaagcagaaatcctgcaatgaaaggtactatatttgctagactctagacaagatattgtacataaaagaatttttttgtctttaaatagatacaaatgtctatcaactttaatcaagttgtaacttatattgaagacaatttgatacataataaaaaattatgacaatgtcctggaaaaaaaaaaaaaaaaagaggctggtgtaagggtcctggtngggggttgggcagaagaatgtgttttaagttgcctgtggcccaaaagccggggggaaggggggggttgggggaaaattttggtatgaatgtctgtgtgaaaaggcggtctgtgcagactattccatttggtccacaacaacaaaaacaaaaaagg

SEQ ID NO: 428407 - DNA, 1183 bp, Homo sapiens
cttttcccggcacatgcgcaccgcagcgggtcgcgcgccctaaggagtggcactttttaaaagtgcagccggagaccagcctacagccgcctgcatctgtatccagcgccaggtcccgccagtcccagctgcgcgcgccccccagtcccgcacccgttcggcccaggctaagttagccctcaccatgccggtcaaaggaggcaccaagtgcatcaaatacctgctgttcggatttaacttcatcttctggcttgccgggattgctgtccttgccattggactatggctccgattcgactctcagaccaagagcatcttcgagcaagaaactaataataataattccagcttctacacaggagtctatattctgatcggagccggcgccctcatgatgctggtgggcttcctgggctgctgcggggctgtgcaggagtcccagtgcatgctgggactgttcttcggcttcctcttggtgatattcgccattgaaatagctgcggccatctggggatattcccacaaggatgaggtgattaaggaagtccaggagttttacaaggacacctacaacaagctgaaaaccaaggatgagccccagcgggaaacgctgaaagccatccactatgcgttgaactgctgtggtttggctgggggcgtggaacagtttatctcagacatctgccccaagaaggacgtactcgaaaccttcaccgtgaagtcctgtcctgatgccatcaaagaggtcttcgacaataaattccacatcatcggcgcagtgggcatcggcattgccgtggtcatgatatttggcatgatcttcagtatgatcttgtgctgtgctatccgcaggaaccgcgagatggtctagagtcagcttacatccctgagcaggaaagtttacccatgaagattggtgggattttttgtttgtttgttttgttttgtttgttgtttttgcactaatttagtattcattcggatggtagataaagctgagtacttatgttgtctttatggtcatcatatgacttggtgtgaggggggggggagtggtaatttcagggggtgtggaattagcgaaacgagagggcaattgtaatttgaagatgtgtaagatttggttagaaaaggttaccgggttggagggtaaaattggggaaaaacggtttgggggaggggt

SEQ ID NO: 428408 - DNA, 1056 bp, Homo sapiens
cttttcccggcacatgcgcaccgcagcgggtcgcgcgccctaaggagtggcactttttaaaagtgcagccggagaccagcctacagccgcctgcatctgtatccagcgccaggtcccgccagtcccagctgcgcgcgccccccagtcccgcacccgttcggcccaggctaagttagccctcaccatgccggtcaaaggaggcaccaagtgcatcaaatacctgctgttcggatttaacttcatcttctggcttgccgggattgctgtccttgccattggactatggctccgattcgactctcagaccaagagcatcttcgagcaagaaactaataataataattccagcttctacacaggagtctatattctgatcggagccggcgccctcatgatgctggtgggcttcctgggctgctgcggggctgtgcaggagtcccagtgcatgctgggactgttcttcggcttcctcttggtgatattcgccattgaaatagctgcggccatctggggatattcccacaaggatgaggtgattaaggaagtccaggagttttacaaggacacctacaacaagctgaaaaccaaggatgagccccagcgggaaacgctgaaagccatccactatgcgttgaactgctgtggtttggctgggggcgtggaacagtttatctcagacatctgccccaagaaggacgtactcgaaaccttcaccgtgaagtcctgtcctgatgccatcaaagaggtcttcgacaataaattccacatcatcggcgcagtgggcatcggcattgccgtggtcatgatatttggcatgatcttcagtatgatcttgtgctgtgctatccgcaggaaccgcgagatggtctagagtcagcttacatccctgagcaggaaagtttacccatgaagattggtgggattttttgtttgtttgttttgttttgtttgttgttttggggggtttttttttttttttttttttggggggggggggggggaggacagtgttttaatcgggggaaaaagggggagggaagggggcggccgcacccc

SEQ ID NO: 428409 - DNA, 975 bp, Homo sapiens
cttttcccggcacatgcgcaccgcagcgggtcgcgcgccctaaggagtggcactttttaaaagtgcagccggagaccagcctacagccgcctgcatctgtatccagcgccaggtcccgccagtcccagctgcgcgcgccccccagtcccgcacccgttcggcccaggctaagttagccctcaccatgccggtcaaaggaggcaccaagtgcatcaaatacctgctgttcggatttaacttcatcttctggcttgccgggattgctgtccttgccattggactatggctccgattcgactctcagaccaagagcatcttcgagcaagaaactaataataataattccagcttctacacaggagtctatattctgatcggagccggcgccctcatgatgctggtgggcttcctgggctgctgcggggctgtgcaggagtcccagtgcatgctgggactgttcttcggcttcctcttggtgatattcgccattgaaatagctgcggccatctggggatattcccacaaggatgaggtgattaaggaagtccaggagttttacaaggacacctacaacaagctgaaaaccaaggatgagccccagcgggaaacgctgaaagccatccactatgcgttgaactgctgtggtttggctgggggcgtggaacagtttatctcagacatctgccccaagaaggacgtactcgaaaccttcaccgtgaagtcctgtcctgatgccatcaaagaggtcttcgacaataaattccacatcatcggcgcagtgggcatcggcattgccgtggtcatgatatttggcatgatcttcagtatgatcttgtgctgtgctatccgcaggaaccgcgagatggtctagagtcagcttacatccctgagcaggaaagtttacccatgaagattggtgggattttttgtcgaagacctctttgatggcatcaggacaggacttcacggtcgacg

SEQ ID NO: 428410 - DNA, 1258 bp, Homo sapiens
cttttcccggcacatgcgcaccgcagcgggtcgcgcgccctaaggagtggcactttttaaaagtgcagccggagaccagcctacagccgcctgcatctgtatccagcgccaggtcccgccagtcccagctgcgcgcgccccccagtcccgcacccgttcggcccaggctaagttagccctcaccatgccggtcaaaggaggcaccaagtgcatcaaatacctgctgttcggatttaacttcatcttctggcttgccgggattgctgtccttgccattggactatggctccgattcgactctcagaccaagagcatcttcgagcaagaaactaataataataattccagcttctacacaggagtctatattctgatcggagccggcgccctcatgatgctggtgggcttcctgggctgctgcggggctgtgcaggagtcccagtgcatgctgggactgttcttcggcttcctcttggtgatattcgccattgaaatagctgcggccatctggggatattcccacaaggatgaggtgattaaggaagtccaggagttttacaaggacacctacaacaagctgaaaaccaaggatgagccccagcgggaaacgctgaaagccatccactatgcgttgaactgctgtggtttggctgggggcgtggaacagtttatctcagacatctgccccaagaaggacgtactcgaaaccttcaccgtgaagtcctgtcctgatgccatcaaagaggtcttcgacaataaattccacatcatcggcgcagtgggcatcggcattgccgtggtcatgatatttggcatgatcttcagtatgatcttgtgctgtgctatccgcaggaaccgcgagatggtctagatttttgtttgtttgttttgttttgtttgttgtttgttgtttgtttttttgccactaattttagtattcattctgcattgctagataaaagctgaagttactttatgtttgtcttttaatgcttcattcaatattgacatttgtagttgagcggggggtttggtttgctttggtttatattttttcagttgtttgtttttgcttgttatattaagcagaaatcctgcaatgaaaggtactatatttgctagactctagacaagatattgtacataaaagaatttttttgtctttaaatagatacaaatgtctatcaactttaatcaagttgtaacttatattgaagacaatttgatacataataaaaaattatgacaatgtcctgga

SEQ ID NO: 428411 - DNA, 903 bp, Homo sapiens
cttttcccggcacatgcgcaccgcagcgggtcgcgcgccctaaggagtggcactttttaaaagtgcagccggagaccagcctacagccgcctgcatctgtatccagcgccaggtcccgccagtcccagctgcgcgcgccccccagtcccgcacccgttcggcccaggctaagttagccctcaccatgccggtcaaaggaggcaccaagtgcatcaaatacctgctttgaactgctgtggtttggctgggggcgtggaacagtttatctcagacatctgccccaagaaggacgtactcgaaaccttcaccgtgaagtcctgtcctgatgccatcaaagaggtcttcgacaataaattccacatcatcggcgcagtgggcatcggcattgccgtggtcatgatatttggcatgatcttcagtatgatcttgtgctgtgctatccgcaggaaccgcgagatggtctagagtcagcttacatccctgagcaggaaagtttacccatgaagattggtgggattttttgtttgtttgttttgttttgtttgttgtttgttgtttgtttttttgccactaattttagtattcattctgcattgctagataaaagctgaagttactttatgtttgtcttttaatgcttcattcaatattgacatttgtagttgagcggggggtttggtttgctttggtttatattttttcagttgtttgtttttgcttgttatattaagcagaaatcctgcaatgaaaggtactatatttgctagactctagacaagatattgtacataaaagaatttttttgtctttaaatagatacaaatgtctatcaactttaatcaagttgtaacttatattgaagacaatttgatacataataaaaaattatgacaatgtcctgga

SEQ ID NO: 428412 - DNA, 661 bp, Homo sapiens
aaacagaggaggaagaggaggaggaaggaggggaggagaggagggggaataggagaagaaaaggagagaaggctcctgtcctgatgccatcaaagaggtcttcgacaataaattccacatcatcggcgcagtgggcatcggcattgccgtggtcatgatatttggcatgatcttcagtatgatcttgtgctgtgctatccgcaggaaccgcgagatggtctagagtcagcttacatccctgagcaggaaagtttacccatgaagattggtgggattttttgtttgtttgttttgttttgtttgttgtttgttgtttgtttttttgccactaattttagtattcattctgcattgctagataaaagctgaagttactttatgtttgtcttttaatgcttcattcaatattgacatttgtagttgagcggggggtttggtttgctttggtttatattttttcagttgtttgtttttgcttgttatattaagcagaaatcctgcaatgaaaggtactatatttgctagactctagacaagatattgtacataaaagaatttttttgtctttaaatagatacaaatgtctatcaactttaatcaagttgtaacttatattgaagacaatttgatacataataaaaaattatgacaatgtcctgga

SEQ ID NO: 428413 - DNA, 645 bp, Homo sapiens
atggcatcaggacaggacttcacggtgaaggtttcgagtacgtccttcttggggcagtcctgtcctgatgccatcaaagaggtcttcgacaataaattccacatcatcggcgcagtgggcatcggcattgccgtggtcatgatatttggcatgatcttcagtatgatcttgtgctgtgctatccgcaggaaccgcgagatggtctagagtcagcttacatccctgagcaggaaagtttacccatgaagattggtgggattttttgtttgtttgttttgttttgtttgttgtttgttgtttgtttttttgccactaattttagtattcattctgcattgctagataaaagctgaagttactttatgtttgtcttttaatgcttcattcaatattgacatttgtagttgagcggggggtttggtttgctttggtttatattttttcagttgtttgtttttgcttgttatattaagcagaaatcctgcaatgaaaggtactatatttgctagactctagacaagatattgtacataaaagaatttttttgtctttaaatagatacaaatgtctatcaactttaatcaagttgtaacttatattgaagacaatttgatacataataaaaaattatgacaatgtcctgga

SEQ ID NO: 428414 - DNA, 1236 bp, Homo sapiens
gaaagtcgttcactagaggctaccggcgtgggaattgttccatttcctgaagtgcatctgaacatgggcagccagaaggaggtctctcgctaatcagcccctagaaaccaacaagggccaaccaggttccttggggtcatgtcctctcttcccatgagggacagccccagacggaacatggtcctcgctgggatggccttggctcactgagtcttcccccacccccgcctgcctctgcccagccaagatataacaatacgttttaaaatagaatattaacactttgggaggccgaggcaggcggatcgcaccacagcactctagcctaagcaacagagcaagactccatctcaaaagaaaaaaaaaagagtattaaataacatacacacaaagacaaatgcaaaagtactaacctgtatggactaggactataggaaaacctggaatttgagcattaaatttggctctgagcttactttcccaccctgaaagttctccaaggaaaatgcttgtgcagctgactgccaacccccccagattcctcacgtcccgcacccttctcattatctggcctgcatctctcctgcttcagcaccttctgactcgtttggcctcctggatgccattctccttgtcatttttcttggactgggtgacccatgtctctccctttccctcagccttccttcagatcaaaccaccctgatcctcatgtttcttcctatctcctagatatttggcatgatcttcagtatgatcttgtgctgtgctatccgcaggaaccgcgagatggtctagagtcagcttacatccctgagcaggaaagtttacccatgaagattggtgggattttttgtttgtttgttttgttttgtttgttgtttgttgtttgtttttttgccactaattttagtattcattctgcattgctagataaaagctgaagttactttatgtttgtcttttaatgcttcattcaatattgacatttgtagttgagcggggggtttggtttgctttggtttatattttttcagttgtttgtttttgcttgttatattaagcagaaatcctgcaatgaaaggtactatatttgctagactctagacaagatattgtacataaaagaatttttttgtctttaaatagatacaaatgtctatcaactttaatcaagttgtaacttatattgaagacaatttgatacataataaaaaattatgacaatgtcctgga

SEQ ID NO: 428415 - DNA, 658 bp, Homo sapiens
cccagcccaccctctgcccaccagttctcccgggtgagacgggggccatgggagggaggaggtgccctgggaggaaggattgtgtgtgacccaggtcttggtttgtctccccaagtctcctgtcctgatgccatcaaagaggtcttcgacaataaattccacatcatcggcgcagtgggcatcggcattgccgtggtcatggaaccgcgagatggtctagagtcagcttacatccctgagcaggaaagtttacccatgaagattggtgggattttttgtttgtttgttttgttttgtttgttgtttgttgtttgtttttttgccactaattttagtattcattctgcattgctagataaaagctgaagttactttatgtttgtcttttaatgcttcattcaatattgacatttgtagttgagcggggggtttggtttgctttggtttatattttttcagttgtttgtttttgcttgttatattaagcagaaatcctgcaatgaaaggtactatatttgctagactctagacaagatattgtacataaaagaatttttttgtctttaaatagatacaaatgtctatcaactttaatcaagttgtaacttatattgaagacaatttgatacataataaaaaattatgacaatgtcctgga

SEQ ID NO: 428416 - DNA, 847 bp, Homo sapiens
ccctagttcatgaccttactacccgtcagtatgaccttgggcaagtcacttttcttttctgggtttaagtttcttttttttgtgtgtagttaagggtttgaaatagatgattaaagatttctgtttgttttaaaattgcctgatgtcagaaagggtttcagtcttgctcactgctgtatccccagtacagtagagcttggtacatctgacattactggagtagatcttaccttttctagttagtaatcatagaaccttgtgcaagtttcttgacatatttcctcatctgtaaaatggagataatacctgcttctatagggtttatggtgagggtggaattaaatctatgtgaagtatttaacaatgccaagcacatagcagcactcaaagtttgttgtcaccgaattaatgtatgattatctgttttgcatttcactcattcagatcatcatagttatttctttttgtttgtttgttttgttttgtttgttgtttgttgtttgtttttttgccactaattttagtattcattctgcattgctagataaaagctgaagttactttatgtttgtcttttaatgcttcattcaatattgacatttgtagttgagcggggggtttggtttgctttggtttatattttttcagttgtttgtttttgcttgttatattaagcagaaatcctgcaatgaaaggtactatatttgctagactctagacaagatattgtacataaaagaatttttttgtctttaaatagatacaaatgtctatcaactttaatcaagttgtaacttatattgaagacaatttgatacataataaaaaattatgacaatgtcctgga

SEQ ID NO: 428417 - DNA, 610 bp, Homo sapiens
cttttcccggcacatgcgcaccgcagcgggtcgcgcgccctaaggagtggcactttttaaaagtgcagccggagaccagcctacagccgcctgcatctgtatccagcgccaggtcccgccagtcccagctgcgcgcgccccccagtcccgcacccgttcggcccaggctaagttagccctcaccatgccggtcaaaggaggcaccaagtgcatcaaatacctgctgttcggatttaacttcatcttctggcttgccgggattgctgtccttgccattggactatggctccgattcgactctcagaccaagagcatcttcgagcaagaaactaataataataattccagcttctacacaggagtctatattctgatcggagccggcgccctcatgatgctggtgggcttcctgggctgctgcggggctgtgcaggagtcccagtgcatgctgggactgttcttcggcttcctcttggtgatattcgccattgaaatagctgcggccatctggggatattcccacaaggatgaggtgatctttttccaggtatcttagtctgtttgtgctgctataacaaaatactatagatcaggtggcttagaaacaaca

SEQ ID NO: 428418 - DNA, 1561 bp, Homo sapiens
ctgcccagccctcagctgtgttattattcggtgataggtatttgctaattacttccaaaagcctcccatctgtcatcccacccagactgcgcgcttctaattcctcctaccccacatgctgtgcccaatgaaaagtatggtcagcgagcgaaggtttgcaaggagacagacgagggcgaaattaagccaggcggcttccctttaaatcctcgcaaagcagaagggcccctcactctggcagcaggccttggccaaggggcctttagccctgacgacccggggaagagtctcccaaagcagaacgcccggtccggcgcccagaccaaacgcgggggaaccggaagggcgaggcctccaccgccaggtcccgccagtcccagctgcgcgcgccccccagtcccgcacccgttcggcccaggctaagttagccctcaccatgccggtcaaaggaggcaccaagtgcatcaaatacctgctgttcggatttaacttcatcttctggcttgccgggattgctgtccttgccattggactatggctccgattcgactctcagaccaagagcatcttcgagcaagaaactaataataataattccagcttctacacaggagtctatattctgatcggagccggcgccctcatgatgctggtgggcttcctgggctgctgcggggctgtgcaggagtcccagtgcatgctgggactgttcttcggcttcctcttggtgatattcgccattgaaatagctgcggccatctggggatattcccacaaggatgaggtgattaaggaagtccaggagttttacaaggacacctacaacaagctgaaaaccaaggatgagccccagcgggaaacgctgaaagccatccactatgcgttgaactgctgtggtttggctgggggcgtggaacagtttatctcagacatctgccccaagaaggacgtactcgaaaccttcaccgtgaagtcctgtcctgatgccatcaaagaggtcttcgacaataaattccacatcatcggcgcagtgggcatcggcattgccgtggtcatgatatttggcatgatcttcagtatgatcttgtgctgtgctatccgcaggaaccgcgagatggtctagagtcagcttacatccctgagcaggaaagtttacccatgaagattggtgggattttttgtttgtttgttttgttttgtttgttgtttgttgtttgtttttttgccactaattttagtattcattctgcattgctagataaaagctgaagttactttatgtttgtcttttaatgcttcattcaatattgacatttgtagttgagcggggggtttggtttgctttggtttatattttttcagttgtttgtttttgcttgttatattaagcagaaatcctgcaatgaaaggtactatatttgctagactctagacaagatattgtacataaaagaatttttttgtctttaaatagatacaaatgtctatcaactttaatcaagttgtaacttatattgaagacaatttgatacataataaaaaattatgacaatgtcctgga

SEQ ID NO: 428419 - DNA, 1392 bp, Homo sapiens
cttttcccggcacatgcgcaccgcagcgggtcgcgcgccctaaggagtggcactttttaaaagtgcagccggagaccagcctacagccgcctgcatctgtatccagcgccaggtcccgccagtcccagctgcgcgcgccccccagtcccgcacccgttcggcccaggctaagttagccctcaccatgccggtcaaaggaggcaccaagtgcatcaaatacctgctgttcggatttaacttcatcttctggcttgccgggattgctgtccttgccattggactatggctccgattcgactctcagaccaagagcatcttcgagcaagaaactaataataataattccagcttctacacaggagtctatattctgatcggagccggcgccctcatgatgctggtgggcttcctgggctgctgcggggctgtgcaggagtcccagtgcatgctgggactgttcttcggcttcctcttggtgatattcgccattgaaatagctgcggccatctggggatattcccacaaggatgaggtgattaaggaagtccaggagttttacaaggacacctacaacaagctgaaaaccaaggatgagccccagcgggaaacgctgaaagccatccactatgcgttgaactgctgtggtttggctgggggcgtggaacagtttatctcagacatctgccccaagaaggacgtactcgaaaccttcaccgtgaagtcctgtcctgatgccatcaaagaggtcttcgacaataaattccacatcatcggcgcagtgggcatcggcattgccgtggtcatgatatttggcatgatcttcagtatgatcttgtgctgtgctatccgcaggaaccgcgagatggtctagagtcagcttacatccctgagcaggaaagtttacccatgaagattggtgggattttttgtttgtttgttttgttttgtttgttgtttgttgtttgtttttttgccactaattttagtattcattctgcattgctagataaaagctgaagttactttatgtttgtcttttaatgcttcattcaatattgacatttgtagttgagcggggggtttggtttgctttggtttatattttttcagttgtttgtttttgcttgttatattaagcagaaatcctgcaatgaaaggtactatatttgctagactctagacaagatattgtacataaaagaatttttttgtctttaaatagatacaaatgtctatcaactttaatcaagttgtaacttatattgaagacaatttgatacataataaaaaattatgacaatgtcctggaaaaaaaaaaaacacaaaaccacccaccacaaccaacaacccccaaacaaaaaccacacccccacccaccaaacacaacacccc

SEQ ID NO: 428420 - DNA, 1175 bp, Homo sapiens
cttttcccggcacatgcgcaccgcagcgggtcgcgcgccctaaggagtggcactttttaaaagtgcagccggagaccagcctacagccgcctgcatctgtatccagcgccaggtcccgccagtcccagctgcgcgcgccccccagtcccgcacccgttcggcccaggctaagttagccctcaccatgccggtcaaaggaggcaccaagtgcatcaaatacctgctgttcggatttaacttcatcttctggcttgccgggattgctgtccttgccattggactatggctccgattcgactctcagaccaagagcatcttcgagcaagaaactaataataataattccagcttctacacaggagtctatattctgatcggagccggcgccctcatgatgctggtgggcttcctgggctgctgcggggctgtgcaggagtcccagtgcatgctgggactgttcttcggcttcctcttggtgatattcgccattgaaatagctgcggccatctggggatattcccacaaggatgaggtgattaaggaagtccaggagttttacaaggacacctacaacaagctgaaaaccaaggatgagccccagcgggaaacgctgaaagccatccactatgcgttgaactgctgtggtttggctgggggcgtggaacagtttatctcagacatctgccccaagaaggacgtactcgaaaccttcaccgtgaagtcctgtcctgatgccatcaaagaggtcttcgacaataaattccacatcatcggcgcagtgggcatcggcattgccgtggtcatgatatttggcatgatcttcagtatgatcttgtgctgtgctatccgcaggaaccgcgagatggtctagagtcagcttacatccctgagcaggaaagtttacccatgaagattggtgggattttttgtttgtttgttttgttttgtttgttgtttgttgtttgtttttttgccactaattttagtattcattctgcattgctagataaaagctgaagttactttatgtttgtctccaaaagattccagcgatagacatgttcgtcccccgccgttgcaaggtactaaaggcaagcgtaaaggcgctcgtctttggtatgtaggtggtcatcaattttaactgcaggggcttcgggggaaccgagctggaattc

SEQ ID NO: 428421 - DNA, 1401 bp, Homo sapiens
cgcggccgcgagtgccggcagctggcactgcccgcaccgggcaggcaccgggcgggaagagagagcgccctgcggctgccagctggctccaaggccgggtccagagccgggcgggacggccgcgacgggcgcattcgggtgggggctcatcaccgcccagccggcgtggggagccgggccctcttgagatgaggcgtgcgggagggtcctgagcactttagctcgcctaggatttgagctggggtgtgtgtctgctcccagctcaagtccctccgagtgccagagaggaaggcagggagaagcggagcacccctctttgggccaaggccaaggaggactgtgcttgccgggattgctgtccttgccattggactatggctccgattcgactctcagaccaagagcatcttcgagcaagaaactaataataataattccagcttctacacaggagtctatattctgatcggagccggcgccctcatgatgctggtgggcttcctgggctgctgcggggctgtgcaggagtcccagtgcatgctgggactgttcttcggcttcctcttggtgatattcgccattgaaatagctgcggccatctggggatattcccacaaggatgaggtgattaaggaagtccaggagttttacaaggacacctacaacaagctgaaaaccaaggatgagccccagcgggaaacgctgaaagccatccactatgcgttgaactgctgtggtttggctgggggcgtggaacagtttatctcagacatctgccccaagaaggacgtactcgaaaccttcaccgtgaagtcctgtcctgatgccatcaaagaggtcttcgacaataaattccacatcatcggcgcagtgggcatcggcattgccgtggtcatgatatttggcatgatcttcagtatgatcttgtgctgtgctatccgcaggaaccgcgagatggtctagagtcagcttacatccctgagcaggaaagtttacccatgaagattggtgggattttttgtttgtttgttttgttttgtttgttgtttgttgtttgtttttttgccactaattttagtattcattctgcattgctagataaaagctgaagttactttatgtttgtcttttaatgcttcattcaatattgacatttgtagttgagcggggggtttggtttgctttggtttatattttttcagttgtttgtttttgcttgttatattaagcagaaatcctgcaatgaaaggtactatatttgctagactctagacaagatattgtacataaaagaatttttttgtctttaaatagatacaaatgtctatcaactttaatcaagttgtaacttatattgaagacaatttgatacataataaaaaattatgacaatgtcctgga

SEQ ID NO: 428422 - DNA, 1136 bp, Homo sapiens
gacttggtggcgctgtttgaccggcatggtgagggctaacttagcctgggcgaacgggtgctgggactcctgtcacagcgcccgcagcagtccaggaagcacaccagcatcatgagggcgccggatcggatcagaatatagactcctgtgtagaagctggaattattattattagtttcttgctcgaagatgctcttggtctgagagtcgaatcggagccatagtccaatggcaaggacagcaatcccggcaagccagaagatgaagttaaatccgaacagcagttcttcggcttcctcttggtgatattcgccattgaaatagctgcggccatctggggatattcccacaaggatgaggtgattaaggaagtccaggagttttacaaggacacctacaacaagctgaaaaccaaggatgagccccagcgggaaacgctgaaagccatccactatgcgttgaactgctgtggtttggctgggggcgtggaacagtttatctcagacatctgccccaagaaggacgtactcgaaaccttcaccgtgaagtcctgtcctgatgccatcaaagaggtcttcgacaataaattccacatcatcggcgcagtgggcatcggcattgccgtggtcatgatatttggcatgatcttcagtatgatcttgtgctgtgctatccgcaggaaccgcgagatggtctagagtcagcttacatccctgagcaggaaagtttacccatgaagattggtgggattttttgtttgtttgttttgttttgtttgttgtttgttgtttgtttttttgccactaattttagtattcattctgcattgctagataaaagctgaagttactttatgtttgtcttttaatgcttcattcaatattgacatttgtagttgagcggggggtttggtttgctttggtttatattttttcagttgtttgtttttgcttgttatattaagcagaaatcctgcaatgaaaggtactatatttgctagactctagacaagatattgtacataaaagaatttttttgtctttaaatagatacaaatgtctatcaactttaatcaagttgtaacttatattgaagacaatttgatacataataaaaaattatgacaatgtcctgga

SEQ ID NO: 428423 - DNA, 1463 bp, Homo sapiens
  misc_feature (1308)..(1308): n is a, c, g, or t
cttttcccggcacatgcgcaccgcagcgggtcgcgcgccctaaggagtggcactttttaaaagtgcagccggagaccagcctacagccgcctgcatctgtatccagcgccaggtcccgccagtcccagctgcgcgcgccccccagtcccgcacccgttcggcccaggctaagttagccctcaccatgccggtcaaaggaggcaccaagtgcatcaaatacctgctgttcggatttaacttcatcttctggcttgccgggattgctgtccttgccattggactatggctccgattcgactctcagaccaagagcatcttcgagcaagaaactaataataataattccagcttctacacaggagtctatattctgatcggagccggcgccctcatgatgctggtgggcttcctgggctgctgcggggctgtgcaggagtcccagtgcatgctgggactgttcttcggcttcctcttggtgatattcgccattgaaatagctgcggccatctggggatattcccacaaggatgaggtgattaaggaagtccaggagttttacaaggacacctacaacaagctgaaaaccaaggatgagccccagcgggaaacgctgaaagccatccactatgcgttgaactgctgtggtttggctgggggcgtggaacagtttatctcagacatctgccccaagaaggacgtactcgaaaccttcaccgtgaagtcctgtcctgatgccatcaaagaggtcttcgacaataaattccacatcatcggcgcagtgggcatcggcattgccgtggtcatgatatttggcatgatcttcagtatgatcttgtgctgtgctatccgcaggaaccgcgagatggtctagatttttgtttgtttgttttgttttgtttgttgtttgttgtttgtttttttgccactaattttagtattcattctgcattgctagataaaagctgaagttactttatgtttgtcttttaatgcttcattcaatattgacatttgtagttgagcggggggtttggtttgctttggtttatattttttcagttgtttgtttttgcttgttatattaagcagaaatcctgcaatgaaaggtactatatttgctagactctagacaagatattgtacataaaagaatttttttgtctttaaatagatacaaatgtctatcaactttaatcaagttgtaacttatattgaagacaatttgatacataataaaaaattatgacaatgtcctggaaaaaaaaaaaaaaaaaaaaaaaaaaaagggggggggtaagggtcctggtngggggttgggcagaagaatgtgttttaagttgcctgtggcccaaaagccggggggaaggggggggttgggggaaaattttggtatgaatgtctgtgtgaaaaggcggtctgtgcagactattccatttggtccacaacaacaaaaacaaaaaagg

SEQ ID NO: 428424 - DNA, 730 bp, Homo sapiens
cggctcgaccttgtctctcggctctacctgtgctctcggctctaccgtgtctctcggctctaccttgtctctcggctctaccttgtctctcggctctaccttgtctctcggctctaccttggtctctcggctctaccttgtctcctgtcctgatgccatcaaagaggtcttcgacaataaattccacatcatcggcgcagtgggcatcggcattgccgtggtcatgatatttggcatgatcttcagtatgatcttgtgctgtgctatccgcaggaaccgcgagatggtctagagtcagcttacatccctgagcaggaaagtttacccatgaagattggtgggattttttgtttgtttgttttgttttgtttgttgtttgttgtttgtttttttgccactaattttagtattcattctgcattgctagataaaagctgaagttactttatgtttgtcttttaatgcttcattcaatattgacatttgtagttgagcggggggtttggtttgctttggtttatattttttcagttgtttgtttttgcttgttatattaagcagaaatcctgcaatgaaaggtactatatttgctagactctagacaagatattgtacataaaagaatttttttgtctttaaatagatacaaatgtctatcaactttaatcaagttgtaacttatattgaagacaatttgatacataataaaaaattatgacaatgtcctgga

SEQ ID NO: 428425 - DNA, 1230 bp, Homo sapiens
cttttcccggcacatgcgcaccgcagcgggtcgcgcgccctaaggagtggcactttttaaaagtgcagccggagaccagcctacagccgcctgcatctgtatccagcgccaggtcccgccagtcccagctgcgcgcgccccccagtcccgcacccgttcggcccaggctaagttagccctcaccatgccggtcaaaggaggcaccaagtgcatcaaatacctgctgttcggatttaacttcatcttctggcttgccgggattgctgtccttgccattggactatggctccgattcgactctcagaccaagagcatcttcgagcaagaaactaataataataattccagcttctacacaggagtctatattctgatcggagccggcgccctcatgatgctggtgggcttcctgggctgctgcggggctgtgcaggagtcccagtgcatgctgggactgttcttcggcttcctcttggtgatattcgccattgaaatagctgcggccatctggggatattcccacaaggatgaggtgattaaggaagtccaggagttttacaaggacacctacaacaagctgaaaaccaaggatgagccccagcgggaaacgctgaaagccatccactatgcgttgaactgctgtggtttggctgggggcgtggaacagtttatctcagacatctgccccaagaaggacgtactcgaaaccttcaccgtgaaggtaaactcagaccaggatcctggtgtccctgcccccattgctctggacaaaccctgcaagcatgaaagtgacagcagccaagtgctgcttcagcaagacccgttctgcctgtgaaagggccccagggcacccatctctttctctcccactttgggccctctgtttactcaagggcaataaaacaaaggccggaccaggggaatgacaagtgttctggcaccgcccactgctgccagcccggaagctctcaagggcaggcgtgcttctgagtcttggactcccactctgactttgtcagtggctcctgtctgtaagccagagttaatgtccaactccagaatagtaaaaggtgaccttacaaccatgtcagaaatagacccccaagcagggcctgtccctcctccttccctgacgtcctgcccagattttagggatccactagcatagccatccctttgttcccctttccatccaccagccagaaccacaaatatcgccgaacactcctg

SEQ ID NO: 428426 - DNA, 422 bp, Homo sapiens
gcccaaaggccctgagagaaggcagtgctagcagctgccatctgcccagtgacgttgtccaagcacaggcatctggtggctgagagcttagagagaacaagatggaacgcataacatttgttcgtggaggaagatgtgaaaatgccgtctctgcccctctctcgtctgcccattgtaggtgattaaggaagtccaggagttttacaaggacacctacaacaagctgaaaaccaaggatgagccccagcgggaaacgctgaaagccatccactatgcggtatgtcgccttggcaaagacaccctcctgcgctttctccggattgtgtctgcacacagggtgctgactgcaccagaccagtgcaaacattctaatcgtcttcttacaatttgtttctctcatccccatccctgccttctcgctg

SEQ ID NO: 428427 - DNA, 1247 bp, Homo sapiens
gctccaggaaagggaagaacagcagctgcaccgccaagagcgtgacagaaaattcctcgaggaggaaccgcagctgcgccgccaggagcgcgaacaacagctgcgtcacgaccgcgacagaaaattccgtgaagaggaacagctgctccaggaaggggaggaacagcagctgcgccgccaagagcgtgacagaaaattccgcgaagaggaacagcagctccgccgtcaggaacgagagagaaaattcctccaggaggaacagcagctgcgccgccaggaactggagagaaaattccgtgaggaggaacagctgcgccaagaaacggagcaagagcagctgcgccgccaagaacgctacagaaaaatcctagaggaagagcagctccgtccggaaagggaagaacagcagctgcgccgccaggagcgcgacagaaaattccgcgaggaggaacagctccgccaggagagggaggaacagcagctgcgcagccaagagtctgacagaaaattccgcgaggaggaacagctacgccaggagagggaagaacagcagctgcgcccccaacagcgtgacggaaagtatcgctgggaagaagagcagctccaacttgaggaacaagagcagaggctgcggcaggagcgagaccggcagtaccgggcggaggagcagtttgccacgcaggagaagagtcgtcgtgaggaacaagaactatggcaagaagaggagcagaaacgtcgccaggaacgggaaaggaaattacgggaagaacacatccgccgccagcagaaggaggaacagaggcaccgccaagtcggggagatacaatcccaagaagggaagggccatgggcggcttctggagcccggcactcatcagtttgccagtgtcccagtgcgctccagccctctctatgagtacatccaagagcagagatctcaataccgcccttaagtgatgttgccaatatcttgacacctgccaaagcttccagcacgggaaaatgagaaacactgggtaccaagtgataactcagatgtttctggttgtgggaaaactctctgatattagaatgtcttttcttccaaaatcttaaactacgctcattttacgcactttgtacttctgctttttattcttcctcaagtagttctttactgcaagatgtctttcttttgctctttgatgcggatgtggcattgtggggaactctagagcgaccatcacggcatccagctgcactgccgcc

SEQ ID NO: 428428 - DNA, 1378 bp, Homo sapiens
agttgatcctagaggatcccccgtcattttacgcacttgtacttctgctttttattcttcctcaagtagttctttactgcaagatgtctttctttgctctttgatgcggatgtggattgtgcaatccacatccgccgccagcagaaggaggaacagaggcaccgccaagtcggggagatacaatcccaagaagggaagggccatgggcggcttctggagcccggcactcatcagtttgccagtgtcccagtgcgctccagccctctctatgagtacatccaagagcagagatctcaataccgcccttaagtgatgttgccaatatcttgacacctgccaaagcttccagcacgggaaaatgagaaacactgggtaccaagtgataactcagatgtttctggttgtgggaaaactctctgatattagaatgtcttttcttccaaaatcttaaactacgctcattttacgcactttgtacttctgctttttattcttcctcaagtagttctttactgcaagatgtctttcttttgctctttgatgcggatgtggtgtgcatttaaaaaaaatataaatcatttaatttgtttaagaaattttgtttgaggaacatgttcatttattgctttcagaagtaacaagagtaataggatgatttgagattctaaacaatgggtcggtttgtttaatgactgacccatcttgtggaaagtgcagatacttttaatgttcaagttgctatttcttcttgaacctaaattgatcattgcctccaaacagcatttcatcttttgtggcatagttagcacaaattccaggtaactaaatttttataacccttgaatagtgcagggggagtgacctctgcataaaaacttcctgtaaaatcagcccattactggaagaaatatctgttaagaataggtttagctttgaagatttagaatttaaattagattttttttaaactcaactccacttaaacacataatctcatgaagaaataatgaggtgtttctcaacttcagagttcaaattttaaaactgtgtctgttgtagtctatagtgttcattctacttccccaagttttgatgagtttcagaatattatgaacctttgttaattttagcttgttagaaggaagctgctcagaatcccataaacatctgtcttactctagggccaataagagatcacatagagcatgttgggggtgtaaaagggaaaaatgtgtgaacataggggcaaatttctagaggccctttgacaagacccatttgcccacaatcatttgaggcctattgataataccttagatatattcttgttgaaataattggactgtgaaaaattaataataaatgtttggcaagtaaa

SEQ ID NO: 428429 - DNA, 1203 bp, Homo sapiens
gctccaggaaagggaagaacagcagctgcaccgccaagagcgtgacagaaaattcctcgaggaggaaccgcagctgcgccgccaggagcgcgaacaacagctgcgtcacgaccgcgacagaaaattccgtgaagaggaacagctgctccaggaaggggaggaacagcagctgcgccgccaagagcgtgacagaaaattccgcgaagaggaacagcagctccgccgtcaggaacgagagagaaaattcctccaggaggaacagcagctgcgccgccaggaactggagagaaaattccgtgaggaggaacagctgcgccaagaaacggagcaagagcagctgcgccgccaagaacgctacagaaaaatcctagaggaagagcagctccgtccggaaagggaagaacagcagctgcgccgccaggagcgcgacagaaaattccgcgaggaggaacagctccgccaggagagggaggaacagcagctgcgcagccaagagtctgacagaaaattccgcgaggaggaacagctacgccaggagagggaagaacagcagctgcgcccccaacagcgtgacggaaagtatcgctgggaagaagagcagctccaacttgaggaacaagagcagaggctgcggcaggagcgagaccggcagtaccgggcggaggagcagtttgccacgcaggagaagagtcgtcgtgaggaacaagaactatggcaagaagaggagcagaaacgtcgccaggaacgggaaaggaaattacgggaagaacacatccgccgccagcagaaggaggaacagaggcaccgccaagtcggggagatacaatcccaagaagggaagggccatgggcggcttctggagcccggcactcatcagtttgccagtgtcccagtgcgctccagccctctctatgagtacatccaagagcagagatctcaataccgcccttaagtgatgttgccaatatcttgacacctgccaaagcttccagcacgggaaaatgagaaacactgggtaccaagtgataactcagatgtttctggttgtgggaaaactctctgatattagaatgtcttttcttccaaaatcttaaactacgctcattttacgcactttgtacttctgctttttattcttcctcaagtagttctttactgcaagatgtctttcttttgcccagctcaacgcgcacctcgcattct

SEQ ID NO: 428430 - DNA, 2021 bp, Homo sapiens
gctccaggaaagggaagaacagcagctgcaccgccaagagcgtgacagaaaattcctcgaggaggaaccgcagctgcgccgccaggagcgcgaacaacagctgcgtcacgaccgcgacagaaaattccgtgaagaggaacagctgctccaggaaggggaggaacagcagctgcgccgccaagagcgtgacagaaaattccgcgaagaggaacagcagctccgccgtcaggaacgagagagaaaattcctccaggaggaacagcagctgcgccgccaggaactggagagaaaattccgtgaggaggaacagctgcgccaagaaacggagcaagagcagctgcgccgccaagaacgctacagaaaaatcctagaggaagagcagctccgtccggaaagggaagaacagcagctgcgccgccaggagcgcgacagaaaattccgcgaggaggaacagctccgccaggagagggaggaacagcagctgcgcagccaagagtctgacagaaaattccgcgaggaggaacagctacgccaggagagggaagaacagcagctgcgcccccaacagcgtgacggaaagtatcgctgggaagaagagcagctccaacttgaggaacaagagcagaggctgcggcaggagcgagaccggcagtaccgggcggaggagcagtttgccacgcaggagaagagtcgtcgtgaggaacaagaactatggcaagaagaggagcagaaacgtcgccaggaacgggaaaggaaattacgggaagaacacatccgccgccagcagaaggaggaacagaggcaccgccaagtcggggagatacaatcccaagaagggaagggccatgggcggcttctggagcccggcactcatcagtttgccagtgtcccagtgcgctccagccctctctatgagtacatccaagagcagagatctcaataccgcccttaagtgatgttgccaatatcttgacacctgccaaagcttccagcacgggaaaatgagaaacactgggtaccaagtgataactcagatgtttctggttgtgggaaaactctctgatattagaatgtcttttcttccaaaatcttaaactacgctcattttacgcactttgtacttctgctttttattcttcctcaagtagttctttactgcaagatgtctttcttttgctctttgatgcggatgtggtgtgcatttaaaaaaaatataaatcatttaatttgtttaagaaattttgtttgaggaacatgttcatttattgctttcagaagtaacaagagtaataggatgatttgagattctaaacaatgggtcggtttgtttaatgactgacccatcttgtggaaagtgcagatacttttaatgttcaagttgctatttcttcttgaacctaaattgatcattgcctccaaacagcatttcatcttttgtggcatagttagcacaaattccaggtaactaaatttttataacccttgaatagtgcagggggagtgacctctgcataaaaacttcctgtaaaatcagcccattactggaagaaatatctgttaagaataggtttagctttgaagatttagaatttaaattagattttttttaaactcaactccacttaaacacataatctcatgaagaaataatgaggtgtttctcaacttcagagttcaaattttaaaactgtgtctgttgtagtctatagtgttcattctacttccccaagttttgatgagtttcagaatattatgaacctttgttaattttagcttgttagaaggaagctgctcagaatcccataaacatctgtcttactctagggccaataagagatcacatagagcatgttgggggtgtaaaagggaaaaatgtgtgaacataggggcaaatttctagaggccctttgacaagacccatttgcccacaatcatttgaggcctattgataataccttagatatattcttgttgaaataattggactgtgaaaaattaataataaatgtttggcaagtaaa

SEQ ID NO: 428431 - DNA, 1301 bp, Homo sapiens
gcagtgaatcgtatttggtcatagtcgttcctagaggtatcccacaatccacatccgccgccagcagaaggaggaacagaggcaccgccaagtcggggagatacaatcccaagaagggaagggccatgggcggcttctggagcccggcactcatcagtttgccagtgtcccagtgcgctccagccctctctatgagtacatccaagagcagagatctcaataccgcccttaagtgatgttgccaatatcttgacacctgccaaagcttccagcacgggaaaatgagaaacactgggtaccaagtgataactcagatgtttctggttgtgggaaaactctctgatattagaatgtcttttcttccaaaatcttaaactacgctcattttacgcactttgtacttctgctttttattcttcctcaagtagttctttactgcaagatgtctttcttttgctctttgatgcggatgtggtgtgcatttaaaaaaaatataaatcatttaatttgtttaagaaattttgtttgaggaacatgttcatttattgctttcagaagtaacaagagtaataggatgatttgagattctaaacaatgggtcggtttgtttaatgactgacccatcttgtggaaagtgcagatacttttaatgttcaagttgctatttcttcttgaacctaaattgatcattgcctccaaacagcatttcatcttttgtggcatagttagcacaaattccaggtaactaaatttttataacccttgaatagtgcagggggagtgacctctgcataaaaacttcctgtaaaatcagcccattactggaagaaatatctgttaagaataggtttagctttgaagatttagaatttaaattagattttttttaaactcaactccacttaaacacataatctcatgaagaaataatgaggtgtttctcaacttcagagttcaaattttaaaactgtgtctgttgtagtctatagtgttcattctacttccccaagttttgatgagtttcagaatattatgaacctttgttaattttagcttgttagaaggaagctgctcagaatcccataaacatctgtcttactctagggccaataagagatcacatagagcatgttgggggtgtaaaagggaaaaatgtgtgaacataggggcaaatttctagaggccctttgacaagacccatttgcccacaatcatttgaggcctattgataataccttagatatattcttgttgaaataattggactgtgaaaaattaataataaatgtttggcaagtaaa

SEQ ID NO: 428432 - DNA, 319 bp, Homo sapiens
caaagaagattcggacggagggtgagatagtacagaaatattgccgcgttacagaagctgtggaaacacatcaagcacaagtatgagaacaagtagttccttggaggcccccatccaggccagaaggaccaggtccacccagcagctgtttgcccagagctggagcctcagcttgaagatgatgctcaaggtactcttcatggaccaccattcgctgttggcaagaaacggctttacttacaaaacagactctttaccttctgctgtgtttgaagtatgtttagtcagcatgctcaggaaataaatgtgaattgccctt

SEQ ID NO: 428433 - DNA, 1182 bp, Homo sapiens
aggtgatggcgcgcgagggcttctgggagttgtagtttgacatattctaacagccaggaattctggagaagaaaaattgggtaataaatcttatcagattatctgggctgtcctgatatgaaccttttgagtttttttcctcattcccaggataggaatacctctgtggttcaaaacacgaaggctgagattcagaggaactacaaatcccataaagtgttgcacgtctagggcctttggagaacgaggtcggccccagcgcaggcgcggtggcgcgagttggactgtgaagaaacatggcggccgcgacgttgacttcgaaattgtactccctgctgttccgcaggacctccaccttcgccctcaccatcatcgtgggcgtcatgttcttcgagcgcgccttcgatcaaggcgcggacgctatctacgaccacatcaacgaggggaagctgtggaaacacatcaagcacaagtatgagaacaagtagttccttggaggcccccatccaggccagaaggaccaggtccacccagcagctgtttgcccagagctggagcctcagcttgaagatgatgctcaaggtactcttcatggaccaccattcgctgttggcaagaaacggctttacttacaaaacagactctttaccttctgctgtgtttgaagtatgtttagtcagcatgctcaggaaataaatgtgaattgcccttgagacctgcttctacattggttgctttgttaactctacctgatcttcacttgtcagtaatttgagaccacttcaaagccctctgcaaacaccccaaaggcagaatctgctattttgagttttccattaacttccaaagaattctggttttcaaaacaggagccagagttggagatattacagtcaactttggcttctaagccagtaattccattcttaaatacctcactgtcttggccatggggaagcactatggcctcagctgggggaaagaccctggcctaggggtcttagccactccccaccctagggtatagttcaggggtatccaatcctttggcttccctgggccatgttggaagaattgtcttgggccacacataaaatacagtaaccatagctgatgagctaaaacaaaaaacaatggtttgtgcaaaaatctcataatgttttaataaagttgaagaatttg

SEQ ID NO: 428434 - DNA, 1119 bp, Homo sapiens
  misc_feature (772)..(773): n is a, c, g, or t
  misc_feature (775)..(775): n is a, c, g, or t
  misc_feature (801)..(801): n is a, c, g, or t
  misc_feature (803)..(803): n is a, c, g, or t
  misc_feature (813)..(813): n is a, c, g, or t
  misc_feature (819)..(819): n is a, c, g, or t
aggtgatggcgcgcgagggcttctgggagttgtagtttgacatattctaacagccaggaattctggagaagaaaaattgggtaataaatcttatcagattatctgggctgtcctgatatgaaccttttgagtttttttcctcattcccaggataggaatacctctgtggttcaaaacacgaaggctgagattcagaggaactacaaatcccataaagtgttgcacgtctagggcctttggagaacgaggtcggccccagcgcaggcgcggtggcgcgagttggactgtgaagaaacatggcggccgcgacgttgacttcgaaattgtactccctgctgttccgcaggacctccaccttcgccctcaccatcatcgtgggcgtcatgttcttcgagcgcgccttcgatcaaggcgcggacgctatctacgaccacatcaacgaggggaagctgtggaaacacatcaagcacaagtatgagaacaagtagttccttggaggcccccatccaggccagaaggaccaggtccacccagcagctgtttgcccagagctggagcctcagcttgaagatgatgctcaaggtactcttcatggaccaccattcgctgttggcaagaaacggctttacttacaaaacagactctttaccttctgctgtgtttgaagtatgtttagtcagcatgctcaggaaataaatgtgaattgcccttaaaaaaaaaaaaaaaaaaaaaaaaaaaaaaaaaaaaaaaaaaaaaaaaaaaaacggggggnntnttagggggggggggaaaagggggtananaaagggggcnaggggnaaagggtgcggagacccatttttttggtaaagaggggggtaaaattcgggcgcggaccccccaataagggggagccccataataattgggaaaagaacccgggttaaacccggttaagaaaacgacgtcaaagaggcgcgagcgaaaacacccggccagcagggcgactgtcgtgtgctcagcagaccgctgcgtcgaccaccacggcgggaacacaacagtgcgagacgacaacacccctcacaccaccgcgagagcccgccaagcgcccagcatcaccgcgcaaccgtaacagcagca

SEQ ID NO: 428435 - DNA, 1009 bp, Homo sapiens
aggtgatggcgcgcgagggcttctgggagttgtagtttgacatattctaacagccaggaattctggagaagaaaaattgggtaataaatcttatcagattatctgggctgtcctgatatgaaccttttgagtttttttcctcattcccaggataggaatacctctgtggttcaaaacacgaaggctgagattcagaggaactacaaatcccataaagtgttgcacgtctagggcctttggagaacgaggtcggccccagcgcaggcgcggtggcgcgagttggactgtgaagaaacatggcggccgcgacgttgacttcgaaattgtactccctgctgttccgcaggacctccaccttcgccctcaccatcatcgtgggcgtcatgttcttcgagcgcgccttcgatcaaggcgcggacgctatctacgaccacatcaacgaggggaagctgtggaaacacatcaagcacaagtatgagaacaagtagttccttggaggcccccatccaggccagaaggaccaggtccacccagcagctgtttgcccagagctggagcctcagcttgaagatgatgctcaaggtactcttcatggaccaccattcgctgttggcaagaaacggctttacttacaaaacagactctttaccttctgctgtgtttgaagtatgtttagtcagcatgctcaggaaataaatgtgaattgcccttaaaaaaaaaaaaaaaaaaaaaaaaaaaaaaaaaaaaaaaaaaaaaaaaaaaaaccccaacttttttttttggtgaaaaaaaaaatttttttttttgtctctctttttctttttattttttttataacacccatatttttttgatgtacaaaaagggtgtgggagaaactatatgtgtgccgagtggcttctccctctatatatgtggaggcattgtattatatatttttggaatgaaaaccgccgcggtgtataaacccggtgtaatctaaaccaagatattgagaaaaggggagaca

SEQ ID NO: 428436 - DNA, 1349 bp, Homo sapiens
aggtgatggcgcgcgagggcttctgggagttgtagtttgacatattctaacagccaggaattctggagaagaaaaattgggtaataaatcttatcagattatctgggctgtcctgatatgaaccttttgagtttttttcctcattcccaggataggaatacctctgtggttcaaaacacgaaggctgagattcagaggaactacaaatcccataaagtgttgcacgtctagggcctttggagaacgaggtcggccccagcgcaggcgcggtggcgcgagttggactgtgaagaaacatggcggccgcgacgttgacttcgaaattgtactccctgctgttccgcaggacctccaccttcgccctcaccatcatcgtgggcgtcatgttcttcgagcgcgccttcgatcaaggcgcggacgctatctacgaccacatcaacgaggggaagctgtggaaacacatcaagcacaagtatgagaacaagtagttccttggaggcccccatccaggccagaaggaccaggtccacccagcagctgtttgcccagagctggagcctcagcttgaagatgatgctcaaggtactcttcatggaccaccattcgctgttggcaagaaacggctttacttacaaaacagactctttaccttctgctgtgtttgaagtatgtttagtcagcatgctcaggaaataaatgtgaattgcccttaaaaaaaaaacaacaacaaacaacaaaaaaaaaaaaaaaaaaaaaaaaaaaaaaaaaaaaaaaaaaaaaaaaaaaaaaaacaaaaagagagaggggcgggcgcgcgcgcacaagaagaaacccccgcgcggagggggcccacaaaagtatgacgcgcgatccaccgcgcgttttgtgtgtgctgaacaggggaggcgccccatagaggaagcgaccatcttatcattaagaacgccgagcgccacggcgccgcccgtgccaatttcaaacaacgtcggcgggcgagcccgagaacacaaacgggcaccacggggagaaacaactcggtggaaggacaggaacaaccacctaacagcggagcgggggggagggaaccaacaatagcgggggcggcaaaacaactcctcgcccaccagaagagatatattcttagagacgcccgccccaagagcaggagaaaaaatataactaacacttctctgcaagagggcgcacctataacgcgggagctgcacacaacaccactgaccgcgccaataaactatctggcccgccccgcgagagaaaaactttggcgggctcaacgccgcgcaactgctacatcattcgacgaacaaatctattttttcaccgacgga

SEQ ID NO: 428437 - DNA, 1289 bp, Homo sapiens
aggtgatggcgcgcgagggcttctgggagttgtagtttgacatattctaacagccaggaattctggagaagaaaaattgggtaataaatcttatcagattatctgggctgtcctgatatgaaccttttgagtttttttcctcattcccaggataggaatacctctgtggttcaaaacacgaaggctgagattcagaggaactacaaatcccataaagtgttgcacgtctagggcctttggagaacgaggtcggccccagcgcaggcgcggtggcgcgagttggactgtgaagaaacatggcggccgcgacgttgacttcgaaattgtactccctgctgttccgcaggacctccaccttcgccctcaccatcatcgtgggcgtcatgttcttcgagcgcgccttcgatcaaggcgcggacgctatctacgaccacatcaacgaggggaagctgtggaaacacatcaagcacaagtatgagaacaagtagttccttggaggcccccatccaggccagaaggaccaggtccacccagcagctgtttgcccagagctggagcctcagcttgaagatgatgctcaaggtactcttcatggaccaccattcgctgttggcaagaaacggctttacttacaaaacagactctttaccttctgctgtgtttgaagtatgtttagtcagcatgctcaggaaataaatgtgaattgcccttctgcactatctgcgaaatggaagaacgtaataacacagatgtcgcgcagacatccaagactgctgtccaacatgatgtgccagtaccggggaatgggcctctctatgggcagtatgatctgtggcgtggcataagagggtcctggagatctatacgtggatgccacatgggactcggctctcagaaatatgtctccacagcctaggtgagacaactctagatgccctaccggagtcactggacagagggtatcgggcctaaatcttaagccctgaaagaaggccctatgacccttgggaccgcgcgggcctattgcttaatgccagtccaccaggagacaggtattctggagcggcggtcgccgaatatgtaccccccttgacaggacgatggtgggctgaaaagtatcaaacgacaaatgtctaagagtgacagcacggacgacacaaatatattgtcgtgagcatgtgacacgtggggagaacgcaaatcagacaacaaaggcgtcaagcgaacacagcacgcaacaaaacaaatcctgcaccatcagagcatcgcaacattgagttcactacaac

SEQ ID NO: 428438 - DNA, 932 bp, Homo sapiens
aggtgatggcgcgcgagggcttctgggagttgtagtttgacatattctaacagccaggaattctggagaagaaaaattgggtaataaatcttatcagattatctgggctgtcctgatatgaaccttttgagtttttttcctcattcccaggataggaatacctctgtggttcaaaacacgaaggctgagattcagaggaactacaaatcccataaagtgttgcacgtctagggcctttggagaacgaggtcggccccagcgcaggcgcggtggcgcgagttggactgtgaagaaacatggcggccgcgacgttgacttcgaaattgtactccctgctgttccgcaggacctccaccttcgccctcaccatcatcgtgggcgtcatgttcttcgagcgcgccttcgatcaaggcgcggacgctatctacgaccacatcaacgaggggaagctgtggaaacacatcaagcacaagtatgagaacaagtagttccttggaggcccccatccaggccagaaggaccaggtccacccagcagctgtttgcccagagctggagcctcagcttgaagatgatgctcaaggtactcttcatggaccaccattcgctgttggcaagaaacggctttacttacaaaacagactctttaccttctgctgtgtttgaagtatgtttagtcagcatgctcaggaaataaatgtgaattgcccttcgacaaacgcctcactcttcctctaccccactcttctcctgcagccctcaccacccctctctcttcacccacgcggcaccttttcccctctctcttctcacattttcacctctctggcccctttgcgcacctcccttttccttcggcctctctctcgcctcccctcttccgccctctcttctccttccctctctacggcggccgttctcttcaccggcccg

SEQ ID NO: 428439 - DNA, 864 bp, Homo sapiens
aggtgatggcgcgcgagggcttctgggagttgtagtttgacatattctaacagccaggaattctggagaagaaaaattgggtaataaatcttatcagattatctgggctgtcctgatatgaaccttttgagtttttttcctcattcccaggataggaatacctctgtggttcaaaacacgaaggctgagattcagaggaactacaaatcccataaagtgttgcacgtctagggcctttggagaacgaggtcggccccagcgcaggcgcggtggcgcgagttggactgtgaagaaacatggcggccgcgacgttgacttcgaaattgtactccctgctgttccgcaggacctccaccttcgccctcaccatcatcgtgggcgtcatgttcttcgagcgcgccttcgatcaaggcgcggacgctatctacgaccacatcaacgaggggaagctgtggaaacacatcaagcacaagtatgagaacaagtagttccttggaggcccccatccaggccagaaggaccaggtccacccagcagctgtttgcccagagctggagcctcagcttgaagatgatgctcaaggtactcttcatggaccaccattcgctgttggcaagaaacggctttacttacaaaacagactctttaccttctgctgtgtttgaagtatgtttagtcagcatgctcaggaaataaatgtgaattgcccttaaaaaaaatacagccgggttccttccacaaacactagttttaaacgcgcgcgttaatcgataccgcgttgagcgtctgcccgcctgaaacagactccagcaaatccttggggtgccgttggctccctcagtttttgccccgggcgttatttta

SEQ ID NO: 428440 - DNA, 764 bp, Homo sapiens
aggtgatggcgcgcgagggcttctgggagttgtagtttgacatattctaacagccaggaattctggagaagaaaaattgggtaataaatcttatcagattatctgggctgtcctgatatgaaccttttgagtttttttcctcattcccaggataggaatacctctgtggttcaaaacacgaaggctgagattcagaggaactacaaatcccataaagtgttgcacgtctagggcctttggagaacgaggtcggccccagcgcaggcgcggtggcgcgagttggactgtgaagaaacatggcggccgcgacgttgacttcgaaattgtactccctgctgttccgcaggacctccaccttcgccctcaccatcatcgtgggcgtcatgttcttcgagcgcgccttcgatcaaggcgcggacgctatctacgaccacatcaacgaggggaagctgtggaaacacatcaagcacaagtatgagaacaagtagttccttggaggcccccatccaggccagaaggaccaggtccacccagcagctgtttgcccagagctggagcctcagcttgaagatgatgctcaaggtactcttcatggaccaccattcgctgttggcaagaaacggctttacttacaaaacagactctttaccttctgctgtgtttgaagtatgtttagtcagcatgctcaggaaataaatgtgaattgccctttgataaaaaccaaaccaatgctatctggctaacttccttgtcggccgctttgg

SEQ ID NO: 428441 - DNA, 1384 bp, Homo sapiens
aggtgatggcgcgcgagggcttctgggagttgtagtttgacatattctaacagccaggaattctggagaagaaaaattgggtaataaatcttatcagattatctgggctgtcctgatatgaaccttttgagtttttttcctcattcccaggataggaatacctctgtggttcaaaacacgaaggctgagattcagaggaactacaaatcccataaagtgttgcacgtctagggcctttggagaacgaggtcggccccagcgcaggcgcggtggcgcgagttggactgtgaagaaacatggcggccgcgacgttgacttcgaaattgtactccctgctgttccgcaggacctccaccttcgccctcaccatcatcgtgggcgtcatgttcttcgagcgcgccttcgatcaaggcgcggacgctatctacgaccacatcaacgagggggtgagggcctgtgccatccctgaccttggacccgcctgaggggtgacagtggagtagagaagctgtggaaacacatcaagcacaagtatgagaacaagtagttccttggaggcccccatccaggccagaaggaccaggtccacccagcagctgtttgcccagagctggagcctcagcttgaagatgatgctcaaggtactcttcatggaccaccattcgctgttggcaagaaacggctttacttacaaaacagactctttaccttctgctgtgtttgaagtatgtttagtcagcatgctcaggaaataaatgtgaattgcccttaaaaaaaaaaaaaaaaaaaaaaaaaaaaaaaaaaaaaaaaaaaaaaaaaaaaaaaacaaaaagagagaggggcgggcgcgcgcgcacaagaagaaacccccgcgcggagggggcccacaaaagtatgacgcgcgatccaccgcgcgttttgtgtgtgctgaacaggggaggcgccccatagaggaagcgaccatcttatcattaagaacgccgagcgccacggcgccgcccgtgccaatttcaaacaacgtcggcgggcgagcccgagaacacaaacgggcaccacggggagaaacaactcggtggaaggacaggaacaaccacctaacagcggagcgggggggagggaaccaacaatagcgggggcggcaaaacaactcctcgcccaccagaagagatatattcttagagacgcccgccccaagagcaggagaaaaaatataactaacacttctctgcaagagggcgcacctataacgcgggagctgcacacaacaccactgaccgcgccaataaactatctggcccgccccgcgagagaaaaactttggcgggctcaacgccgcgcaactgctacatcattcgacgaacaaatctattttttcaccgacgga

SEQ ID NO: 428442 - DNA, 964 bp, Homo sapiens
aggtgatggcgcgcgagggcttctgggagttgtagtttgacatattctaacagccaggaattctggagaagaaaaattgggtaataaatcttatcagattatctgggctgtcctgatatgaaccttttgagtttttttcctcattcccaggataggaatacctctgtggttcaaaacacgaaggctgagattcagaggaactacaaatcccataaagtgttgcacgtctagggcctttggagaacgaggtcggccccagcgcaggcgcggtggcgcgagttggactgtgaagaaacatggcggccgcgacgttgacttcgaaattgtactccctgctgttccgcaggacctccaccttcgccctcaccatcatcgtgggcgtcatgttcttcgagcgcgccttcgatcaaggcgcggacgctatctacgaccacatcaacgagggggtgagggcctgtgccatccctgaccttggacccgcctgaggggtgacagtggagtagagaagctgtggaaacacatcaagcacaagtatgagaacaagtagttccttggaggcccccatccaggccagaaggaccaggtccacccagcagctgtttgcccagagctggagcctcagcttgaagatgatgctcaaggtactcttcatggaccaccattcgctgttggcaagaaacggctttacttacaaaacagactctttaccttctgctgtgtttgaagtatgtttagtcagcatgctcaggaaataaatgtgaattgcccttaaaaaaaaaaaaccaaacaactcctaaaaacccaaccttcccatcaaaattttcaaaaaaacaaaaccttgggggggggccccgttcccaatttccccctatagggagccgattcccattactgggccgcggtttacaacttcggaatggaaaaaccctggggttcccaaattaaaccctttggaaaaaacccc

SEQ ID NO: 428443 - DNA, 778 bp, Homo sapiens
aggtgatggcgcgcgagggcttctgggagttgtagtttgacatattctaacagccaggaattctggagaagaaaaattgggtaataaatcttatcagattatctgggctgtcctgatatgaaccttttgagtttttttcctcattcccaggataggaatacctctgtggttcaaaacacgaaggctgagattcagaggaactacaaatcccataaagtgttgcacgtctagggcctttggagaacgaggtcggccccagcgcaggcgcggtggcgcgagttggactgtgaagaaacatggcggccgcgacgttgacttcgaaattgtactccctgctgttccgcaggacctccaccttcgccctcaccatcatcgtgggcgtcatgttcttcgagcgcgccttcgatcaaggcgcggacgctatctacgaccacatcaacgaggggaagctgtggaaacacatcaagcacaagtatgagaacaagtagttccttggaggcccccatccaggccagaaggaccaggtccacccagcagctgtttgcccagagctggagcctcagcttgaagatgatgctcaaggtactcttcatggaccaccattcgctgttggcaagaaacggctttacttacaaaacagactctttaccttctgctgtgtttgaagtatgtttagtcagcatgctcaggaaataaatgtgaattgcccttaagtgcatgcgcgccaggccccagcccgcctcacctttattcatgctggcggtagagctcaaacaac

SEQ ID NO: 428444 - DNA, 929 bp, Homo sapiens
  misc_feature (795)..(795): n is a, c, g, or t
aggtgatggcgcgcgagggcttctgggagttgtagtttgacatattctaacagccaggaattctggagaagaaaaattgggtaataaatcttatcagattatctgggctgtcctgatatgaaccttttgagtttttttcctcattcccaggataggaatacctctgtggttcaaaacacgaaggctgagattcagaggaactacaaatcccataaagtgttgcacgtctagggcctttggagaacgaggtcggccccagcgcaggcgcggtggcgcgagttggactgtgaagaaacatggcggccgcgacgttgacttcgaaattgtactccctgctgttccgcaggacctccaccttcgccctcaccatcatcgtgggcgtcatgttcttcgagcgcgccttcgatcaaggcgcggacgctatctacgaccacatcaacgaggggaagctgtggaaacacatcaagcacaagtatgagaacaagtagttccttggaggcccccatccaggccagaaggaccaggtccacccagcagctgtttgcccagagctggagcctcagcttgaagatgatgctcaaggtactcttcatggaccaccattcgctgttggcaagaaacggctttacttacaaaacagactctttaccttctgctgtgtttgaagtatgtttagtcagcatgctcaggaaataaatgtgaattgcccttaaaaaaaacacttgggacctataatgacactcattgcaattcattggccgtcgttttccaacgacttgactgggaagaccctgncgaacccgacttaatcgcgttgaacaacatacgactttagccgctgttgatatcgtgaataggcccatacccttcggccttccaaatacttggtcatcccgaatggcagttgtttggtagccgttgtatggtgc

SEQ ID NO: 428445 - DNA, 1241 bp, Homo sapiens
aggtgatggcgcgcgagggcttctgggagttgtagtttgacatattctaacagccaggaattctggagaagaaaaattgggtaataaatcttatcagattatctgggctgtcctgatatgaaccttttgagtttttttcctcattcccaggataggaatacctctgtggttcaaaacacgaaggctgagattcagaggaactacaaatcccataaagtgttgcacgtctagggcctttggagaacgaggtcggccccagcgcaggcgcggtggcgcgagttggactgtgaagaaacatggcggccgcgacgttgacttcgaaattgtactccctgctgttccgcaggacctccaccttcgccctcaccatcatcgtgggcgtcatgttcttcgagcgcgccttcgatcaaggcgcggacgctatctacgaccacatcaacgagggggtgagggcctgtgccatccctgaccttggacccgcctgaggggtgacagtggagtagagaagctgtggaaacacatcaagcacaagtatgagaacaagtagttccttggaggcccccatccaggccagaaggaccaggtccacccagcagctgtttgcccagagctggagcctcagcttgaagatgatgctcaaggtactcttcatggaccaccattcgctgttggcaagaaacggctttacttacaaaacagactctttaccttctgctgtgtttgaagtatgtttagtcagcatgctcaggaaataaatgtgaattgcccttgagacctgcttctacattggttgctttgttaactctacctgatcttcacttgtcagtaatttgagaccacttcaaagccctctgcaaacaccccaaaggcagaatctgctattttgagttttccattaacttccaaagaattctggttttcaaaacaggagccagagttggagatattacagtcaactttggcttctaagccagtaattccattcttaaatacctcactgtcttggccatggggaagcactatggcctcagctgggggaaagaccctggcctaggggtcttagccactccccaccctagggtatagttcaggggtatccaatcctttggcttccctgggccatgttggaagaattgtcttgggccacacataaaatacagtaaccatagctgatgagctaaaacaaaaaacaatggtttgtgcaaaaatctcataatgttttaataaagttgaagaatttg

SEQ ID NO: 428446 - DNA, 770 bp, Homo sapiens
aggtgatggcgcgcgagggcttctgggagttgtagtttgacatattctaacagccaggaattctggagaagaaaaattgggtaataaatcttatcagattatctgggctgtcctgatatgaaccttttgagtttttttcctcattcccaggataggaatacctctgtggttcaaaacacgaaggctgagattcagaggaactacaaatcccataaagtgttgcacgtctagggcctttggagaacgaggtcggccccagcgcaggcgcggtggcgcgagttggactgtgaagaaacatggcggccgcgacgttgacttcgaaattgtactccctgctgttccgcaggacctccaccttcgccctcaccatcatcgtgggcgtcatgttcttcgagcgcgccttcgatcaaggcgcggacgctatctacgaccacatcaacgagggggtgagggcctgtgccatccctgaccttggacccgcctgaggggtgacagtggagtagagaagctgtggaaacacatcaagcacaagtatgagaacaagtagttccttggaggcccccatccaggccagaaggaccaggtccacccagcagctgtttgcccagagctggagcctcagcttgaagatgatgctcaaggtactcttcatggaccaccattcgctgttggcaagaaacggctttacttacaaaacagactctttaccttctgctgtgtttgaagtatgtttagtcagcatgctcaggaaataaatgtgaattgccctt

SEQ ID NO: 428447 - DNA, 974 bp, Homo sapiens
  misc_feature (765)..(765): n is a, c, g, or t
  misc_feature (776)..(776): n is a, c, g, or t
  misc_feature (787)..(788): n is a, c, g, or t
aggtgatggcgcgcgagggcttctgggagttgtagtttgacatattctaacagccaggaattctggagaagaaaaattgggtaataaatcttatcagattatctgggctgtcctgatatgaaccttttgagtttttttcctcattcccaggataggaatacctctgtggttcaaaacacgaaggctgagattcagaggaactacaaatcccataaagtgttgcacgtctagggcctttggagaacgaggtcggccccagcgcaggcgcggtggcgcgagttggactgtgaagaaacatggcggccgcgacgttgacttcgaaattgtactccctgctgttccgcaggacctccaccttcgccctcaccatcatcgtgggcgtcatgttcttcgagcgcgccttcgatcaaggcgcggacgctatctacgaccacatcaacgaggggaagctgtggaaacacatcaagcacaagtatgagaacaagtagttccttggaggcccccatccaggccagaaggaccaggtccacccagcagctgtttgcccagagctggagcctcagcttgaagatgatgctcaaggtactcttcatggaccaccattcgctgttggcaagaaacggctttacttacaaaacagactctttaccttctgctgtgtttgaagtatgtttagtcagcatgctcaggaaataaatgtgaattgcccttaaaaaaaaaaaaaaaaaaaaaaaaaaaaaaaaaaaaaaaaaaaaaaaaaaaaanttttgggaaanatttggccaannccaggtgcgcctttggggagtgggtttaaattgccttgacgggggtttaaaacgcctgaactggaaaaaaccttgccctcaccaaccttaataacccccgcggttaacccccttttagcacgctgcggtaaaaccctatttggcccacccgatggcccttccaaaaagggcgccaacaagaattgt

SEQ ID NO: 428448 - DNA, 711 bp, Homo sapiens
aggtgatggcgcgcgagggcttctgggagttgtagtttgacatattctaacagccaggaattctggagaagaaaaattgggtaataaatcttatcagattatctgggctgtcctgatatgaaccttttgagtttttttcctcattcccaggataggaatacctctgtggttcaaaacacgaaggctgagattcagaggaactacaaatcccataaagtgttgcacgtctagggcctttggagaacgaggtcggccccagcgcaggcgcggtggcgcgagttggactgtgaagaaacatggcggccgcgacgttgacttcgaaattgtactccctgctgttccgcaggacctccaccttcgccctcaccatcatcgtgggcgtcatgttcttcgagcgcgccttcgatcaaggcgcggacgctatctacgaccacatcaacgaggggaagctgtggaaacacatcaagcacaagtatgagaacaagtagttccttggaggcccccatccaggccagaaggaccaggtccacccagcagctgtttgcccagagctggagcctcagcttgaagatgatgctcaaggtactcttcatggaccaccattcgctgttggcaagaaacggctttacttacaaaacagactctttaccttctgctgtgtttgaagtatgtttagtcagcatgctcaggaaataaatgtgaattgccctt

SEQ ID NO: 428449 - DNA, 1494 bp, Homo sapiens
cggggatggtcctggcatcactcagcaccctctctgaggcagcgtggattaatttatgatgggtgatgccaggaccatcctggaagagaacatccaggaccaagatgtcctattattgataaaaaagcgtgctccatcaccacttcccaagatggctgatgtctcagcagaagaaaagaaaaaacaagaccagaaagctccagataaagaggccatactgcgggccaccgccaacctgccctcctacaacatggaccgggccgcggtccagaccaacatgagagacttccagacagaactccggaagatactggtgtctctcatcgaggtggcgcagaagctgttagcgctgaacccagatgcggtggaattgtttaagaaggcgaatgcaatgctggacgaggacgaggatgagcgtgtggacgaggctgccctgcggcagctcacggagatgggctttccggagaacagagccaccaaggcccttcagctgaaccacatgtcggtgcctcaggccatggagtggctaattgaacacgcagaagacccgaccatagacacgcctcttcctggccaagctcccccagaggccgagggggccacagcagctgcctccgaggctgccgcgggagccagcgccaccgatgaggaggccagagatgagctgacggaaatcttcaagaagatccggaggaaaagggagtttcgggctgatgctcgggccgtcatttccctgatggagatggggttcgacgagaaagaggtgatagatgccctcagagtgaacaacaaccagcagaatgccgcgtgcgagtggctgctgggggaccggaagccctctccggaggagctggacaagggcatcgaccccgacagtcctctctttcaggccatcctggataacccggtggtgcagctgggcctgaccaacccgaaaacattgctagcatttgaagacatgctggagaacccactgaacagcacccagtggatgaatgatccagaaacggggcctgtcatgctgcagatctctagaatcttccagacactaaatcgcacgtaggtggcgttgttccactcggctatcaggccacagcagccccctggtgcggcccgagaccgggcagagtggacctcacctggaaactcaccttcagcgcctcagccctggactgttagaggtgctgcagctgctcctgctctctgatcttattgcttataaactttggtgacggtagtgtgtaaggccgtatttttagcatctgacaggtgtttacaaaaaagtggttgtcgcactgggaagtggagtgatggcctcgtctccagtgctcctctgggctcttgagttgctgcttgaattgccgtgtagacatttgcttggagagtccacttgttatttgacggaggtaggtttcaacccagagttaatgtcaagcatgctaatttaactagtcactcacagatgacttttctttaataaagtcccttttccta

SEQ ID NO: 428450 - DNA, 1738 bp, Homo sapiens
ccacggtgcgcgaaaccatcggctaggtacgaggcccgggtggttttagggcccgggtggcgggcgcaggcccctgcggcggcggcgggatgttcgtgcaggaggagaagatcttcgcgggcaaggtgctgcggctgcacatctgcgcgtccgacggcgccgagtggctggaggaggccaccgaggacacctcggtggagaagctcaaggagcgctgcctcaagcactgtgctcatgggagcttagaagatcccaaaagtataacccatcataaattaatccacgctgcctcagagagggtgctgagtgatgccaggaccatcctggaagagaacatccaggaccaagatgtcctattattgataaaaaagcgtgctccatcaccacttcccaagatggctgatgtctcagcagaagaaaagaaaaaacaagaccagaaagctccagataaagaggccatactgcgggccaccgccaacctgccctcctacaacatggaccgggccgcggtccagaccaacatgagagacttccagacagaactccggaagatactggtgtctctcatcgaggtggcgcagaagctgttagcgctgaacccagatgcggtggaattgtttaagaaggcgaatgcaatgctggacgaggacgaggatgagcgtgtggacgaggctgccctgcggcagctcacggagatgggctttccggagaacagagccaccaaggcccttcagctgaaccacatgtcggtgcctcaggccatggagtggctaattgaacacgcagaagacccgaccatagacacgcctcttcctggccaagctcccccagaggccgagggggccacagcagctgcctccgaggctgccgcgggagccagcgccaccgatgaggaggccagagatgagctgacggaaatcttcaagaagatccggaggaaaagggagtttcgggctgatgctcgggccgtcatttccctgatggagatggggttcgacgagaaagaggtgatagatgccctcagagtgaacaacaaccagcagaatgccgcgtgcgagtggctgctgggggaccggaagccctctccggaggagctggacaagggcatcgaccccgacagtcctctctttcaggccatcctggataacccggtggtgcagctgggcctgaccaacccgaaaacattgctagcatttgaagacatgctggagaacccactgaacagcacccagtggatgaatgatccagaaacggggcctgtcatgctgcagatctctagaatcttccagacactaaatcgcacgtaggtggcgttgttccactcggctatcaggccacagcagccccctggtgcggcccgagaccgggcagagtggacctcacctggaaactcaccttcagcgcctcagccctggactgttagaggtgctgcagctgctcctgctctctgatcttattgcttataaactttggtgacggtagtgtgtaaggccgtatttttagcatctgacaggtgtttacaaaaaagtggttgtcgcactgggaagtggagtgatggcctcgtctccagtgctcctctgggctcttgagttgctgcttgaattgccgtgtagacatttgcttggagagtccacttgttatttgacggaggtaggtttcaacccagagttaatgtcaagcatgctaatttaactagtcactcacagatgacttttctttaataaagtcccttttccta

SEQ ID NO: 428451 - DNA, 1889 bp, Homo sapiens
ggccgcgacggcgcgcccccggcggctgctgcggcggcgggagcgaggcgaccgctgaggccgcggagagtgacggcggcccggccgacgggagccggggcggggcggcggcccagcgaaggagcgcgcgggcggtctggccccgccccctccccgcccgccttcccggtgaccttcaggggcccgggtggcgggcgcaggcccctgcggcggcggcgggatgttcgtgcaggaggagaagatcttcgcgggcaaggtgctgcggctgcacatctgcgcgtccgacggcgccgagtggctggaggaggccaccgaggacacctcggtggagaagctcaaggagcgctgcctcaagcactgtgctcatgggagcttagaagatcccaaaagtataacccatcataaattaatccacgctgcctcagagagggtgctgagtgatgccaggaccatcctggaagagaacatccaggaccaagatgtcctattattgataaaaaagcgtgctccatcaccacttcccaagatggctgatgtctcagcagaagaaaagaaaaaacaagaccagaaagctccagataaagaggccatactgcgggccaccgccaacctgccctcctacaacatggaccgggccgcggtccagaccaacatgagagacttccagacagaactccggaagatactggtgtctctcatcgaggtggcgcagaagctgttagcgctgaacccagatgcggtggaattgtttaagaaggcgaatgcaatgctggacgaggacgaggatgagcgtgtggacgaggctgccctgcggcagctcacggagatgggctttccggagaacagagccaccaaggcccttcagctgaaccacatgtcggtgcctcaggccatggagtggctaattgaacacgcagaagacccgaccatagacacgcctcttcctggccaagctcccccagaggccgagggggccacagcagctgcctccgaggctgccgcgggagccagcgccaccgatgaggaggccagagatgagctgacggaaatcttcaagaagatccggaggaaaagggagtttcgggctgatgctcgggccgtcatttccctgatggagatggggttcgacgagaaagaggtgatagatgccctcagagtgaacaacaaccagcagaatgccgcgtgcgagtggctgctgggggaccggaagccctctccggaggagctggacaagggcatcgaccccgacagtcctctctttcaggccatcctggataacccggtggtgcagctgggcctgaccaacccgaaaacattgctagcatttgaagacatgctggagaacccactgaacagcacccagtggatgaatgatccagaaacggggcctgtcatgctgcagatctctagaatcttccagacactaaatcgcacgtaggtggcgttgttccactcggctatcaggccacagcagccccctggtgcggcccgagaccgggcagagtggacctcacctggaaactcaccttcagcgcctcagccctggactgttagaggtgctgcagctgctcctgctctctgatcttattgcttataaactttggtgacggtagtgtgtaaggccgtatttttagcatctgacaggtgtttacaaaaaagtggttgtcgcactgggaagtggagtgatggcctcgtctccagtgctcctctgggctcttgagttgctgcttgaattgccgtgtagacatttgcttggagagtccacttgttatttgacggaggtaggtttcaacccagagttaatgtcaagcatgctaatttaactagtcactcacagatgacttttctttaataaagtcccttttcctaaaaaaaaaagggcggccgcg

SEQ ID NO: 428452 - DNA, 1997 bp, Homo sapiens
ggccgcgacggcgcgcccccggcggctgctgcggcggcgggagcgaggcgaccgctgaggccgcggagagtgacggcggcccggccgacgggagccggggcggggcggcggcccagcgaaggagcgcgcgggcggtctggccccgccccctccccgcccgccttcccggtgaccttcaggggcccgggtggcgggcgcaggcccctgcggcggcggcgggatgttcgtgcaggaggagaagatcttcgcgggcaaggtgctgcggctgcacatctgcgcgtccgacggcgccgagtggctggaggaggccaccgaggacacctcggtggagaagctcaaggagcgctgcctcaagcactgtgctcatgggagcttagaagatcccaaaagtataacccatcataaattaatccacgctgcctcagagagggtgctgagtgatgccaggaccatcctggaagagaacatccaggaccaagatgtcctattattgataaaaaagcgtgctccatcaccacttcccaagatggctgatgtctcagcagaagaaaagaaaaaacaagaccagaaagctccagataaagaggccatactgcgggccaccgccaacctgccctcctacaacatggaccgggccgcggtccagaccaacatgagagacttccagacagaactccggaagatactggtgtctctcatcgaggtggcgcagaagctgttagcgctgaacccagatgcggtggaattgtttaagaaggcgaatgcaatgctggacgaggacgaggatgagcgtgtggacgaggctgccctgcggcagctcacggagatgggctttccggagaacagagccaccaaggcccttcagctgaaccacatgtcggtgcctcaggccatggagtggctaattgaacacgcagaagacccgaccatagacacgcctcttcctggccaagctcccccagaggccgagggggccacagcagctgcctccgaggctgccgcgggagccagcgccaccgatgaggaggccagagatgagctgacggaaatcttcaagaagatccggaggaaaagggagtttcgggctgatgctcggggagccaagtttacatctgatcctggaagcctgtccaagtggagcagtcactctccagctgggtcccttgtgctctgcggttggacttcgcactctcgtgtgttgtggtcctgcacggtctcttggaggccgtcatttccctgatggagatggggttcgacgagaaagaggtgatagatgccctcagagtgaacaacaaccagcagaatgccgcgtgcgagtggctgctgggggaccggaagccctctccggaggagctggacaagggcatcgaccccgacagtcctctctttcaggccatcctggataacccggtggtgcagctgggcctgaccaacccgaaaacattgctagcatttgaagacatgctggagaacccactgaacagcacccagtggatgaatgatccagaaacggggcctgtcatgctgcagatctctagaatcttccagacactaaatcgcacgtaggtggcgttgttccactcggctatcaggccacagcagccccctggtgcggcccgagaccgggcagagtggacctcacctggaaactcaccttcagcgcctcagccctggactgttagaggtgctgcagctgctcctgctctctgatcttattgcttataaactttggtgacggtagtgtgtaaggccgtatttttagcatctgacaggtgtttacaaaaaagtggttgtcgcactgggaagtggagtgatggcctcgtctccagtgctcctctgggctcttgagttgctgcttgaattgccgtgtagacatttgcttggagagtccacttgttatttgacggaggtaggtttcaacccagagttaatgtcaagcatgctaatttaactagtcactcacagatgacttttctttaataaagtcccttttccta

SEQ ID NO: 428453 - DNA, 1788 bp, Homo sapiens
ggccgcgacggcgcgcccccggcggctgctgcggcggcgggagcgaggcgaccgctgaggccgcggagagtgacggcggcccggccgacgggagccggggcggggcggcggcccagcgaaggagcgcgcgggcggtctggccccgccccctccccgcccgccttcccggtgaccttcaggggcccgggtggcgggcgcaggcccctgcggcggcggcgggatgttcgtgcaggaggagaagatcttcgcgggcaaggtgctgcggctgcacatctgcgcgtccgacggcgccgagtggctggaggaggccaccgaggacacctcggtggagaagctcaaggagcgctgcctcaagcactgtgctcatgggagcttagaagatcccaaaagtataacccatcataaattaatccacgctgcctcagagagggtgctgagtgatgccaggaccatcctggaagagaacatccaggaccaagatgtcctattattgataaaaaagcgtgctccatcaccacttcccaagatggctgatgtctcagcagaagaaaagaaaaaacaagaccagaaagctccagataaagaggccatactgcgggccaccgccaacctgccctcctacaacatggaccgggccgcggtccagaccaacatgagagacttccagacagaactccggaagatactggtgtctctcatcgaggtggcgcagaagctgttagcgctgaacccagatgcggtggaattgtttaagaaggcgaatgcaatgctggacgaggacgaggatgagcgtgtggacgaggctgccctgcggcagctcacggagatgggctttccggagaacagagccaccaaggcccttcagctgaaccacatgtcggtgcctcaggccatggagtggctaattgaacacgcagaagacccgaccatagacacgcctcttcctggccaagctcccccagaggccgagggggccacagcagctgcctccgaggctgccgcgggagccagcgccaccgatgaggaggccagagatgagctgacggaaatcttcaagaagatccggaggaaaagggagtttcgggctgatgctcgggccgtcatttccctgatggagatggggttcgacgagaaagaggtgatagatgccctcagagtgaacaacaaccagcagaatgccgcggccatcctggataacccggtggtgcagctgggcctgaccaacccgaaaacattgctagcatttgaagacatgctggagaacccactgaacagcacccagtggatgaatgatccagaaacggggcctgtcatgctgcagatctctagaatcttccagacactaaatcgcacgtaggtggcgttgttccactcggctatcaggccacagcagccccctggtgcggcccgagaccgggcagagtggacctcacctggaaactcaccttcagcgcctcagccctggactgttagaggtgctgcagctgctcctgctctctgatcttattgcttataaactttggtgacggtagtgtgtaaggccgtatttttagcatctgacaggtgtttacaaaaaagtggttgtcgcactgggaagtggagtgatggcctcgtctccagtgctcctctgggctcttgagttgctgcttgaattgccgtgtagacatttgcttggagagtccacttgttatttgacggaggtaggtttcaacccagagttaatgtcaagcatgctaatttaactagtcactcacagatgacttttctttaataaagtcccttttccta

SEQ ID NO: 428454 - DNA, 1529 bp, Homo sapiens
tgctgggattacagatgggagccactgcgcccggccgaatccctgctgttctgttctcagggcatccagcaccctttatgccattttgtggatatgaagtgataaccagtgtgttggatatacgtgttgttttttctagatgtcctattattgataaaaaagcgtgctccatcaccacttcccaagatggctgatgtctcagcagaagaaaagaaaaaacaagaccagaaagctccagataaagaggccatactgcgggccaccgccaacctgccctcctacaacatggaccgggccgcggtccagaccaacatgagagacttccagacagaactccggaagatactggtgtctctcatcgaggtggcgcagaagctgttagcgctgaacccagatgcggtggaattgtttaagaaggcgaatgcaatgctggacgaggacgaggatgagcgtgtggacgaggctgccctgcggcagctcacggagatgggctttccggagaacagagccaccaaggcccttcagctgaaccacatgtcggtgcctcaggccatggagtggctaattgaacacgcagaagacccgaccatagacacgcctcttcctggccaagctcccccagaggccgagggggccacagcagctgcctccgaggctgccgcgggagccagcgccaccgatgaggaggccagagatgagctgacggaaatcttcaagaagatccggaggaaaagggagtttcgggctgatgctcgggccgtcatttccctgatggagatggggttcgacgagaaagaggtgatagatgccctcagagtgaacaacaaccagcagaatgccgcgtgcgagtggctgctgggggaccggaagccctctccggaggagctggacaagggcatcgaccccgacagtcctctctttcaggccatcctggataacccggtggtgcagctgggcctgaccaacccgaaaacattgctagcatttgaagacatgctggagaacccactgaacagcacccagtggatgaatgatccagaaacggggcctgtcatgctgcagatctctagaatcttccagacactaaatcgcacgtaggtggcgttgttccactcggctatcaggccacagcagccccctggtgcggcccgagaccgggcagagtggacctcacctggaaactcaccttcagcgcctcagccctggactgttagaggtgctgcagctgctcctgctctctgatcttattgcttataaactttggtgacggtagtgtgtaaggccgtatttttagcatctgacaggtgtttacaaaaaagtggttgtcgcactgggaagtggagtgatggcctcgtctccagtgctcctctgggctcttgagttgctgcttgaattgccgtgtagacatttgcttggagagtccacttgttatttgacggaggtaggtttcaacccagagttaatgtcaagcatgctaatttaactagtcactcacagatgacttttctttaataaagtcccttttccta

SEQ ID NO: 428455 - DNA, 1485 bp, Homo sapiens
  misc_feature (1168)..(1168): n is a, c, g, or t
  misc_feature (1179)..(1179): n is a, c, g, or t
  misc_feature (1221)..(1221): n is a, c, g, or t
  misc_feature (1260)..(1260): n is a, c, g, or t
ggccgcgacggcgcgcccccggcggctgctgcggcggcgggagcgaggcgaccgctgaggccgcggagagtgacggcggcccggccgacgggagccggggcggggcggcggcccagcgaaggagcgcgcgggcggtctggccccgccccctccccgcccgccttcccggtgaccttcaggggcccgggtggcgggcgcaggcccctgcggcggcggcgggatgttcgtgcaggaggagaagatcttcgcgggcaaggtgctgcggctgcacatctgcgcgtccgacggcgccgagtggctggaggaggccaccgaggacacctcggtggagaagctcaaggagcgctgcctcaagcactgtgctcatgggagcttagaagatcccaaaagtataacccatcataaattaatccacgctgcctcagagagggtgctgagtgatgccaggaccatcctggaagagaacatccaggaccaagatgtcctattattgataaaaaagcgtgctccatcaccacttcccaagatggctgatgtctcagcagaagaaaagaaaaaacaagaccagaaagctccagataaagaggccatactgcgggccaccgccaacctgccctcctacaacatggaccgggccgcggtccagaccaacatgagagacttccagacagaactccggaagatactggtgtctctcatcgaggtggcgcagaagctgttagcgctgaacccagatgcggtggaattgtttaagaaggcgaatgcaatgctggacgaggacgaggatgagcgtgtggacgaggctgccctgcggcagctcacggagatgggctttccggagaacagagccaccaaggcccttcagctgaaccacatgtcggtgcctcaggccatggagtggctaattgaacacgcagaagacccgaccatagacacgcctcttcctggccaagctcccccagaggccgagggggccacagcagctgcctccgaggctgccgcgggagccagcgccaccgatgaggaggccagagatgagctgacggaaatcttcaagaagatccggaggaaaagggagtttcgggctgatgctcgggccgtcatttccctgatggagatggggttcgacgagaaagaggtgattctctgggaggatttggggaagccngtgagcgggtntgtaggactgcactattttgcattttttctgtaaatcaaaanttatttccaagtaagagttggaaagccatctgaaggcangattgaaaagatagatacccctgggaaaacgtcaatccggccctgagtttggcaaaacgtttagatagaattctgaacccgaagcgggtggatcacctgaggtcagaagtttcgagaccagcctggccaacatgatgaaacgctgtctttactaaaaatacaaaaaattagttgggcatggtggtatgcacctgtaatcccagctactctggagctgaggcagag

SEQ ID NO: 428456 - DNA, 1618 bp, Homo sapiens
ctccttcccttgccggagacacctggggcctggttttgtggggctcccaccgtgggtgacgtcctcctaccctaaactctttgactgaatcatttctaacgtggggttttgaagaggtaccttaaatatgtgcctccaaagtgtttttggggtgaatgtgacagaacagtcgttgtgtaaattctctttgggccgttgtatgagaactcaaggtgaatcccgttcgtagcagggacacggcctctaacagtcttctcaggattcccgtgtgagttacttgccctgcttctgtgttcagatctaaaatgaataatccgagatccaggggcagccgggggcagttccccctgtggtccctatctaagccctcagcagatatctctgggtccgcttgcctctccttagacatgggcttctgattctgcccagggtctcaaggtagtctgaggcaaggaccagcgcttccgtcgcacctgtgttcattcaggttcttgttataagggtcaccagctgatgctggagaagtcactaccatagcagaggctcttcttgggaatggacaggaggcgaaggccctggtccgttagtctggggatgttggaaagagtctcttgccttgcagcatgtcggtgcctcaggccatggagtggctaattgaacacgcagaagacccgaccatagacacgcctcttcctggccaagctcccccagaggccgagggggccacagcagctgcctccgaggctgccgcgggagccagcgccaccgatgaggaggccagagatgagctgacggaaatcttcaagaagatccggaggaaaagggagtttcgggctgatgctcgggccgtcatttccctgatggagatggggttcgacgagaaagaggtgatagatgccctcagagtgaacaacaaccagcagaatgccgcgtgcgagtggctgctgggggaccggaagccctctccggaggagctggacaagggcatcgaccccgacagtcctctctttcaggccatcctggataacccggtggtgcagctgggcctgaccaacccgaaaacattgctagcatttgaagacatgctggagaacccactgaacagcacccagtggatgaatgatccagaaacggggcctgtcatgctgcagatctctagaatcttccagacactaaatcgcacgtaggtggcgttgttccactcggctatcaggccacagcagccccctggtgcggcccgagaccgggcagagtggacctcacctggaaactcaccttcagcgcctcagccctggactgttagaggtgctgcagctgctcctgctctctgatcttattgcttataaactttggtgacggtagtgtgtaaggccgtatttttagcatctgacaggtgtttacaaaaaagtggttgtcgcactgggaagtggagtgatggcctcgtctccagtgctcctctgggctcttgagttgctgcttgaattgccgtgtagacatttgcttggagagtccacttgttatttgacggaggtaggtttcaacccagagttaatgtcaagcatgctaatttaactagtcactcacagatgacttttctttaataaagtcccttttccta

SEQ ID NO: 428457 - DNA, 1746 bp, Homo sapiens
ctccttcccttgccggagacacctggggcctggttttgtggggctcccaccgtgggtgacgtcctcctaccctaaactctttgactgaatcatttctaacgtggggttttgaagaggtaccttaaatatgtgcctccaaagtgtttttggggtgaatgtgacagaacagtcgttgtgtaaattctctttgggccgttgtatgagaactcaaggtgaatcccgttcgtagcagggacacggcctctaacagtcttctcaggattcccgtgtgagttacttgccctgcttctgtgttcagatctaaaatgaataatccgagatccaggggcagccgggggcagttccccctgtggtccctatctaagccctcagcagatatctctgggtccgcttgcctctccttagacatgggcttctgattctgcccagggtctcaaggtagtctgaggcaaggaccagcgcttccgtcgcacctgtgttcattcaggttcttgttataagggtcaccagctgatgctggagaagtcactaccatagcagaggctcttcttgggaatggacaggaggcgaaggccctggtccgttagtctggggatgttggaaagagtctcttgccttgcagcatgtcggtgcctcaggccatggagtggctaattgaacacgcagaagacccgaccatagacacgcctcttcctggccaagctcccccagaggccgagggggccacagcagctgcctccgaggctgccgcgggagccagcgccaccgatgaggaggccagagatgagctgacggaaatcttcaagaagatccggaggaaaagggagtttcgggctgatgctcggggagccaagtttacatctgatcctggaagcctgtccaagtggagcagtcactctccagctgggtcccttgtgctctgcggttggacttcgcactctcgtgtgttgtggtcctgcacggtctcttggaggccgtcatttccctgatggagatggggttcgacgagaaagaggtgatagatgccctcagagtgaacaacaaccagcagaatgccgcgtgcgagtggctgctgggggaccggaagccctctccggaggagctggacaagggcatcgaccccgacagtcctctctttcaggccatcctggataacccggtggtgcagctgggcctgaccaacccgaaaacattgctagcatttgaagacatgctggagaacccactgaacagcacccagtggatgaatgatccagaaacggggcctgtcatgctgcagatctctagaatcttccagacactaaatcgcacgtaggtggcgttgttccactcggctatcaggccacagcagccccctggtgcggcccgagaccgggcagagtggacctcacctggaaactcaccttcagcgcctcagccctggactgttagaggtgctgcagctgctcctgctctctgatcttattgcttataaactttggtgacggtagtgtgtaaggccgtatttttagcatctgacaggtgtttacaaaaaagtggttgtcgcactgggaagtggagtgatggcctcgtctccagtgctcctctgggctcttgagttgctgcttgaattgccgtgtagacatttgcttggagagtccacttgttatttgacggaggtaggtttcaacccagagttaatgtcaagcatgctaatttaactagtcactcacagatgacttttctttaataaagtcccttttccta

SEQ ID NO: 428458 - DNA, 970 bp, Homo sapiens
ggccgcgacggcgcgcccccggcggctgctgcggcggcgggagcgaggcgaccgctgaggccgcggagagtgacggcggcccggccgacgggagccggggcggggcggcggcccagcgaaggagcgcgcgggcggtctggccccgccccctccccgcccgccttcccggtgaccttcaggggcccgggtggcgggcgcaggcccctgcggcggcggcgggatgttcgtgcaggaggagaagatcttcgcgggcaaggtgctgcggctgcacatctgcgcgtccgacggcgccgagtggctggaggaggccaccgaggacacctcggtggagaagctcaaggagcgctgcctcaagcactgtgctcatgggagcttagaagatcccaaaagtataacccatcataaattaatccacgctgcctcagagagggtgctgagtgatgccaggaccatcctggaagagaacatccaggaccaagatgtcctattattgataaaaaagcgtgctccatcaccacttcccaagatggctgatgtctcagcagaagaaaagaaaaaacaagaccagaaagctccagataaagaggccatactgcgggccaccgccaacctgccctcctacaacatggaccgggccgcggtccagaccaacatgagagacgtgagtgtcagcccagagcggcggcgggtgcatggggtccccgtgtgggggattgctgtgggggggttcctgcggggcggggcagcaagaggagattctctgggaggatttggggaagccggtgagcgggtctgtaggactgcactattttgcattttttctgtaaatcaaaaattatttccaagtaagagttggaaagccatctgaaggcaggattgaaaagatagatacccctgggaaaacgtcaatccggccctgagtttggcaaaacgtttagatagaattctgaacccgaagcgggtggatcac

SEQ ID NO: 428459 - DNA, 401 bp, Homo sapiens
gacagcgtcctcagtgctgttgggagcaccctccgctagggtgcggggagcgggcccctctgcacgcaggtcactggttcctcggcctcctgccgcccccagcgagctaacggctgtgctgtcctctaggccgtcatttccctgatggagatggggttcgacgagaaagaggtgatagatgccctcagagtgaacaacaaccagcagaatgccgcggtgagtgttgggctgtggtgagtgagtgtgggctgtggtgagtgagtgtgggctgtggtaagtgtgggctgtggtgagtgagtgtgggctgtggtgagtgagtgtgggctgtggtgagtgtgggctgtggtgagtgagtgggggctgtgatgagtgagtgtgggctgagtgagtgtgggctgtgg

SEQ ID NO: 428460 - DNA, 1869 bp, Homo sapiens
ggccgcgacggcgcgcccccggcggctgctgcggcggcgggagcgaggcgaccgctgaggccgcggagagtgacggcggcccggccgacgggagccggggcggggcggcggcccagcgaaggagcgcgcgggcggtctggccccgccccctccccgcccgccttcccggtgaccttcaggggcccgggtggcgggcgcaggcccctgcggcggcggcgggatgttcgtgcaggaggagaagatcttcgcgggcaaggtgctgcggctgcacatctgcgcgtccgacggcgccgagtggctggaggaggccaccgaggacacctcggtggagaagctcaaggagcgctgcctcaagcactgtgctcatgggagcttagaagatcccaaaagtataacccatcataaattaatccacgctgcctcagagagggtgctgagtgatgccaggaccatcctggaagagaacatccaggaccaagatgtcctattattgataaaaaagcgtgctccatcaccacttcccaagatggctgatgtctcagcagaagaaaagaaaaaacaagaccagaaagctccagataaagaggccatactgcgggccaccgccaacctgccctcctacaacatggaccgggccgcggtccagaccaacatgagagacttccagacagaactccggaagatactggtgtctctcatcgaggtggcgcagaagctgttagcgctgaacccagatgcggtggaattgtttaagaaggcgaatgcaatgctggacgaggacgaggatgagcgtgtggacgaggctgccctgcggcagctcacggagatgggctttccggagaacagagccaccaaggcccttcagctgaaccacatgtcggtgcctcaggccatggagtggctaattgaacacgcagaagacccgaccatagacacgcctcttcctggccaagctcccccagaggccgagggggccacagcagctgcctccgaggctgccgcgggagccagcgccaccgatgaggaggccagagatgagctgacggaaatcttcaagaagatccggaggaaaagggagtttcgggctgatgctcgggccgtcatttccctgatggagatggggttcgacgagaaagaggtgatagatgccctcagagtgaacaacaaccagcagaatgccgcgtgcgagtggctgctgggggaccggaagccctctccggaggagctggacaagggcatcgaccccgacagtcctctctttcaggccatcctggataacccggtggtgcagctgggcctgaccaacccgaaaacattgctagcatttgaagacatgctggagaacccactgaacagcacccagtggatgaatgatccagaaacggggcctgtcatgctgcagatctctagaatcttccagacactaaatcgcacgtaggtggcgttgttccactcggctatcaggccacagcagccccctggtgcggcccgagaccgggcagagtggacctcacctggaaactcaccttcagcgcctcagccctggactgttagaggtgctgcagctgctcctgctctctgatcttattgcttataaactttggtgacggtagtgtgtaaggccgtatttttagcatctgacaggtgtttacaaaaaagtggttgtcgcactgggaagtggagtgatggcctcgtctccagtgctcctctgggctcttgagttgctgcttgaattgccgtgtagacatttgcttggagagtccacttgttatttgacggaggtaggtttcaacccagagttaatgtcaagcatgctaatttaactagtcactcacagatgacttttctttaataaagtcccttttccta

SEQ ID NO: 428461 - DNA, 1738 bp, Homo sapiens
  misc_feature (25)..(25): n is a, c, g, or t
  misc_feature (30)..(31): n is a, c, g, or t
  misc_feature (44)..(44): n is a, c, g, or t
  misc_feature (46)..(46): n is a, c, g, or t
aggaggagggagcaaaaacataagnctagnncgaggctgggtgntncagggcccgggtggcgggcgcaggcccctgcggcggcggcgggatgttcgtgcaggaggagaagatcttcgcgggcaaggtgctgcggctgcacatctgcgcgtccgacggcgccgagtggctggaggaggccaccgaggacacctcggtggagaagctcaaggagcgctgcctcaagcactgtgctcatgggagcttagaagatcccaaaagtataacccatcataaattaatccacgctgcctcagagagggtgctgagtgatgccaggaccatcctggaagagaacatccaggaccaagatgtcctattattgataaaaaagcgtgctccatcaccacttcccaagatggctgatgtctcagcagaagaaaagaaaaaacaagaccagaaagctccagataaagaggccatactgcgggccaccgccaacctgccctcctacaacatggaccgggccgcggtccagaccaacatgagagacttccagacagaactccggaagatactggtgtctctcatcgaggtggcgcagaagctgttagcgctgaacccagatgcggtggaattgtttaagaaggcgaatgcaatgctggacgaggacgaggatgagcgtgtggacgaggctgccctgcggcagctcacggagatgggctttccggagaacagagccaccaaggcccttcagctgaaccacatgtcggtgcctcaggccatggagtggctaattgaacacgcagaagacccgaccatagacacgcctcttcctggccaagctcccccagaggccgagggggccacagcagctgcctccgaggctgccgcgggagccagcgccaccgatgaggaggccagagatgagctgacggaaatcttcaagaagatccggaggaaaagggagtttcgggctgatgctcgggccgtcatttccctgatggagatggggttcgacgagaaagaggtgatagatgccctcagagtgaacaacaaccagcagaatgccgcgtgcgagtggctgctgggggaccggaagccctctccggaggagctggacaagggcatcgaccccgacagtcctctctttcaggccatcctggataacccggtggtgcagctgggcctgaccaacccgaaaacattgctagcatttgaagacatgctggagaacccactgaacagcacccagtggatgaatgatccagaaacggggcctgtcatgctgcagatctctagaatcttccagacactaaatcgcacgtaggtggcgttgttccactcggctatcaggccacagcagccccctggtgcggcccgagaccgggcagagtggacctcacctggaaactcaccttcagcgcctcagccctggactgttagaggtgctgcagctgctcctgctctctgatcttattgcttataaactttggtgacggtagtgtgtaaggccgtatttttagcatctgacaggtgtttacaaaaaagtggttgtcgcactgggaagtggagtgatggcctcgtctccagtgctcctctgggctcttgagttgctgcttgaattgccgtgtagacatttgcttggagagtccacttgttatttgacggaggtaggtttcaacccagagttaatgtcaagcatgctaatttaactagtcactcacagatgacttttctttaataaagtcccttttccta

SEQ ID NO: 428462 - DNA, 1724 bp, Homo sapiens
ggggaggaactaagctagtagagctggtgttgcagggcccgggtggcgggcgcaggcccctgcggcggcggcgggatgttcgtgcaggaggagaagatcttcgcgggcaaggtgctgcggctgcacatctgcgcgtccgacggcgccgagtggctggaggaggccaccgaggacacctcggtggagaagctcaaggagcgctgcctcaagcactgtgctcatgggagcttagaagatcccaaaagtataacccatcataaattaatccacgctgcctcagagagggtgctgagtgatgccaggaccatcctggaagagaacatccaggaccaagatgtcctattattgataaaaaagcgtgctccatcaccacttcccaagatggctgatgtctcagcagaagaaaagaaaaaacaagaccagaaagctccagataaagaggccatactgcgggccaccgccaacctgccctcctacaacatggaccgggccgcggtccagaccaacatgagagacttccagacagaactccggaagatactggtgtctctcatcgaggtggcgcagaagctgttagcgctgaacccagatgcggtggaattgtttaagaaggcgaatgcaatgctggacgaggacgaggatgagcgtgtggacgaggctgccctgcggcagctcacggagatgggctttccggagaacagagccaccaaggcccttcagctgaaccacatgtcggtgcctcaggccatggagtggctaattgaacacgcagaagacccgaccatagacacgcctcttcctggccaagctcccccagaggccgagggggccacagcagctgcctccgaggctgccgcgggagccagcgccaccgatgaggaggccagagatgagctgacggaaatcttcaagaagatccggaggaaaagggagtttcgggctgatgctcgggccgtcatttccctgatggagatggggttcgacgagaaagaggtgatagatgccctcagagtgaacaacaaccagcagaatgccgcgtgcgagtggctgctgggggaccggaagccctctccggaggagctggacaagggcatcgaccccgacagtcctctctttcaggccatcctggataacccggtggtgcagctgggcctgaccaacccgaaaacattgctagcatttgaagacatgctggagaacccactgaacagcacccagtggatgaatgatccagaaacggggcctgtcatgctgcagatctctagaatcttccagacactaaatcgcacgtaggtggcgttgttccactcggctatcaggccacagcagccccctggtgcggcccgagaccgggcagagtggacctcacctggaaactcaccttcagcgcctcagccctggactgttagaggtgctgcagctgctcctgctctctgatcttattgcttataaactttggtgacggtagtgtgtaaggccgtatttttagcatctgacaggtgtttacaaaaaagtggttgtcgcactgggaagtggagtgatggcctcgtctccagtgctcctctgggctcttgagttgctgcttgaattgccgtgtagacatttgcttggagagtccacttgttatttgacggaggtaggtttcaacccagagttaatgtcaagcatgctaatttaactagtcactcacagatgacttttctttaataaagtcccttttccta

SEQ ID NO: 428463 - DNA, 1911 bp, Homo sapiens
  misc_feature (1892)..(1893): n is a, c, g, or t
  misc_feature (1904)..(1904): n is a, c, g, or t
ggccgcgacggcgcgcccccggcggctgctgcggcggcgggagcgaggcgaccgctgaggccgcggagagtgacggcggcccggccgacgggagccggggcggggcggcggcccagcgaaggagcgcgcgggcggtctggccccgccccctccccgcccgccttcccggtgaccttcaggggcccgggtggcgggcgcaggcccctgcggcggcggcgggatgttcgtgcaggaggagaagatcttcgcgggcaaggtgctgcggctgcacatctgcgcgtccgacggcgccgagtggctggaggaggccaccgaggacacctcggtggagaagctcaaggagcgctgcctcaagcactgtgctcatgggagcttagaagatcccaaaagtataacccatcataaattaatccacgctgcctcagagagggtgctgagtgatgccaggaccatcctggaagagaacatccaggaccaagatgtcctattattgataaaaaagcgtgctccatcaccacttcccaagatggctgatgtctcagcagaagaaaagaaaaaacaagaccagaaagctccagataaagaggccatactgcgggccaccgccaacctgccctcctacaacatggaccgggccgcggtccagaccaacatgagagacttccagacagaactccggaagatactggtgtctctcatcgaggtggcgcagaagctgttagcgctgaacccagatgcggtggaattgtttaagaaggcgaatgcaatgctggacgaggacgaggatgagcgtgtggacgaggctgccctgcggcagctcacggagatgggctttccggagaacagagccaccaaggcccttcagctgaaccacatgtcggtgcctcaggccatggagtggctaattgaacacgcagaagacccgaccatagacacgcctcttcctggccaagctcccccagaggccgagggggccacagcagctgcctccgaggctgccgcgggagccagcgccaccgatgaggaggccagagatgagctgacggaaatcttcaagaagatccggaggaaaagggagtttcgggctgatgctcgggccgtcatttccctgatggagatggggttcgacgagaaagaggtgatagatgccctcagagtgaacaacaaccagcagaatgccgcgtgcgagtggctgctgggggaccggaagccctctccggaggagctggacaagggcatcgaccccgacagtcctctctttcaggccatcctggataacccggtggtgcagctgggcctgaccaacccgaaaacattgctagcatttgaagacatgctggagaacccactgaacagcacccagtggatgaatgatccagaaacggggcctgtcatgctgcagatctctagaatcttccagacactaaatcgcacgtaggtggcgttgttccactcggctatcaggccacagcagccccctggtgcggcccgagaccgggcagagtggacctcacctggaaactcaccttcagcgcctcagccctggactgttagaggtgctgcagctgctcctgctctctgatcttattgcttataaactttggtgacggtagtgtgtaaggccgtatttttagcatctgacaggtgtttacaaaaaagtggttgtcgcactgggaagtggagtgatggcctcgtctccagtgctcctctgggctcttgagttgctgcttgaattgccgtgtagacatttgcttggagagtccacttgttatttgacggaggtaggtttcaacccagagttaatgtcaagcatgctaatttaactagtcactcacagatgacttttctttaataaagtcccttttcctaaaacaaaaaaaaaacaaaaaaannaaaaaaaacanaaaaaca

SEQ ID NO: 428464 - DNA, 1849 bp, Homo sapiens
ggccgcgacggcgcgcccccggcggctgctgcggcggcgggagcgaggcgaccgctgaggccgcggagagtgacggcggcccggccgacgggagccggggcggggcggcggcccagcgaaggagcgcgcgggcggtctggccccgccccctccccgcccgccttcccggtgaccttcaggggcccgggtggcgggcgcaggcccctgcggcggcggcgggatgttcgtgcaggaggagaagatcttcgcgggcaaggtgctgcggctgcacatctgcgcgtccgacggcgccgagtggctggaggaggccaccgaggacacctcggtggagaagctcaaggagcgctgcctcaagcactgtgctcatgggagcttagaagatcccaaaagtataacccatcataaattaatccacgctgcctcagagagggtgctgagtgatgccaggaccatcctggaagagaacatccaggaccaagatgtcctattattgataaaaaagcgtgctccatcaccacttcccaagatggctgatgtctcagcagaagaaaagaaaaaacaagaccagaaagctccagataaagaggccatactgcgggccaccgccaacctgccctcctacaacatggaccgggccgcggtccagaccaacatgagagacttccagacagaactccggaagatactggtgtctctcatcgaggtggcgcagaagctgttagcgctgaacccagatgcggtggaattgtttaagaaggcgaatgcaatgctggacgaggacgaggatgagcgtgtggacgaggctgccctgcggcagctcacggagatgggctttccggagaacagagccaccaaggcccttcagctgaaccacatgtcggtgcctcaggccatggagtggctaattgaacacgcagaagacccgaccatagacacgcctcttcctggccaagctcccccagaggccgagggggccacagcagctgcctccgaggctgccgcgggagccagcgccaccgatgaggaggccagagatgagctgacggaaatcttcaagaagatccggaggaaaagggagtttcgggctgatgctcgggccgtcatttccctgatggagatggggttcgacgagaaagaggtgatagatgccctcagagtgaacaacaaccagcagaatgccgcgtgcgagtggctgctgggggaccggaagccctctccggaggagctggacaagggcatcgaccccgacagtcctctctttcaggccatcctggataacccggtggtgcagctgggcctgaccaacccgaaaacattgctagcatttgaagacatgctggagaacccactgaacagcacccagtggatgaatgatccagaaacggggcctgtcatgctgcagatctctagaatcttccagacactaaatcgcacgtaggtggcgttgttccactcggctatcaggccacagcagccccctggtgcggcccgagaccgggcagagtggacctcacctggaaactcaccttcagcgcctcagccctggactgttagaggtgctgcagctgctcctgctctctgatcttattgcttataaactttggtgacggtagtgtgtaaggccgtatttttagcatctgacaggtgtttacaaaaaatggagtgatggcctcgtctccagtgctcctctgggctcttgagttgctgcttgaattgccgtgtagacatttgcttggagagtccacttgttatttgacggaggtaggtttcaacccagagttaatgtcaagcatgctaatttaactagtcactcacagatgacttttctttaataaagtcccttttccta

SEQ ID NO: 428465 - DNA, 1734 bp, Homo sapiens
ggccgcgacggcgcgcccccggcggctgctgcggcggcgggagcgaggcgaccgctgaggccgcggagagtgacggcggcccggccgacgggagccggggcggggcggcggcccagcgaaggagcgcgcgggcggtctggccccgccccctccccgcccgccttcccggtgaccttcaggggcccgggtggcgggcgcaggcccctgcggcggcggcgggatgttcgtgcaggaggagaagatcttcgcgggcaaggtgctgcggctgcacatctgcgcgtccgacggcgccgagtggctggaggaggccaccgaggacacctcggtggagaagctcaaggagcgctgcctcaagcactgtgctcatgggagcttagaagatcccaaaagtataacccatcataaattaatccacgctgcctcagagagggtgctgagtgatgccaggaccatcctggaagagaacatccaggaccaagatgtcctattattgataaaaaagcgtgctccatcaccacttcccaagatggctgatgtctcagcagaagaaaagaaaaaacaagaccagaaagctccagataaagaggccatactgcgggccaccgccaacctgccctcctacaacatggaccgggccgcggtccagaccaacatgagagacttccagacagaactccggaagatactggtgtctctcatcgaggtggcgcagaagctgttagcgctgaacccagatgcggtggaattgtttaagaaggcgaatgcaatgctggacgaggacgaggatgagcgtgtggacgaggctgccctgcggcagctcacggagatgggctttccggagaacagagccaccaaggcccttcagctgaaccacatgtcggtgcctcaggccatggagtggctaattgaacacgcagaagacccgaccatagacacgcctcttcctggccaagctcccccagaggccgagggggccacagcagctgcctccgaggctgccgcgggagccagcgccaccgatgaggaggccagagatgagctgacggaaatcttcaagaagatccggaggaaaagggagtttcgggctgatgctcgggccgtcatttccctgatggagatggggttcgacgagaaagaggtgatagatgccctcagagtgaacaacaaccagcagaatgccgcgtgcgagtggctgctgggggaccggaagccctctccggaggagctggacaagggcatcgaccccgacagtcctctctttcaggccatcctggataacccggtggtgcagctgggcctgaccaacccgaaaacattgctagcatttgaagacatgctggagaacccactgaacagcacccagtggatgaatgatccagaaacggggcctgtcatgctgcagatctctagaatcttccagacactaaatcgcacgtaggtggcgttgttccactcggctatcaggccacagcagccccctggtgcggcccgagaccgggcagagtggacctcacctggaaactcaccttcagcgcctcagccctggactgttagaggtgctgcaggtgctcctctgggctcttgagttgctgcttgaattgccgtgtagacatttgcttggagagtccacttgttatttgacggaggtaggtttcaacccagagttaatgtcaagcatgctaatttaactagtcactcacagatgacttttctttaataaagtcccttttccta

SEQ ID NO: 428466 - DNA, 1583 bp, Homo sapiens
cagctcatcaaggagtttacacctctggctcctaaaggagacggagtctttcttgggcagagctccgctgattcagttgtcatcgtctttttgctgctcttacgttcacctcagactttctgattacgtttctgtgtagaaaaaacaagaccagaaagctccagataaagaggccatactgcgggccaccgccaacctgccctcctacaacatggaccgggccgcggtccagaccaacatgagagacttccagacagaactccggaagatactggtgtctctcatcgaggtggcgcagaagctgttagcgctgaacccagatgcggtggaattgtttaagaaggcgaatgcaatgctggacgaggacgaggatgagcgtgtggacgaggctgccctgcggcagctcacggagatgggctttccggagaacagagccaccaaggcccttcagctgaaccacatgtcggtgcctcaggccatggagtggctaattgaacacgcagaagacccgaccatagacacgcctcttcctggccaagctcccccagaggccgagggggccacagcagctgcctccgaggctgccgcgggagccagcgccaccgatgaggaggccagagatgagctgacggaaatcttcaagaagatccggaggaaaagggagtttcgggctgatgctcggggagccaagtttacatctgatcctggaagcctgtccaagtggagcagtcactctccagctgggtcccttgtgctctgcggttggacttcgcactctcgtgtgttgtggtcctgcacggtctcttggaggccgtcatttccctgatggagatggggttcgacgagaaagaggtgatagatgccctcagagtgaacaacaaccagcagaatgccgcgtgcgagtggctgctgggggaccggaagccctctccggaggagctggacaagggcatcgaccccgacagtcctctctttcaggccatcctggataacccggtggtgcagctgggcctgaccaacccgaaaacattgctagcatttgaagacatgctggagaacccactgaacagcacccagtggatgaatgatccagaaacggggcctgtcatgctgcagatctctagaatcttccagacactaaatcgcacgtaggtggcgttgttccactcggctatcaggccacagcagccccctggtgcggcccgagaccgggcagagtggacctcacctggaaactcaccttcagcgcctcagccctggactgttagaggtgctgcagctgctcctgctctctgatcttattgcttataaactttggtgacggtagtgtgtaaggccgtatttttagcatctgacaggtgtttacaaaaaagtggttgtcgcactgggaagtggagtgatggcctcgtctccagtgctcctctgggctcttgagttgctgcttgaattgccgtgtagacatttgcttggagagtccacttgttatttgacggaggtaggtttcaacccagagttaatgtcaagcatgctaatttaactagtcactcacagatgacttttctttaataaagtcccttttccta

SEQ ID NO: 428467 - DNA, 1074 bp, Homo sapiens
cacataagcgatgcgtttctacctgtcacaacctgtggctccctgaagacaagcctgggagctgcactgccccccggctctgctaactacagtcatccctgcacttcctcggctttaggatgctgaaaaccaagatctgttttagcagagctgtgaggaaagaacgtggacggacagcgtcctcagtgctgttgggagcaccctccgctagggtgcggggagcgggcccctctgcacgcaggtcactggttcctcggcctcctgccgcccccagcgagctaacggctgtgctgtcctctaggccgtcatttccctgatggagatggggttcgacgagaaagaggtgatagatgccctcagagtgaacaacaaccagcagaatgccgcgtgcgagtggctgctgggggaccggaagccctctccggaggagctggacaagggcatcgaccccgacagtcctctctttcaggccatcctggataacccggtggtgcagctgggcctgaccaacccgaaaacattgctagcatttgaagacatgctggagaacccactgaacagcacccagtggatgaatgatccagaaacggggcctgtcatgctgcagatctctagaatcttccagacactaaatcgcacgtaggtggcgttgttccactcggctatcaggccacagcagccccctggtgcggcccgagaccgggcagagtggacctcacctggaaactcaccttcagcgcctcagccctggactgttagaggtgctgcagctgctcctgctctctgatcttattgcttataaactttggtgacggtagtgtgtaaggccgtatttttagcatctgacaggtgtttacaaaaaagtggttgtcgcactgggaagtggagtgatggcctcgtctccagtgctcctctgggctcttgagttgctgcttgaattgccgtgtagacatttgcttggagagtccacttgttatttgacggaggtaggtttcaacccagagttaatgtcaagcatgctaatttaactagtcactcacagatgacttttctttaataaagtcccttttccta

SEQ ID NO: 428468 - DNA, 264 bp, Homo sapiens
tgcgagtggctgctgggggaccggaagccctctccggaggagctggacaagggcatcgaccccgacagtcctctctttcaggccatcctggataacccggtggtgcagctgggcctgaccaacccgaaaacattgctaggtatgtgcgccttctttatgctaagtctcgggtcggggaggctggctggttcccttgcaggacaaataggtgctgcggaggcgatacggaggatccagcgctgaggatcgccgtgcgctggcagc

SEQ ID NO: 428469 - DNA, 2277 bp, Homo sapiens
aaacggatcgcgttgggtgaaggtgacggcgtcgagccattgacttccaaagactcctggcacatgaggaagaaacccagaagaggagagcaaaggagtcaggaatggcttttactcagttgacattcagggacgtggccatcgaattctctcaagatgagtggaaatgcctgaactctacacagaggactttatacagggatgtgatgttggagaactacaggaacctggtctccctggatctgtctcgtaactgtgtaatcaaggaactagcaccacaacaggaaggtaacccaggagaagtattccacacagtgacattggaacaacatgaaaaacatgacattgaagagttttgcttcagggaaatcaagaaaaaaatacacgactttgactgtcagtggagagatgatgaaagaaattgcaacaaagtgactacggccccaaaagaaaatcttacttgtaggagagaccaacgcgatagaagaggtataggaaacaagtctattaaacatcagcttggattaagctttctaccacatccccatgaactgcagcagtttcaagctgaagggaaaatttatgaatgtaaccatgttgagaagtctgtcaaccatggttcctcagtttcaccaccccaaatactttcttctaccgtcaaaacccatgtttctaataaatatgggactgatttcatctgttcttcattactcacacaagaacagaaatcatgcattagggaaaaaccttacagatatattgagtgcgacaaagccttgaatcatggctcacacatgactgtacgtcaggtaagtcattctggagagaaaggatataaatgtgatctgtgtggcaaggtctttagtcaaaaatcaaaccttgcgcgtcattggagagttcatactggagagaaaccatacaaatgtaatgaatgtgacagaagtttcagtcgcaactcatgccttgcactacatcggagagttcacactggagagaaaccttacaaatgttatgagtgtgacaaggtcttcagtcgaaattcatgccttgcactacatcagaaaactcatattggagagaaaccttacacgtgtaaagagtgtggcaaagcctttagtgtgaggtcaacacttaccaaccatcaggtaattcatagtggcaagaaaccttacaaatgcaatgaatgtggcaaggtgttcagtcagacttcaagccttgcaactcatcagagaattcacactggggagaaaccatacaagtgtaatgaatgtggtaaagtcttcagtcagacttcaagccttgcaaggcattggagaattcatactggagagaaaccttacaaatgcaatgaatgtggtaaggttttcagttacaattcacaccttgcgagtcatcggagagttcatactggagagaaaccttacaagtgtaatgagtgtgggaaagcctttagtgtgcattcgaacttaactacccatcaggtcatccatactggagagaagccttacaaatgtaatcaatgtggcaaaggcttcagtgtgcattcaagcctaactacccatcaggtcatccatactggagaaaaaccttacaaatgtaatgagtgtggcaaatcctttagtgtgcgcccaaacctcactagacatcagataatccatactggaaagaaaccttacaaatgtagtgattgtgggaagtcctttagtgtgcgcccaaacctcttcagacatcaaattatccatactaaggagaaaccttataaaagaaattaatatggcaaggtcttcagtcaaagtttaaatcctgtgagtcatcaaagaatttatatcagagagaaaccatacaagtataataaatgtggcaaggttttcagtcacaattcactcctacacagcatcagagaatttcattcttgagagaatccttacaagtacagcaaacccttcatcacaagttcaagcattcattgacatcagagtccatgctaaagagaaatcatatacacctaactgtgtggcagaggcttcatttaggtctcacaactcactagacatcaaaatgtgtaaacatctttgtatattttgtgcatgttgaagctattaaccaaggatcaaaactgtaacacatccaaggatttatgtgaggaataattcagtctagttgtgctgataaacttttcatattacacattgtagaacaaatgcaagcccaaatgtgttaaaactcacacaacatgatatatattaaaggttgcaggatgtttgaagtcaaaaaaaa

SEQ ID NO: 428470 - DNA, 696 bp, Homo sapiens
aaacggatcgcgttgggtgaaggtgacggcgtcgagccattgacttccaaagactcctggcacatgaggaagaaacccagaagaggagagcaaaggagtcaggaatggcttttactcagttgacattcagggacgtggccatcgaattctctcaagatgagtggaaatgcctgaactctacacagaggactttatacagggatgtgatgttggagaactacaggaacctggtctccctggatctgtctcgtaactgtgtaatcaaggaactagcaccacaacaggaaggtaacccaggagaagtattccacacagtgacattggaacaacatgaaaaacatgacattgaagagttttgcttcagggaaatcaagaaaaaaatacacgactttgactgtcagtggagagatgatgaaagaaattgcaacaaagtgactacggccccaaaagaaaatcttacttgtaggagagaccaacgcgatagaagaggtataggaaacaagtctattaaacatcagcttggattaagctttctaccacatccccatgaactgcagcagtttcaagctgaagggaaaatttatgaatgtaaccatgttgagaagtctgtcaaccatggttcctcagtttcaccaccccaaatactttcttctaccgtcaaaacccatgtttctaataaatatgggactgatttca

SEQ ID NO: 428471 - DNA, 2385 bp, Homo sapiens
aaacggatcgcgttgggtgaaggtgacggcgtcgagccattgacttccaaagactcctggcacatgaggaagaaacccagaagaggagagcaaaggagtcaggaatggcttttactcagttgacattcagggacgtggccatcgaattctctcaagatgagtggaaatgcctgaactctacacagaggactttatacagggatgtgatgttggagaactacaggaacctggtctccctggagtattatcctatgtgggagcacaggaaagagccctggaccatagaaagccaagtacgagtagcaagaaaaccaaaagggtgggaatggatcaaaggtgtgaaaacagatctgtctcgtaactgtgtaatcaaggaactagcaccacaacaggaaggtaacccaggagaagtattccacacagtgacattggaacaacatgaaaaacatgacattgaagagttttgcttcagggaaatcaagaaaaaaatacacgactttgactgtcagtggagagatgatgaaagaaattgcaacaaagtgactacggccccaaaagaaaatcttacttgtaggagagaccaacgcgatagaagaggtataggaaacaagtctattaaacatcagcttggattaagctttctaccacatccccatgaactgcagcagtttcaagctgaagggaaaatttatgaatgtaaccatgttgagaagtctgtcaaccatggttcctcagtttcaccaccccaaatactttcttctaccgtcaaaacccatgtttctaataaatatgggactgatttcatctgttcttcattactcacacaagaacagaaatcatgcattagggaaaaaccttacagatatattgagtgcgacaaagccttgaatcatggctcacacatgactgtacgtcaggtaagtcattctggagagaaaggatataaatgtgatctgtgtggcaaggtctttagtcaaaaatcaaaccttgcgcgtcattggagagttcatactggagagaaaccatacaaatgtaatgaatgtgacagaagtttcagtcgcaactcatgccttgcactacatcggagagttcacactggagagaaaccttacaaatgttatgagtgtgacaaggtcttcagtcgaaattcatgccttgcactacatcagaaaactcatattggagagaaaccttacacgtgtaaagagtgtggcaaagcctttagtgtgaggtcaacacttaccaaccatcaggtaattcatagtggcaagaaaccttacaaatgcaatgaatgtggcaaggtgttcagtcagacttcaagccttgcaactcatcagagaattcacactggggagaaaccatacaagtgtaatgaatgtggtaaagtcttcagtcagacttcaagccttgcaaggcattggagaattcatactggagagaaaccttacaaatgcaatgaatgtggtaaggttttcagttacaattcacaccttgcgagtcatcggagagttcatactggagagaaaccttacaagtgtaatgagtgtgggaaagcctttagtgtgcattcgaacttaactacccatcaggtcatccatactggagagaagccttacaaatgtaatcaatgtggcaaaggcttcagtgtgcattcaagcctaactacccatcaggtcatccatactggagaaaaaccttacaaatgtaatgagtgtggcaaatcctttagtgtgcgcccaaacctcactagacatcagataatccatactggaaagaaaccttacaaatgtagtgattgtgggaagtcctttagtgtgcgcccaaacctcttcagacatcaaattatccatactaaggagaaaccttataaaagaaattaatatggcaaggtcttcagtcaaagtttaaatcctgtgagtcatcaaagaatttatatcagagagaaaccatacaagtataataaatgtggcaaggttttcagtcacaattcactcctacacagcatcagagaatttcattcttgagagaatccttacaagtacagcaaacccttcatcacaagttcaagcattcattgacatcagagtccatgctaaagagaaatcatatacacctaactgtgtggcagaggcttcatttaggtctcacaactcactagacatcaaaatgtgtaaacatctttgtatattttgtgcatgttgaagctattaaccaaggatcaaaactgtaacacatccaaggatttatgtgaggaataattcagtctagttgtgctgataaacttttcatattacacattgtagaacaaatgcaagcccaaatgtgttaaaactcacacaacatgatatatattaaaggttgcaggatgtttgaagtcaaaaaaaa

SEQ ID NO: 428472 - DNA, 2316 bp, Homo sapiens
gggagagatatgtactcaaaaataccttagtgtggatttatcagaacacacacttcaattaaatctatacttaaattctcttttattcttattttgtgtgaagatggtaactcccttcataacctcttggtgaaatgtgtttattattttacggacagttgacattcagggacgtggccatcgaattctctcaagatgagtggaaatgcctgaactctacacagaggactttatacagggatgtgatgttggagaactacaggaacctggtctccctggatctgtctcgtaactgtgtaatcaaggaactagcaccacaacaggaaggtaacccaggagaagtattccacacagtgacattggaacaacatgaaaaacatgacattgaagagttttgcttcagggaaatcaagaaaaaaatacacgactttgactgtcagtggagagatgatgaaagaaattgcaacaaagtgactacggccccaaaagaaaatcttacttgtaggagagaccaacgcgatagaagaggtataggaaacaagtctattaaacatcagcttggattaagctttctaccacatccccatgaactgcagcagtttcaagctgaagggaaaatttatgaatgtaaccatgttgagaagtctgtcaaccatggttcctcagtttcaccaccccaaatactttcttctaccgtcaaaacccatgtttctaataaatatgggactgatttcatctgttcttcattactcacacaagaacagaaatcatgcattagggaaaaaccttacagatatattgagtgcgacaaagccttgaatcatggctcacacatgactgtacgtcaggtaagtcattctggagagaaaggatataaatgtgatctgtgtggcaaggtctttagtcaaaaatcaaaccttgcgcgtcattggagagttcatactggagagaaaccatacaaatgtaatgaatgtgacagaagtttcagtcgcaactcatgccttgcactacatcggagagttcacactggagagaaaccttacaaatgttatgagtgtgacaaggtcttcagtcgaaattcatgccttgcactacatcagaaaactcatattggagagaaaccttacacgtgtaaagagtgtggcaaagcctttagtgtgaggtcaacacttaccaaccatcaggtaattcatagtggcaagaaaccttacaaatgcaatgaatgtggcaaggtgttcagtcagacttcaagccttgcaactcatcagagaattcacactggggagaaaccatacaagtgtaatgaatgtggtaaagtcttcagtcagacttcaagccttgcaaggcattggagaattcatactggagagaaaccttacaaatgcaatgaatgtggtaaggttttcagttacaattcacaccttgcgagtcatcggagagttcatactggagagaaaccttacaagtgtaatgagtgtgggaaagcctttagtgtgcattcgaacttaactacccatcaggtcatccatactggagagaagccttacaaatgtaatcaatgtggcaaaggcttcagtgtgcattcaagcctaactacccatcaggtcatccatactggagaaaaaccttacaaatgtaatgagtgtggcaaatcctttagtgtgcgcccaaacctcactagacatcagataatccatactggaaagaaaccttacaaatgtagtgattgtgggaagtcctttagtgtgcgcccaaacctcttcagacatcaaattatccatactaaggagaaaccttataaaagaaattaatatggcaaggtcttcagtcaaagtttaaatcctgtgagtcatcaaagaatttatatcagagagaaaccatacaagtataataaatgtggcaaggttttcagtcacaattcactcctacacagcatcagagaatttcattcttgagagaatccttacaagtacagcaaacccttcatcacaagttcaagcattcattgacatcagagtccatgctaaagagaaatcatatacacctaactgtgtggcagaggcttcatttaggtctcacaactcactagacatcaaaatgtgtaaacatctttgtatattttgtgcatgttgaagctattaaccaaggatcaaaactgtaacacatccaaggatttatgtgaggaataattcagtctagttgtgctgataaacttttcatattacacattgtagaacaaatgcaagcccaaatgtgttaaaactcacacaacatgatatatattaaaggttgcaggatgtttgaagtcaaaaaaaa

SEQ ID NO: 428473 - DNA, 2248 bp, Homo sapiens
gcctgtcagatgttcctggggaagacggaggctgaggattgcccacattgccctggagacgttagagggccaccagagggccatcatggcacaatgactgtggaggttggcctaggagcagggaaccatctggaaggagttcgagaccagcctagccaacctggtgaaaccccttctctactacaaatacaaaaattagctgggattacagatctgtctcgtaactgtgtaatcaaggaactagcaccacaacaggaaggtaacccaggagaagtattccacacagtgacattggaacaacatgaaaaacatgacattgaagagttttgcttcagggaaatcaagaaaaaaatacacgactttgactgtcagtggagagatgatgaaagaaattgcaacaaagtgactacggccccaaaagaaaatcttacttgtaggagagaccaacgcgatagaagaggtataggaaacaagtctattaaacatcagcttggattaagctttctaccacatccccatgaactgcagcagtttcaagctgaagggaaaatttatgaatgtaaccatgttgagaagtctgtcaaccatggttcctcagtttcaccaccccaaatactttcttctaccgtcaaaacccatgtttctaataaatatgggactgatttcatctgttcttcattactcacacaagaacagaaatcatgcattagggaaaaaccttacagatatattgagtgcgacaaagccttgaatcatggctcacacatgactgtacgtcaggtaagtcattctggagagaaaggatataaatgtgatctgtgtggcaaggtctttagtcaaaaatcaaaccttgcgcgtcattggagagttcatactggagagaaaccatacaaatgtaatgaatgtgacagaagtttcagtcgcaactcatgccttgcactacatcggagagttcacactggagagaaaccttacaaatgttatgagtgtgacaaggtcttcagtcgaaattcatgccttgcactacatcagaaaactcatattggagagaaaccttacacgtgtaaagagtgtggcaaagcctttagtgtgaggtcaacacttaccaaccatcaggtaattcatagtggcaagaaaccttacaaatgcaatgaatgtggcaaggtgttcagtcagacttcaagccttgcaactcatcagagaattcacactggggagaaaccatacaagtgtaatgaatgtggtaaagtcttcagtcagacttcaagccttgcaaggcattggagaattcatactggagagaaaccttacaaatgcaatgaatgtggtaaggttttcagttacaattcacaccttgcgagtcatcggagagttcatactggagagaaaccttacaagtgtaatgagtgtgggaaagcctttagtgtgcattcgaacttaactacccatcaggtcatccatactggagagaagccttacaaatgtaatcaatgtggcaaaggcttcagtgtgcattcaagcctaactacccatcaggtcatccatactggagaaaaaccttacaaatgtaatgagtgtggcaaatcctttagtgtgcgcccaaacctcactagacatcagataatccatactggaaagaaaccttacaaatgtagtgattgtgggaagtcctttagtgtgcgcccaaacctcttcagacatcaaattatccatactaaggagaaaccttataaaagaaattaatatggcaaggtcttcagtcaaagtttaaatcctgtgagtcatcaaagaatttatatcagagagaaaccatacaagtataataaatgtggcaaggttttcagtcacaattcactcctacacagcatcagagaatttcattcttgagagaatccttacaagtacagcaaacccttcatcacaagttcaagcattcattgacatcagagtccatgctaaagagaaatcatatacacctaactgtgtggcagaggcttcatttaggtctcacaactcactagacatcaaaatgtgtaaacatctttgtatattttgtgcatgttgaagctattaaccaaggatcaaaactgtaacacatccaaggatttatgtgaggaataattcagtctagttgtgctgataaacttttcatattacacattgtagaacaaatgcaagcccaaatgtgttaaaactcacacaacatgatatatattaaaggttgcaggatgtttgaagtcaaaaaaaa

SEQ ID NO: 428474 - DNA, 2478 bp, Homo sapiens
atctcctgcctgtgtcctcctcgctccctctgctccagccaagcatgcgtccttcctgttcctgggccgagcttgctcctgcctcaaggccttcacgtgggctgtgcctctgctggaactcgctggcccctcagctgcagcattgacttccaaagactcctggcacatgaggaagaaacccagaagaggagagcaaaggagtcaggaatggcttttactcagttgacattcagggacgtggccatcgaattctctcaagatgagtggaaatgcctgaactctacacagaggactttatacagggatgtgatgttggagaactacaggaacctggtctccctgggctggagtgcaatggtgcaatctcggctcactgcaaccttcgcctcccggattcaaatgattctcctgcctcagcctcccgagtagctgggattacagatctgtctcgtaactgtgtaatcaaggaactagcaccacaacaggaaggtaacccaggagaagtattccacacagtgacattggaacaacatgaaaaacatgacattgaagagttttgcttcagggaaatcaagaaaaaaatacacgactttgactgtcagtggagagatgatgaaagaaattgcaacaaagtgactacggccccaaaagaaaatcttacttgtaggagagaccaacgcgatagaagaggtataggaaacaagtctattaaacatcagcttggattaagctttctaccacatccccatgaactgcagcagtttcaagctgaagggaaaatttatgaatgtaaccatgttgagaagtctgtcaaccatggttcctcagtttcaccaccccaaatactttcttctaccgtcaaaacccatgtttctaataaatatgggactgatttcatctgttcttcattactcacacaagaacagaaatcatgcattagggaaaaaccttacagatatattgagtgcgacaaagccttgaatcatggctcacacatgactgtacgtcaggtaagtcattctggagagaaaggatataaatgtgatctgtgtggcaaggtctttagtcaaaaatcaaaccttgcgcgtcattggagagttcatactggagagaaaccatacaaatgtaatgaatgtgacagaagtttcagtcgcaactcatgccttgcactacatcggagagttcacactggagagaaaccttacaaatgttatgagtgtgacaaggtcttcagtcgaaattcatgccttgcactacatcagaaaactcatattggagagaaaccttacacgtgtaaagagtgtggcaaagcctttagtgtgaggtcaacacttaccaaccatcaggtaattcatagtggcaagaaaccttacaaatgcaatgaatgtggcaaggtgttcagtcagacttcaagccttgcaactcatcagagaattcacactggggagaaaccatacaagtgtaatgaatgtggtaaagtcttcagtcagacttcaagccttgcaaggcattggagaattcatactggagagaaaccttacaaatgcaatgaatgtggtaaggttttcagttacaattcacaccttgcgagtcatcggagagttcatactggagagaaaccttacaagtgtaatgagtgtgggaaagcctttagtgtgcattcgaacttaactacccatcaggtcatccatactggagagaagccttacaaatgtaatcaatgtggcaaaggcttcagtgtgcattcaagcctaactacccatcaggtcatccatactggagaaaaaccttacaaatgtaatgagtgtggcaaatcctttagtgtgcgcccaaacctcactagacatcagataatccatactggaaagaaaccttacaaatgtagtgattgtgggaagtcctttagtgtgcgcccaaacctcttcagacatcaaattatccatactaaggagaaaccttataaaagaaattaatatggcaaggtcttcagtcaaagtttaaatcctgtgagtcatcaaagaatttatatcagagagaaaccatacaagtataataaatgtggcaaggttttcagtcacaattcactcctacacagcatcagagaatttcattcttgagagaatccttacaagtacagcaaacccttcatcacaagttcaagcattcattgacatcagagtccatgctaaagagaaatcatatacacctaactgtgtggcagaggcttcatttaggtctcacaactcactagacatcaaaatgtgtaaacatctttgtatattttgtgcatgttgaagctattaaccaaggatcaaaactgtaacacatccaaggatttatgtgaggaataattcagtctagttgtgctgataaacttttcatattacacattgtagaacaaatgcaagcccaaatgtgttaaaactcacacaacatgatatatattaaaggttgcaggatgtttgaagtcaaaaaaaa

SEQ ID NO: 428475 - DNA, 2498 bp, Homo sapiens
aaacggatcgcgttgggtgaaggtgacggcgtcgagccattgacttccaaagactcctggcacatgaggaagaaacccagaagaggagagcaaaggagtcaggaatggcttttactcagttgacattcagggacgtggccatcgaattctctcaagatgagtggaaatgcctgaactctacacagaggactttatacagggatgtgatgttggagaactacaggaacctggtctccctggatccatctgtgatagcctctcttcttatccaagcaaagggctgagattcttgaaaagccacagcacatcatgttccattcattttataagcgggaaattctcttcctgaccagagtattatcctatgtgggagcacaggaaagagccctggaccatagaaagccaagtacgagtagcaagaaaaccaaaagggtgggaatggatcaaaggtgtgaaaacagatctgtctcgtaactgtgtaatcaaggaactagcaccacaacaggaaggtaacccaggagaagtattccacacagtgacattggaacaacatgaaaaacatgacattgaagagttttgcttcagggaaatcaagaaaaaaatacacgactttgactgtcagtggagagatgatgaaagaaattgcaacaaagtgactacggccccaaaagaaaatcttacttgtaggagagaccaacgcgatagaagaggtataggaaacaagtctattaaacatcagcttggattaagctttctaccacatccccatgaactgcagcagtttcaagctgaagggaaaatttatgaatgtaaccatgttgagaagtctgtcaaccatggttcctcagtttcaccaccccaaatactttcttctaccgtcaaaacccatgtttctaataaatatgggactgatttcatctgttcttcattactcacacaagaacagaaatcatgcattagggaaaaaccttacagatatattgagtgcgacaaagccttgaatcatggctcacacatgactgtacgtcaggtaagtcattctggagagaaaggatataaatgtgatctgtgtggcaaggtctttagtcaaaaatcaaaccttgcgcgtcattggagagttcatactggagagaaaccatacaaatgtaatgaatgtgacagaagtttcagtcgcaactcatgccttgcactacatcggagagttcacactggagagaaaccttacaaatgttatgagtgtgacaaggtcttcagtcgaaattcatgccttgcactacatcagaaaactcatattggagagaaaccttacacgtgtaaagagtgtggcaaagcctttagtgtgaggtcaacacttaccaaccatcaggtaattcatagtggcaagaaaccttacaaatgcaatgaatgtggcaaggtgttcagtcagacttcaagccttgcaactcatcagagaattcacactggggagaaaccatacaagtgtaatgaatgtggtaaagtcttcagtcagacttcaagccttgcaaggcattggagaattcatactggagagaaaccttacaaatgcaatgaatgtggtaaggttttcagttacaattcacaccttgcgagtcatcggagagttcatactggagagaaaccttacaagtgtaatgagtgtgggaaagcctttagtgtgcattcgaacttaactacccatcaggtcatccatactggagagaagccttacaaatgtaatcaatgtggcaaaggcttcagtgtgcattcaagcctaactacccatcaggtcatccatactggagaaaaaccttacaaatgtaatgagtgtggcaaatcctttagtgtgcgcccaaacctcactagacatcagataatccatactggaaagaaaccttacaaatgtagtgattgtgggaagtcctttagtgtgcgcccaaacctcttcagacatcaaattatccatactaaggagaaaccttataaaagaaattaatatggcaaggtcttcagtcaaagtttaaatcctgtgagtcatcaaagaatttatatcagagagaaaccatacaagtataataaatgtggcaaggttttcagtcacaattcactcctacacagcatcagagaatttcattcttgagagaatccttacaagtacagcaaacccttcatcacaagttcaagcattcattgacatcagagtccatgctaaagagaaatcatatacacctaactgtgtggcagaggcttcatttaggtctcacaactcactagacatcaaaatgtgtaaacatctttgtatattttgtgcatgttgaagctattaaccaaggatcaaaactgtaacacatccaaggatttatgtgaggaataattcagtctagttgtgctgataaacttttcatattacacattgtagaacaaatgcaagcccaaatgtgttaaaactcacacaacatgatatatattaaaggttgcaggatgtttgaagtcaaaaaaaa

SEQ ID NO: 428476 - DNA, 1794 bp, Homo sapiens
accttttgtgcatctttctttgaagccttaatgggaacctgatgggtttgctgtagcagcttccttgtgaattctgtcagagctgcaacagccgctgcactgccactcagttttctaaggaactcctcctactaccatcttggctcagtctccctcacttaagccctgggtttgaaaaattaattgcaacttcccaggaaacattgttcagtttgcagattaagcctggcactcacctatcagaaaccagagctccgcctgcttagttgtttcaaagttttctgaaagaaaactaggggagcacttgtgaacacaggagcagctggtgatctgctttcttaccctaactcttgacaaatgagtcgtctactattttaaagagtctggaggtctctgactctgccataacaataacctgctgttaatttataacacagatttttgtttggaagagccttatttgaaatacactttgatttattttcttaaatatttatattcttttcttgcttacttcagggttggtagcttagttggaagtgccagcacctggcacctattcatatagaacaggctgtactcaagacaacttctagcatttactttaagacttatataatttatttctattttgtgtgtactatagtcttgtgcatatgtagttgaacacacagtgaaatatatgtctctctttgtggatgtgcggcctaaaaatttgaatgtctggtgagagagagccatgtgtataggtcagagaaaagaacagctcccgactccctattagcgcctgtgatttgtttccttttgtgtttatctggcctagtgtgctgtttctttaaaccaggaagaagttttgtcttttggaggctcttctcacctgtccagcctggcatgtcagagaacacatagcctgtgacaatgccgtttttaaaggtttacttaatttgcagtaaatccagctgcctcaagaactcctacaccaagatggacatttcctttccagaaatgggatcaagtatctgctcactttggtattggatggactaataatgtagctccaaaaatgcaaggatggaagaatatgtgtaatccaaaccaaggaaggaaatgaaaagtgaacgtactgtttttaccacccctttctgtttgcttattgttggttgcttcactgtgcataaagttgttttcaatgcaacgcttgttaaataaatattgtgaactattttgtaaatgaaatgtattatgttgaaagctgtcagttcaaaaataagcttttttgttgttgttgaagatgaagtgtgttaggtgaaaccaaaaagccaaaaaaagtaatttcatatatagcatctatttgaatataatctttctttaaaatttcttttagcatagcattttcagtgctaagaaagaatctctatgttatattttgttaaaataatggctttctaacaaagcaaatggtaaagtacaaagttggaagatgtcaagttaacgagacttgctgcaaagccttgcagaacggaggaggctctgcctgctggctgtctctccctccaacctctctacaatcatgcctgctttgaggtgttctgttgcagcaagctgcaccttgggtcactcttttggaatattttgactataggctgcgtcacaggcagaaaaggagttgatggaaaatggactaaaaaactgacatgtttgaatcagtgctagagggaacagattgtgaattttgtttacagcatccaatatttggatttttttgtaaataaaaaagttatttttttctattga

SEQ ID NO: 428477 - DNA, 845 bp, Homo sapiens
accttttgtgcatctttctttgaagccttaatgggaacctgatgggtttgctgtagcagcttccttgtgaattctgtcagagctgcaacagccgctgcactgccactcagttttctaaggaactcctcctactaccatcttggctcagtctccctcacttaagccctgggtttgaaaaattaattgcaacttcccaggaaacattgttcagtttgcagattaagcctggcactcacctatcagaaaccagagctccgcctgcttagttgtttcaaagttttctgaaagaaaactaggggagcacttgtgaacacaggagcagctggtgatctgctttcttaccctaactcttgacaaatgagtcgtctactattttaaagagtctggaggtctctgactctgccataacaataacctgctgttaatttataacacagatttttgtttggaagagccttatttgaaatacactttgatttattttcttaaatatttatattcttttcttgcttacttcagggttggtagcttagttggaagtgccagcacctggcacctattcatatagaacaggctgtactcaagacaacttctagcatttactttaagacttatataatttatttctattttgtgtgtactatagtcttgtgcatatgtagttgaacacacagtgaaatatatgtctctctttgtggatgtgcggcctaaaaatttgaatgtctggtgagagagagccatgtgtataggtcagagaaaagaacagcttttttttttttttttacgagcaaccagttatttttttaaaaaggaaaaacccacccctttttaacacccttttttgg

SEQ ID NO: 428478 - DNA, 1991 bp, Homo sapiens
accttttgtgcatctttctttgaagccttaatgggaacctgatgggtttgctgtagcagcttccttgtgaattctgtcagagctgcaacagccgctgcactgccactcagttttctaaggaactcctcctactaccatcttggctcagtctccctcacttaagccctgggtttgaaaaattaattgcaacttcccaggaaacattgttcagtttgcagattaagcctggcactcacctatcagaaaccagagctccgcctgcttagttgtttcaaagttttctgaaagaaaactaggggagcacttgtgaacacaggagcagctggtgatctgctttcttaccctaactcttgacaaatgagtcgtctactattttaaagagtctggaggtctctgactctgccataacaataacctgctgttaatttataacacagatttttgtttggaagagccttatttgaaatacactttgatttattttcttaaatatttatattcttttcttgcttacttcagggttggtagcttagttggaagtgccagcacctggcacctattcatatagaacaggctgtactcaagacaacttctagcatttactttaagacttatataatttatttctattttgtgtgtactatagtcttgtgcatatgtagttgaacacacagtgaaatatatgtctctctttgtggatgtgcggcctaaaaatttgaatgtctggtgagagagagccatgtgtataggtcagagaaaagaacagctcccgactccctattagcgcctgtgatttgtttccttttgtgtttatctggcctagtgtgctgtttctttaaaccaggaagaagttttgtcttttggaggctcttctcacctgtccagcctggcatgtcagagaacacatagcctgtgacaatgccgtttttaaaggtttacttaatttgcagtaaatccagctgcctcaagaactcctacaccaagatggacatttcctttccagaaatgggatcaagtatctgctcactttggtattggatggactaataatgtagctccaaaaatgcaaggatggaagaatatgtgtaatccaaaccaaggaaggaaatgaaaagtgaacgtactgtttttaccacccctttctgtttgcttattgttggttgcttcactgtgcataaagttgttttcaatgcaacgcttgttaaataaatattgtgaactattttgtaaatgaaatgtattatgttgaaagctgtcagttcaaaaataagcttttttgttgttgttgaagatgaagtgtgttaggtgaaaccaaaaagccaaaaaaagtaatttcatatatagcatctatttgaatataatctttctttaaaatttcttttagcatagcattttcagtgctaagaaagaatctctatgttatattttgttaaaataatggctttctaacaaagcaaatggtaaagtacaaagttggaagatgtcaagttaacgagacttgctgcaaagccttgcagaacggaggaggctctgcctgctggctgtctctccctccaacctctctacaatcatgcctgctttgaggtgttctgttgcagcaagctgcaccttgggtcactcttttggaatattttgactataggctgcgtcacaggcagaaaaggagttgatggaaaatggactaaaaaactgacatgtttgaatcagtgctagagggaacagattgtgaattttgtttacagcatccaatatttggatttttttgtaaataaaaaagttatttttttctattgaaaaacaacacaacacaacaataacaacacacatctaaccaaaaaataaacaataacaaaatacacacaaacaaaaataaaaaacaacaaataaaacaaaacataaatgaacacaacagcaaaccactaaacaacagtcactcacacaataataacacctaacacgtcttcaacgccatgcaccacacatcacttttg

SEQ ID NO: 428479 - DNA, 3088 bp, Homo sapiens
  misc_feature (3088)..(3088): n is a, c, g, or t
aagcggagtgtgagggattttggaagcacttgccccaagcagagtttaaaatggagatggcaaatgaagcacagaaatctctttgctctggaaactggggtcccaccctggggacttctttgggtgagaagttgaagagtcgggatggatgagatgacctttcacatctggtatcctcaggtccgagcccctggacagcagccccaggcccagctggccatggccctgtgcctgaagcaggtgttcgccaaggacaagacgttccggccgcggaagcgctttgagccgggcacacagcgctttgagctgtacaagaaggcacaggcctctctcaagtcgggcctggacctgcgcagtgtggtgaggctaccacccggggagaacatcgacgactggatcgccgtgcacgtggtggacttcttcaaccgcatcaacctcatctacggcactatggcggagcgctgcagtgagaccagctgcccggtcatggccggcgggccccgctacgagtaccgctggcaggacgagcgccagtaccggcggcccgccaagctctctgcgccgcgctatatggcgttgctcatggactggatcgaaggcctcatcaacgacgaagaggtctttcccacgcgtgttggagttcccttccctaagaacttccagcaggtctgcaccaagatcctgacccgcctcttccgagtctttgtccatgtctacatccaccacttcgatagcatcctcagcatgggggcagaggcgcacgtcaacacctgctacaagcacttctactacttcatccgcgagttcagtctggtggaccagcgggagctggagccactgagggagatgacagagcggatctgccactgagcccaggtctggacttttttggccatcagatggacgatctgaacatagggtggctggcagaggggacccccaggagcctgaaggaatctgaaggcactggaatcactccacacacccaaagcctctggacttctggttctcaggagtctgcctacctgtcgccctgaccgcttgtggatggagaaggggagagcatctaggcaggcaaacagaagggaagtggagttaaacctctggcatgaagtctgggagtagggtaggctagggggtttcttctatgacacttgacccttccatgctggttcccaagcctattggaggaatgtgggtgtggccgaggtgatggcaagaaaggtgcaagaaagtgagcagtctgcctgtgagtgagcacagatgccggggtgtgtgtgtgtgtgtgtgattttcactgtggggtgtgtctgtgagagctagctgccttacccctccttggcacatagtaggccttccataaatgttggatggatggataaatagattgggaccatcagaccatgggaccatcagaccatgaccactgtaggagtgatgacagctcagcgtccccactcagtgtatctgaccatgtgtgtaagtgcacaaaaatgtggttgtagatgttgctctacattcaaaccttccaggctacactcttccatcagcatgagtcctggagagctgggggaaggtaggaagaggagccttgccttgagttcctaaaccgacccactgcagacacaggctctgattctcttacccagagatgcccatgagctgacattttactcatccctctgcctccaagaaggcctgtattatacgtgtcctcctgggggttggagatgatccctcaagtacacaaaggtcccctggcccttcatctgggaatcatatactccactctagctcccagaatctacagacctggctcctcggatctgaagcccagcacaaaataatctccccgtccaaggagcttgtggaacttgaattgggaactttggagtcttgtctcccatcccagcacattgaggatgtagttggtgaatggactcttccaggcatggagatcctccatcctaaaagtacctgcctccttcccagccatccctgacacattccagccagttggatctcacagcacagctatccacagggagactgggatgttcacgcagcactccattactcagtacctccatacccagccctatacgcagacccacaggtggggaaactgaggcaggaacagggttctgccctcccagagcctccactctgggatgccagaatggaaagccagagggaacctgagaatcatccagtcttactgtctcaatgtacatacggggaaactgaagccaggagaagaagagggagaaactgtccagggcctcacagggaggcattcatggagctggagaaaccagggatcctgaccgcagggcccatcaattgctacatagagatacacatggaaagagggtttaacagaccctctctaggacacaactgtttctgctttgagcaataatttctaacctgaggccaacatgtcccactgccccttgggttggctggggttgtttcctgagccaagcatccaatatcatgccccactcaatggcctagaagctgcctgtactttggggaaacagatggagctcttgggcccagccagctgggcctgggacttctgcctctgccgcctccagagtggcctggcagctttgccagaggctgtggagcgagggtagtaggagcttttcccagagtgctgtgacttgcatgatggattctaggctgtggcaagggctgatttctgggatagggggagggttggaaaatttatttttatgaaacagagggaagactttattgttgttatttttggtaaaataaaaggcaaactaaagcaaaaaaagtaacaccgaaacaccacaccaacaaacaaacgggggggcgcaaagaaacccagagggcccagtaccgccccggttggtaccaggggcccacgtgaacgaataaacgcagcacggcggcgcaaaccggcgagggaacgcacggggcattggagacacccgggtgaccgcaccaccacggtaacgcggcacataggcaggacagcctggccagtgaggataagcacagacaaaagaggagaaacgcacacagaagaagccaaggcgacaaaacgagn

SEQ ID NO: 428480 - DNA, 2303 bp, Homo sapiens
  misc_feature (2303)..(2303): n is a, c, g, or t
aagcggagtgtgagggattttggaagcacttgccccaagcagagtttaaaatggagatggcaaatgaagcacagaaatctctttgctctggaaactggggtcccaccctggggacttctttgggtgagaagttgaagagtcgggatggatgagatgacctttcacatctgtgagtttttttcaagagaacaagttcctgctgaatggcctgtttctactctccaagctgctctcattttaccagactgcccccatcctggcctgcctttgtgggttcaaggaaggacctttgtctcaaacagctccccagctagtttgacttcttgccagaagtaatacccctccccgaaatatgtgccatccctttgcttttacccaggtgtcacctggttcccaccctcccttccccaatcctgtcccagggttaccagagatgtgacgaaaggacagtgctccagcgtcagaggtcaagcccaggctttggccataagcaagcctcagggtagggctaaaggctagagtcagggctcacacttgccagagcccaggtcagaggtcagccaggaaccagaatgcaattcttagcttatactcagccttagtgctcagtctaggggcaggggcagtgtgcttagtgggtggctaaattctagttttggtaggtacatgggtctgcatttcccagtagctcacacactcacagttgagatgagatgactcaggtcttagaaacctagctatagcagagtgacccaggacctggatgggctaaatccatggtgatacaggggtcacccagtaagccagtggtagagctgggactagaacccaggactcctgcctctgagcctagggccctgatcactgtctcccaaaatttgttctgaatctgggatccttaaattctaggaggcaaagtaaatttgcctgagctctagatgggccctcctgggtgcatctgactatactcttctacctcccagtgccaggcacatagtagttgctagaggaatgtctactgagtgtcaggtgcaacgggaggagccagtggcttgttcagatttggggctggaggaggctggcttgaggggaaggatctccagctgttgtcagaggaagcgacgccctcattggcctgccgccctccccctcctccagtgcttgcagccacactcagaagccgcccagctggcagcgggagggccctttcctctttcagggtgaaaaaaaaggaaaggacatttttggtagaaaagttccctgctgctccctggggattcccggtggccggatggactacgggatatcccagaggaagccgaaagccacccccgacccccctccaccctgcccccagcacaatgctgcgaggctctcccacgttgcaccagctggccaagggggctcccagaggtcatctcgtccaagcccctgtctgctggtgggcctgcagggagcctctgcgacctctctcgtgaccaacagcaagtctgaggggcacctgtttagagcccaggcccagctctgcaatgaaagcagaaaagagacaaagcaagatgggaggactgtgggggcttagcaagggggactaacatagcctggaaagagggcggggcactggacctaggggctgaggacttagattccaggcagaggatgcagaggttgagcaaaggctgagaggtgacagggaaatgatgaattgggaagtcagagcccagatgataaggccttgaccgccagctcccctatgcccttgtccctggcagggtatcctcaggtccgagcccctgggacttctgcctctgccgcctccagagtggcctggcagctttgccagaggctgtggagcgagggtagtaggagcttttcccagagtgctgtgacttgcatgatggattctaggctgtggcaagggctgatttctgggatagggggagggttggaaaatttatttttatgaaacagagggaagactttattgttgttatttttggtaaaataaaaggcaaactaaagcaaaaaaagtaacaccgaaacaccacaccaacaaacaaacgggggggcgcaaagaaacccagagggcccagtaccgccccggttggtaccaggggcccacgtgaacgaataaacgcagcacggcggcgcaaaccggcgagggaacgcacggggcattggagacacccgggtgaccgcaccaccacggtaacgcggcacataggcaggacagcctggccagtgaggataagcacagacaaaagaggagaaacgcacacagaagaagccaaggcgacaaaacgagn

SEQ ID NO: 428481 - DNA, 830 bp, Homo sapiens
tcttctggggcttgtccctcaggggtgaaggactcagctcatgattcccaaggcgttcatttattccttcactcacccattcattcattcatcaagtgggttttgagttcctgctatgtgccaggagctgaggatatgggagtggataggacggtcccgatcccttattgggtcccgggacaagtgtgacgcagacgattctaggagggcaaagaaaccacccttatctagcagctcttgtttctgctccagaagaagccgagcgttttcccattttactgtctgggaacttgaggctgcctccttggtggaggtccaaggaagcaccgagagggcgggcagctcagttagtcctttgtccaaggggaagctgggagccccatatggactttccgggaaggtgggggcgagtgcgtctgtgtactggagtggaggggagtcccctttctccgcccctccccgccccgtggccgcggcgtggcggggccggggcggagctggcgtcgcccggggcaggagggcagccgcggccggcaggacaggcagacggacaggctgacaggagagagaacaggcactgcgggacctgcaggagaaaggcgatcctgtggctgggaatgtgaccccacggccagaagaggacccgtgagtgtgcgccgtgcccctgcggcctcgccgcgcaccccgcccgcctggcttccactttcatttcttcggccgtcctggcgtggcacagtccggaggagagtcccgcccgaaggcaggctggccgctgtcctgaggctggcgtccgaggctcagagcttcgaaagttgcgggggggattgtcg

SEQ ID NO: 428482 - DNA, 3056 bp, Homo sapiens
  misc_feature (3056)..(3056): n is a, c, g, or t
cggggcaggagggcagccgcggccggcaggacaggcagacggacaggctgacaggagagagaacaggcactgcgggacctgcaggagaaaggcgatcctgtggctgggaatgtgaccccacggccagaagaggacccggtatcctcaggtccgagcccctggacagcagccccaggcccagctggccatggccctgtgcctgaagcaggtgttcgccaaggacaagacgttccggccgcggaagcgctttgagccgggcacacagcgctttgagctgtacaagaaggcacaggcctctctcaagtcgggcctggacctgcgcagtgtggtgaggctaccacccggggagaacatcgacgactggatcgccgtgcacgtggtggacttcttcaaccgcatcaacctcatctacggcactatggcggagcgctgcagtgagaccagctgcccggtcatggccggcgggccccgctacgagtaccgctggcaggacgagcgccagtaccggcggcccgccaagctctctgcgccgcgctatatggcgttgctcatggactggatcgaaggcctcatcaacgacgaagaggtctttcccacgcgtgttggagttcccttccctaagaacttccagcaggtctgcaccaagatcctgacccgcctcttccgagtctttgtccatgtctacatccaccacttcgatagcatcctcagcatgggggcagaggcgcacgtcaacacctgctacaagcacttctactacttcatccgcgagttcagtctggtggaccagcgggagctggagccactgagggagatgacagagcggatctgccactgagcccaggtctggacttttttggccatcagatggacgatctgaacatagggtggctggcagaggggacccccaggagcctgaaggaatctgaaggcactggaatcactccacacacccaaagcctctggacttctggttctcaggagtctgcctacctgtcgccctgaccgcttgtggatggagaaggggagagcatctaggcaggcaaacagaagggaagtggagttaaacctctggcatgaagtctgggagtagggtaggctagggggtttcttctatgacacttgacccttccatgctggttcccaagcctattggaggaatgtgggtgtggccgaggtgatggcaagaaaggtgcaagaaagtgagcagtctgcctgtgagtgagcacagatgccggggtgtgtgtgtgtgtgtgtgattttcactgtggggtgtgtctgtgagagctagctgccttacccctccttggcacatagtaggccttccataaatgttggatggatggataaatagattgggaccatcagaccatgggaccatcagaccatgaccactgtaggagtgatgacagctcagcgtccccactcagtgtatctgaccatgtgtgtaagtgcacaaaaatgtggttgtagatgttgctctacattcaaaccttccaggctacactcttccatcagcatgagtcctggagagctgggggaaggtaggaagaggagccttgccttgagttcctaaaccgacccactgcagacacaggctctgattctcttacccagagatgcccatgagctgacattttactcatccctctgcctccaagaaggcctgtattatacgtgtcctcctgggggttggagatgatccctcaagtacacaaaggtcccctggcccttcatctgggaatcatatactccactctagctcccagaatctacagacctggctcctcggatctgaagcccagcacaaaataatctccccgtccaaggagcttgtggaacttgaattgggaactttggagtcttgtctcccatcccagcacattgaggatgtagttggtgaatggactcttccaggcatggagatcctccatcctaaaagtacctgcctccttcccagccatccctgacacattccagccagttggatctcacagcacagctatccacagggagactgggatgttcacgcagcactccattactcagtacctccatacccagccctatacgcagacccacaggtggggaaactgaggcaggaacagggttctgccctcccagagcctccactctgggatgccagaatggaaagccagagggaacctgagaatcatccagtcttactgtctcaatgtacatacggggaaactgaagccaggagaagaagagggagaaactgtccagggcctcacagggaggcattcatggagctggagaaaccagggatcctgaccgcagggcccatcaattgctacatagagatacacatggaaagagggtttaacagaccctctctaggacacaactgtttctgctttgagcaataatttctaacctgaggccaacatgtcccactgccccttgggttggctggggttgtttcctgagccaagcatccaatatcatgccccactcaatggcctagaagctgcctgtactttggggaaacagatggagctcttgggcccagccagctgggcctgggacttctgcctctgccgcctccagagtggcctggcagctttgccagaggctgtggagcgagggtagtaggagcttttcccagagtgctgtgacttgcatgatggattctaggctgtggcaagggctgatttctgggatagggggagggttggaaaatttatttttatgaaacagagggaagactttattgttgttatttttggtaaaataaaaggcaaactaaagcaaaaaaagtaacaccgaaacaccacaccaacaaacaaacgggggggcgcaaagaaacccagagggcccagtaccgccccggttggtaccaggggcccacgtgaacgaataaacgcagcacggcggcgcaaaccggcgagggaacgcacggggcattggagacacccgggtgaccgcaccaccacggtaacgcggcacataggcaggacagcctggccagtgaggataagcacagacaaaagaggagaaacgcacacagaagaagccaaggcgacaaaacgagn

SEQ ID NO: 428483 - DNA, 4688 bp, Homo sapiens
  misc_feature (4688)..(4688): n is a, c, g, or t
aagcggagtgtgagggattttggaagcacttgccccaagcagagtttaaaatggagatggcaaatgaagcacagaaatctctttgctctggaaactggggtcccaccctggggacttctttgggtgagaagttgaagagtcgggatggatgagatgacctttcacatctgtgagtttttttcaagagaacaagttcctgctgaatggcctgtttctactctccaagctgctctcattttaccagactgcccccatcctggcctgcctttgtgggttcaaggaaggacctttgtctcaaacagctccccagctagtttgacttcttgccagaagtaatacccctccccgaaatatgtgccatccctttgcttttacccaggtgtcacctggttcccaccctcccttccccaatcctgtcccagggttaccagagatgtgacgaaaggacagtgctccagcgtcagaggtcaagcccaggctttggccataagcaagcctcagggtagggctaaaggctagagtcagggctcacacttgccagagcccaggtcagaggtcagccaggaaccagaatgcaattcttagcttatactcagccttagtgctcagtctaggggcaggggcagtgtgcttagtgggtggctaaattctagttttggtaggtacatgggtctgcatttcccagtagctcacacactcacagttgagatgagatgactcaggtcttagaaacctagctatagcagagtgacccaggacctggatgggctaaatccatggtgatacaggggtcacccagtaagccagtggtagagctgggactagaacccaggactcctgcctctgagcctagggccctgatcactgtctcccaaaatttgttctgaatctgggatccttaaattctaggaggcaaagtaaatttgcctgagctctagatgggccctcctgggtgcatctgactatactcttctacctcccagtgccaggcacatagtagttgctagaggaatgtctactgagtgtcaggtgcaacgggaggagccagtggcttgttcagatttggggctggaggaggctggcttgaggggaaggatctccagctgttgtcagaggaagcgacgccctcattggcctgccgccctccccctcctccagtgcttgcagccacactcagaagccgcccagctggcagcgggagggccctttcctctttcagggtgaaaaaaaaggaaaggacatttttggtagaaaagttccctgctgctccctggggattcccggtggccggatggactacgggatatcccagaggaagccgaaagccacccccgacccccctccaccctgcccccagcacaatgctgcgaggctctcccacgttgcaccagctggccaagggggctcccagaggtcatctcgtccaagcccctgtctgctggtgggcctgcagggagcctctgcgacctctctcgtgaccaacagcaagtctgaggggcacctgtttagagcccaggcccagctctgcaatgaaagcagaaaagagacaaagcaagatgggaggactgtgggggcttagcaagggggactaacatagcctggaaagagggcggggcactggacctaggggctgaggacttagattccaggcagaggatgcagaggttgagcaaaggctgagaggtgacagggaaatgatgaattgggaagtcagagcccagatgataaggccttgaccgccagctcccctatgcccttgtccctggcagggtatcctcaggtccgagcccctggacagcagccccaggcccagctggccatggccctgtgcctgaagcaggtgttcgccaaggacaagacgttccggccgcggaagcgctttgagccgggcacacagcgctttgagctgtacaagaaggcacaggcctctctcaagtcgggcctggacctgcgcagtgtggtgaggctaccacccggggagaacatcgacgactggatcgccgtgcacgtggtggacttcttcaaccgcatcaacctcatctacggcactatggcggagcgctgcagtgagaccagctgcccggtcatggccggcgggccccgctacgagtaccgctggcaggacgagcgccagtaccggcggcccgccaagctctctgcgccgcgctatatggcgttgctcatggactggatcgaaggcctcatcaacgacgaagaggtctttcccacgcgtgttggagttcccttccctaagaacttccagcaggtctgcaccaagatcctgacccgcctcttccgagtctttgtccatgtctacatccaccacttcgatagcatcctcagcatgggggcagaggcgcacgtcaacacctgctacaagcacttctactacttcatccgcgagttcagtctggtggaccagcgggagctggagccactgagggagatgacagagcggatctgccactgagcccaggtctggacttttttggccatcagatggacgatctgaacatagggtggctggcagaggggacccccaggagcctgaaggaatctgaaggcactggaatcactccacacacccaaagcctctggacttctggttctcaggagtctgcctacctgtcgccctgaccgcttgtggatggagaaggggagagcatctaggcaggcaaacagaagggaagtggagttaaacctctggcatgaagtctgggagtagggtaggctagggggtttcttctatgacacttgacccttccatgctggttcccaagcctattggaggaatgtgggtgtggccgaggtgatggcaagaaaggtgcaagaaagtgagcagtctgcctgtgagtgagcacagatgccggggtgtgtgtgtgtgtgtgtgattttcactgtggggtgtgtctgtgagagctagctgccttacccctccttggcacatagtaggccttccataaatgttggatggatggataaatagattgggaccatcagaccatgggaccatcagaccatgaccactgtaggagtgatgacagctcagcgtccccactcagtgtatctgaccatgtgtgtaagtgcacaaaaatgtggttgtagatgttgctctacattcaaaccttccaggctacactcttccatcagcatgagtcctggagagctgggggaaggtaggaagaggagccttgccttgagttcctaaaccgacccactgcagacacaggctctgattctcttacccagagatgcccatgagctgacattttactcatccctctgcctccaagaaggcctgtattatacgtgtcctcctgggggttggagatgatccctcaagtacacaaaggtcccctggcccttcatctgggaatcatatactccactctagctcccagaatctacagacctggctcctcggatctgaagcccagcacaaaataatctccccgtccaaggagcttgtggaacttgaattgggaactttggagtcttgtctcccatcccagcacattgaggatgtagttggtgaatggactcttccaggcatggagatcctccatcctaaaagtacctgcctccttcccagccatccctgacacattccagccagttggatctcacagcacagctatccacagggagactgggatgttcacgcagcactccattactcagtacctccatacccagccctatacgcagacccacaggtggggaaactgaggcaggaacagggttctgccctcccagagcctccactctgggatgccagaatggaaagccagagggaacctgagaatcatccagtcttactgtctcaatgtacatacggggaaactgaagccaggagaagaagagggagaaactgtccagggcctcacagggaggcattcatggagctggagaaaccagggatcctgaccgcagggcccatcaattgctacatagagatacacatggaaagagggtttaacagaccctctctaggacacaactgtttctgctttgagcaataatttctaacctgaggccaacatgtcccactgccccttgggttggctggggttgtttcctgagccaagcatccaatatcatgccccactcaatggcctagaagctgcctgtactttggggaaacagatggagctcttgggcccagccagctgggcctgggacttctgcctctgccgcctccagagtggcctggcagctttgccagaggctgtggagcgagggtagtaggagcttttcccagagtgctgtgacttgcatgatggattctaggctgtggcaagggctgatttctgggatagggggagggttggaaaatttatttttatgaaacagagggaagactttattgttgttatttttggtaaaataaaaggcaaactaaagcaaaaaaagtaacaccgaaacaccacaccaacaaacaaacgggggggcgcaaagaaacccagagggcccagtaccgccccggttggtaccaggggcccacgtgaacgaataaacgcagcacggcggcgcaaaccggcgagggaacgcacggggcattggagacacccgggtgaccgcaccaccacggtaacgcggcacataggcaggacagcctggccagtgaggataagcacagacaaaagaggagaaacgcacacagaagaagccaaggcgacaaaacgagn

SEQ ID NO: 428484 - DNA, 3000 bp, Homo sapiens
  misc_feature (346)..(346): n is a, c, g, or t
  misc_feature (1151)..(1151): n is a, c, g, or t
cgtggaaagaggttggcgcgctggaagtccagttgcttcggctccctgcgttaggtctggtggcggtcaatgcgcttccggacccgggatcagagtgtgtggatcgctatagggggaggggagctcagggtagacaacctcagcgtgttgcagattccctgcaaggggagttagacatctgagtcctagaccgagataccagctgaaggaacgctgcctggcgaaccctggtgttcaagttccagaggaacgggatgagctcctgagatggaagatctgtcctctccagactccacccttctccaagggggacataatctactctcatcagccagttttcaggaancggtgactttcaaggatgtgatagtggactttacccaggaagaatggaaacagctggaccctggccagagagatttgttcagggatgtgacattggaaaattatacacacctggtctctataggactccaagtttctaaacctgatgtgatttcccagttagagcaagggacagagccatggatcatggagccaagcattccagtaggtacctgtgcagactgggagacaagacttgaaaatagtgtgtcagccccagagcctgacatttctgaagaagagctatctccagaggtaatagtggaaaaacacaaaagagatgattcttggagttccaacttgctagaaagttgggaatatgaaggcagtttagagagacagcaggcaaaccaacagacactgccaaaggaaataaaggtaaccgaaaagacaatacccagttgggaaaaaggccctgtaaataatgaatttgggaaaagtgtcaatgtgagttcaaaccttgtaacacaagaaccatctccagaagagacctctactaaaagaagcatcaaacagaattcaaacccagttaaaaaagagaaatcttgtaagtgcaatgaatgtgggaaagcctttagttattgttcagctcttattcgccatcagagaacacatactggagaaaaaccctacaaatgtaatgaatgtgaaaaagccttcagccggagtgaaaaccttataaaccatcaaagaattcatactggagataaaccatataaatgtgatcagtgtggaaaaggcttcattgagggtccatctcttactcnacatcaaagaattcatactggagaaaaaccatataaatgtgatgaatgtgggaaagcctttagtcagaggacccatcttgttcagcatcagagaattcatactggcgagaagccatacacttgtaatgagtgtggaaaagcctttagccagagaggccactttatggaacatcagaaaattcatacgggagaaaaaccttttaaatgtgatgaatgtgataaaaccttcaccaggagcacacaccttactcaacatcaaaaaattcatactggagaaaaaacctataaatgtaatgaatgtggaaaggccttcaacgggccctcaacttttatccgtcatcatatgattcatactggtgaaaaaccgtacgaatgcaatgaatgtgggaaagccttcagccagcactcaaacctcactcagcatcaaaaaactcatactggggagaaaccctatgattgtgcagaatgtggaaaatcttttagttactggtcatcccttgctcaacacctgaaaattcatactggagaaaaaccttacaaatgcaatgaatgtggaaaggccttcagttactgctcatcccttactcaacatcggagaattcacacgagagaaaagccctttgaatgcagtgaatgtggaaaggctttcagttatctctcaaaccttaatcagcatcagaaaactcatactcaagagaaagcttatgaatgtaaagaatgtgggaaagcttttattcggagttcatctcttgctaagcatgaaagaattcatactggagagaaaccctatcagtgtcatgaatgtgggaaaaccttcagttatggttcatcccttattcagcataggaagatccatactggagaacgaccttacaagtgtaatgagtgtgggagagcattcaaccagaacatacaccttacacagcataagagaattcatacaggagccaagccttatgagtgtgctgagtgtggtaaagcctttcgacattgttcatctcttgctcaacatcaaaaaactcacacagaagaaaaaccctaccagtgtaataaatgtgaaaagacctttagccagagctcccatctaactcagcatcaacgaattcacactggggagaagccctataagtgcaatgaatgtgacaaagcctttagccggagcactcatctgactgaacatcagaatactcatactggagagaaaccttataactgtaatgaatgcagaaagacttttagccagagcacatatctcattcagcaccagagaattcattcaggagagaagccttttggatgtaatgattgtggaaaatccttcagatatcgctctgctctcaacaaacatcagagactgcatcctggcatatgacaattctaggaacatcataaatttaggggagatatttactttagtttgtccttttgttaagtactgaagaatcagagtggatttagaaactgccttgaaatcttttaaattttcactatcatgttatggaatggaaagtacattgggctgaactaatccaattgttattaagccactctgtgacattagaaaactctactgttttaagctttagtttcctttatggaatgaaggctttggagtagattatttcaaaggtagtttggagttttataatcagttttgtatatttacaatattttcttgaatgggtttactatacatcagcattttgctgtgttgcatctagaatgtgtatgtttatgcatgttttgccaatagaatttgtgcttcagtaactagatcggggatctagtatgctcctggtctaatgcatttacattgtttaggtaactggttcctaataaaaagaattat

SEQ ID NO: 428485 - DNA, 2910 bp, Homo sapiens
  misc_feature (256)..(256): n is a, c, g, or t
  misc_feature (1061)..(1061): n is a, c, g, or t
ctgtttgtccaccttccagctttaacgctctgcaacagggtagacaacctcagcgtgttgcagattccctgcaaggggagttagacatctgagtcctagaccgagataccagctgaaggaacgctgcctggcgaaccctggtgttcaagttccagaggaacgggatgagctcctgagatggaagatctgtcctctccagactccacccttctccaagggggacataatctactctcatcagccagttttcaggaancggtgactttcaaggatgtgatagtggactttacccaggaagaatggaaacagctggaccctggccagagagatttgttcagggatgtgacattggaaaattatacacacctggtctctataggactccaagtttctaaacctgatgtgatttcccagttagagcaagggacagagccatggatcatggagccaagcattccagtaggtacctgtgcagactgggagacaagacttgaaaatagtgtgtcagccccagagcctgacatttctgaagaagagctatctccagaggtaatagtggaaaaacacaaaagagatgattcttggagttccaacttgctagaaagttgggaatatgaaggcagtttagagagacagcaggcaaaccaacagacactgccaaaggaaataaaggtaaccgaaaagacaatacccagttgggaaaaaggccctgtaaataatgaatttgggaaaagtgtcaatgtgagttcaaaccttgtaacacaagaaccatctccagaagagacctctactaaaagaagcatcaaacagaattcaaacccagttaaaaaagagaaatcttgtaagtgcaatgaatgtgggaaagcctttagttattgttcagctcttattcgccatcagagaacacatactggagaaaaaccctacaaatgtaatgaatgtgaaaaagccttcagccggagtgaaaaccttataaaccatcaaagaattcatactggagataaaccatataaatgtgatcagtgtggaaaaggcttcattgagggtccatctcttactcnacatcaaagaattcatactggagaaaaaccatataaatgtgatgaatgtgggaaagcctttagtcagaggacccatcttgttcagcatcagagaattcatactggcgagaagccatacacttgtaatgagtgtggaaaagcctttagccagagaggccactttatggaacatcagaaaattcatacgggagaaaaaccttttaaatgtgatgaatgtgataaaaccttcaccaggagcacacaccttactcaacatcaaaaaattcatactggagaaaaaacctataaatgtaatgaatgtggaaaggccttcaacgggccctcaacttttatccgtcatcatatgattcatactggtgaaaaaccgtacgaatgcaatgaatgtgggaaagccttcagccagcactcaaacctcactcagcatcaaaaaactcatactggggagaaaccctatgattgtgcagaatgtggaaaatcttttagttactggtcatcccttgctcaacacctgaaaattcatactggagaaaaaccttacaaatgcaatgaatgtggaaaggccttcagttactgctcatcccttactcaacatcggagaattcacacgagagaaaagccctttgaatgcagtgaatgtggaaaggctttcagttatctctcaaaccttaatcagcatcagaaaactcatactcaagagaaagcttatgaatgtaaagaatgtgggaaagcttttattcggagttcatctcttgctaagcatgaaagaattcatactggagagaaaccctatcagtgtcatgaatgtgggaaaaccttcagttatggttcatcccttattcagcataggaagatccatactggagaacgaccttacaagtgtaatgagtgtgggagagcattcaaccagaacatacaccttacacagcataagagaattcatacaggagccaagccttatgagtgtgctgagtgtggtaaagcctttcgacattgttcatctcttgctcaacatcaaaaaactcacacagaagaaaaaccctaccagtgtaataaatgtgaaaagacctttagccagagctcccatctaactcagcatcaacgaattcacactggggagaagccctataagtgcaatgaatgtgacaaagcctttagccggagcactcatctgactgaacatcagaatactcatactggagagaaaccttataactgtaatgaatgcagaaagacttttagccagagcacatatctcattcagcaccagagaattcattcaggagagaagccttttggatgtaatgattgtggaaaatccttcagatatcgctctgctctcaacaaacatcagagactgcatcctggcatatgacaattctaggaacatcataaatttaggggagatatttactttagtttgtccttttgttaagtactgaagaatcagagtggatttagaaactgccttgaaatcttttaaattttcactatcatgttatggaatggaaagtacattgggctgaactaatccaattgttattaagccactctgtgacattagaaaactctactgttttaagctttagtttcctttatggaatgaaggctttggagtagattatttcaaaggtagtttggagttttataatcagttttgtatatttacaatattttcttgaatgggtttactatacatcagcattttgctgtgttgcatctagaatgtgtatgtttatgcatgttttgccaatagaatttgtgcttcagtaactagatcggggatctagtatgctcctggtctaatgcatttacattgtttaggtaactggttcctaataaaaagaattat

SEQ ID NO: 428486 - DNA, 3084 bp, Homo sapiens
  misc_feature (346)..(346): n is a, c, g, or t
  misc_feature (1151)..(1151): n is a, c, g, or t
cgtggaaagaggttggcgcgctggaagtccagttgcttcggctccctgcgttaggtctggtggcggtcaatgcgcttccggacccgggatcagagtgtgtggatcgctatagggggaggggagctcagggtagacaacctcagcgtgttgcagattccctgcaaggggagttagacatctgagtcctagaccgagataccagctgaaggaacgctgcctggcgaaccctggtgttcaagttccagaggaacgggatgagctcctgagatggaagatctgtcctctccagactccacccttctccaagggggacataatctactctcatcagccagttttcaggaancggtgactttcaaggatgtgatagtggactttacccaggaagaatggaaacagctggaccctggccagagagatttgttcagggatgtgacattggaaaattatacacacctggtctctataggactccaagtttctaaacctgatgtgatttcccagttagagcaagggacagagccatggatcatggagccaagcattccagtaggtacctgtgcagactgggagacaagacttgaaaatagtgtgtcagccccagagcctgacatttctgaagaagagctatctccagaggtaatagtggaaaaacacaaaagagatgattcttggagttccaacttgctagaaagttgggaatatgaaggcagtttagagagacagcaggcaaaccaacagacactgccaaaggaaataaaggtaaccgaaaagacaatacccagttgggaaaaaggccctgtaaataatgaatttgggaaaagtgtcaatgtgagttcaaaccttgtaacacaagaaccatctccagaagagacctctactaaaagaagcatcaaacagaattcaaacccagttaaaaaagagaaatcttgtaagtgcaatgaatgtgggaaagcctttagttattgttcagctcttattcgccatcagagaacacatactggagaaaaaccctacaaatgtaatgaatgtgaaaaagccttcagccggagtgaaaaccttataaaccatcaaagaattcatactggagataaaccatataaatgtgatcagtgtggaaaaggcttcattgagggtccatctcttactcnacatcaaagaattcatactggagaaaaaccatataaatgtgatgaatgtgggaaagcctttagtcagaggacccatcttgttcagcatcagagaattcatactggcgagaagccatacacttgtaatgagtgtggaaaagcctttagccagagaggccactttatggaacatcagaaaattcatacgggagaaaaaccttttaaatgtgatgaatgtgataaaaccttcaccaggagcacacaccttactcaacatcaaaaaattcatactggagaaaaaacctataaatgtaatgaatgtggaaaggccttcaacgggccctcaacttttatccgtcatcatatgattcatactggtgaaaaaccgtacgaatgcaatgaatgtgggaaagccttcagccagcactcaaacctcactcagcatcaaaaaactcatactggggagaaaccctatgattgtgcagaatgtggaaaatcttttagttactggtcatcccttgctcaacacctgaaaattcatactggagaaaaaccttacaaatgcaatgaatgtggaaaggccttcagttactgctcatcccttactcaacatcggagaattcacacgagagaaaagccctttgaatgcagtgaatgtggaaaggctttcagttatctctcaaaccttaatcagcatcagaaaactcatactcaagagaaagcttatgaatgtaaagaatgtgggaaagcttttattcggagttcatctcttgctaagcatgaaagaattcatactggagagaaaccctatcagtgtcatgaatgtgggaaaaccttcagttatggttcatcccttattcagcataggaagatccatactggagaacgaccttacaagtgtaatgagtgtgggagagcattcaaccagaacatacaccttacacagcataagagaattcatacaggagccaagccttatgagtgtgctgagtgtggtaaagcctttcgacattgttcatctcttgctcaacatcaaaaaactcacacagaagaaaaaccctaccagtgtaataaatgtgaaaagacctttagccagagctcccatctaactcagcatcaacgaattcacactggggagaagccctataagtgcaatgaatgtgacaaagcctttagccggagcactcatctgactgaacatcagaatactcatactggagagaaaccttataactgtaatgaatgcagaaagacttttagccagagcacatatctcattcagcaccagagaattcattcaggagagaagccttttggatgtaatgattgtggaaaatccttcagatatcgctctgctctcaacaaacatcagagactgcatcctggcatatgacaattctaggaacatcataaatttaggggagatatttactttagtttgtccttttgttaagtactgaagaatcagagtggatttagaaactgccttgaaatcttttaaattttcactatcatgttatggaatggaaagtacattgggctgaactaatccaattgttattaagccactctgtgacattagaaaactctactgttttaagctttagtttcctttatggaatgaaggctttggagtagattatttcaaaggtagtttggagttttataatcagttttgtatatttacaatattttcttgaatgggtttactatacatcagcattttgctgtgttgcatctagaatgtgtatgtttatgcatgttttgccaatagaatttgtgcttcagtaactagatcggggatctagtatgctcctggtctaatgcatttacattgtttaggtaactggttcctaataaaaagaattataaaataccctcaaattaacaattcaattgcatataatagcctaactcagtaagaatattaaaacttactattattaaaaaaata

SEQ ID NO: 428487 - DNA, 1163 bp, Homo sapiens
  misc_feature (137)..(137): n is a, c, g, or t
  misc_feature (325)..(325): n is a, c, g, or t
  misc_feature (331)..(331): n is a, c, g, or t
  misc_feature (570)..(570): n is a, c, g, or t
gttagtgtttctgagagcaccttagtgttgctctgcctcagccagctgggcaaggagttggggagcggggaggaggccggcgccatggagtggggaagggagccgtcactgttggggatcagccgctagtgtaaacnagcatctccacccacccagataagccccccacccaagtgtggagccctgctcagggagtacctcaagggccccggcctgggtggcgccagcaggcttggacactgccctggcagcaggggccccgtggaaggcaggatacccagcagggggtgccacccagtgtggatggaggggcagggcgggggcncccctnagtcactgggcagaggcacgagcacgtccacatagctgagcaggaagaagcccgactggccgtccagcatgccctcgtatcagttctcgttcatctggttgatcagcatgaagacatcgccctcatggaagcccagctccctatctttctccggctccaagtcatacagcccttgcagctcggctggtctaggggcggcatgctcctgctaggagtccagatggacttgtcgtaagatnggaaagaggacgaagctgcgatgttccggacgtgtgggtgcaggggaagccccggttggactgctcaggctttccgaggtcaaagcactcccggggcttgggcttatactcccgcctgggtcgtgaggaagcttcccggatcctgcacttgaacttctgggccagctggtccaggatctgcacggcctgccggtggtagtccagctgcgcctctgccaaggccgggagttgactcacctactggatgtcggtctccaggaggttgtgcatgctggtttctgccacctccttggactcctcaaacttctccagcgcctggtgcagctcctcttcggggatcttgccctgccgcttcttttagtcaaagtccaggcggcggccctccagcttctgcaggtggtgctggatctccttcaggtctttctcacataggttctggagggggtcaatgaagttatgcttgacctctatgtccagggagtccttcacctctgccaggtgcttcatgggctcgccggcatccagcagtgcatcgctgaagttggacgcacatcgtgcagtttcgggatcctctagattacccagcaacacgt

SEQ ID NO: 428488 - DNA, 1650 bp, Homo sapiens
  misc_feature (9)..(9): n is a, c, g, or t
ggcctcagntgcggcgtcactcagacaagggggcgggtggaggaggaagcggccaagtccacagtcctgctccggtgccgccgagcaccgcccacctcagctgaccagccctgtccgctactaggcctcgcctagaggagggaaaggccgtggcgtccgctccctccgcggctcatggcgacgacgcttggcacatccgggaccctcaggccgctgcagtcgcgtcgccggctgctcgggccccagccccggccgctgtggtgactccgccgcgcctcgccgtcgcccccgtcccgcccgccgccccagccgccagggacatgtctaacctcggaggccgtaggaacgggcctgtcgaagtgcgcctgacagggacatgccacccccgttttaggagaacttgtatttggtttgagaaggaattggaatcacggcgttatcctaccttcaccatttacccctgataaattgtccacgtttatatttgggaatcatattgacaggtcatgaaaatgagaccaaaagatctctggaagcgattaatgataaaatttcatggagaagaaggccttgactacggaggggttgccaggttcatgttgctgaggaggcagagggctgagttcttccatccatcgccttcaagtgtcaggcggcttccggttggacaagatggctaccccagtgggcttgtttcctctctggtctctttttctgtctaagactcactccataccagcctgagcttgggaccattgttttgctcctctcatcctcctacccccagagctgacagatttagcaaataaaatttacaagatcctgttaaattaagaatttcggacaaacaacaaactaccccacactgtctcaggagggtccctcagagataagtgtcactgagcctcgggaaggaggaagctccatccctgcccatcaagccccctcttgggtcccctcaaggaagacagtggttccagaaggtgtgttcccaccccctttcacagcctacctctctcccatccctctctgaccccaggttccagctggcctggggatttctgggaggatccgaagaacaaggccatctgcagtaggagcctcctgttcctcgccacctacgcttcagccctgcccaactaacagctctccatgttctaaagaaggcaggagtgctggaccaccccagccttctggaaccccagttctgtgacattatccatctcctggaaatatgctggttttaaccatgcaaattagttaagcatcaggcagaaatagcagctgggcctggaagcacaggtgacgtctgtgaggaaaatggctgggtgggacagggtggagagcacgggctgttcccttcctttctgggaacagcaccacctttggggtaactccttctctcatggggttttaggcgggggctgccagtgccagtgcccggtcccctgtcaccccccatagtcataggaacgcttctgcgccagtcactacatttataaggggaagctggtggagctgctcagcttccaacaggaagcccatgtgtgcagggccagaggacacagcccatctgaggtgctaagcttctgtgaagagggagtggagtctggaccggattccagtcccacggtccaccctttctgggac

SEQ ID NO: 428489 - DNA, 681 bp, Homo sapiens
tttgtgtgagcaacaaggttgtttatttcacttgggtgcaagtggactgagtccacaaagagagtcagcaaagggagatggggtggagcagctttataggatttgggtaggtggtggaaaattacagttaaaggtagttatctcttgcagacagggcaggggtcacaaggtgcaggatggggagatcatgagactcattgtccaggggaggaatgtcacaaggccagttgattagttggggtggggcaggaacaaatcaccatggtggaatgtcatcagtgaaggcaggaactggctgtttcatttttttggtggttcttcagttgctccaggccacctggacgaatacctgcagatcacaggggttaacgatggcttagcttgggctcagcggcctgacattgaggatccttctttatctttttctgatgcccttctatgagaatgaatatgttttggaagaaaatgcaattaagattatccatcacaacaaccactatctccaaatctgtattcattgcttctattcattattcattataagtctcatctacctgatgaaataacttttttgaagataggaattgtatgctgtttaacagtgctttgattcttccacagttcagtcatccttgatatcttgcaggggattgttctagatacacgctgccacgccatacc

SEQ ID NO: 428490 - DNA, 1115 bp, Homo sapiens
gaaaatccttgaagaaatttccttcagaaaactcctgaagctgttagaatttttagtgttcatgttgctgaggaggcagagggctgagttcttccatccatcgccttcaagtgtcaggcggcttccggttggacaagatggctaccccagtgggcttgtttcctctctggtctctttttctgtctaagactcactccataccagcctgagcttgggaccattgttttgctcctctcatcctcctacccccagagctgacagatttagcaaataaaatttacaagatcctgttaaattaagaatttcggacaaacaacaaactaccccacactgtctcaggagggtccctcagagataagtgtcactgagcctcgggaaggaggaagctccatccctgcccatcaagccccctcttgggtcccctcaaggaagacagtggttccagaaggtgtgttcccaccccctttcacagcctacctctctcccatccctctctgaccccaggttccagctggcctggggatttctgggaggatccgaagaacaaggccatctgcagtaggagcctcctgttcctcgccacctacgcttcagccctgcccaactaacagctctccatgttctaaagaaggcaggagtgctggaccaccccagccttctggaaccccagttctgtgacattatccatctcctggaaatatgctggttttaaccatgcaaattagttaagcatcaggcagaaatagcagctgggcctggaagcacaggtgacgtctgtgaggaaaatggctgggtgggacagggtggagagcacgggctgttcccttcctttctgggaacagcaccacctttggggtaactccttctctcatggggttttaggcgggggctgccagtgccagtgcccggtcccctgtcaccccccatagtcataggaacgcttctgcgccagtcactacatttataaggggaagctggtggagctgctcagcttccaacaggaagcccatgtgtgcagggccagaggacacagcccatctgaggtgctaagcttctgtgaagagggagtggagtctggaccggattccagtcccacggtccaccctttctgggac

SEQ ID NO: 428491 - DNA, 5503 bp, Homo sapiens
  misc_feature (9)..(9): n is a, c, g, or t
ggcctcagntgcggcgtcactcagacaagggggcgggtggaggaggaagcggccaagtccacagtcctgctccggtgccgccgagcaccgcccacctcagctgaccagccctgtccgctactaggcctcgcctagaggagggaaaggccgtggcgtccgctccctccgcggctcatggcgacgacgcttggcacatccgggaccctcaggccgctgcagtcgcgtcgccggctgctcgggccccagccccggccgctgtggtgactccgccgcgcctcgccgtcgcccccgtcccgcccgccgccccagccgccagggacatgtctaacctcggaggccgtaggaacgggcctgtcgaagtgcgcctgacagggacatgccacccccgttttaggagaacttgtatttggtttgagaaggaattggaatcacggcgttatcctaccttcaccatttacccctgataaattgtccacgtttatatttgggaatcatattgacaggtcatgaaaatgagaccaaaagatctctggaagcgattaatgataaaatttcatggagaagaaggccttgactacggaggggttgccagggtgatgacaactccgtgagggtggagattatacatctctcatcatttcagcaacaaggaaataaattagtggcagagtaagggtgacttgagatctcttggaagcgaggatcctttaaaaatcctggaatatacactgcagtaaaagaacaaagcatacctcagccttaaacgactgaagaagaatgtcaagtggggaagtggctttggttttcagtttgtgggttctgaatccacacaaagacaggattgctttctgaaaacctgaattaattattgtccttacctcaataagacaaaaaattagaatcaaaatcgttagtattacagtcacagatatcaccaagattagtttgttgttatagccatatcctggaacttctttcgtgagctcactcgacttctgctctttctgttcactctgggcttctgtgctttcattaatatagttcttagttttccactggtctgtatcccattctgccttggacgcctttacttcctgctgctcactgagaagcctcatcaggaggcctgtcctggagatgagcttggcacaggtcacttgcacataggtctcggagcagtccgtcttcaaggtccagataacatgagaaatgaagcttctcacatcgttgttggggatgacggactgtagttgatgggttagcggaatttcaaactgatcacctggggatgagagcaatgggtaactgaagcttttgggctcgggggacaggtcagtgcccacgttgttgtattcccattttgtctcagtttgtttaacagttggctctaagttgaatgcagtcctagtgggaatctgcctcaggaagatgattgtagtttgtgttttcagagatggtgccttctggcatagtagtgttttccataaaaacgttttcttcagaggcatttcttgcagttgtgttttttacagtagtgttttctataaaacattctgaaggagcaaatacttctggaaaagggttttcttgaggactcaggtctcctgaggatgaaaaagccccttgtgaaggggaatttatgaggctcttcactgcagagaacggcggcctctttgcgagcatcagtctattgagataacttttctttctcaattttctaatctttttggccttgggtgttctgtgggccacacgggagtgagttttatgaaagtggtatttttttctggaatgtactactcgtttagcagccttcatattttttaactctagcctttgcattttctaaaattaaaatggtgtaggctaagtctttcaatctgtctatgacctgaggtagggcttttgcagttgtggaaggcagaaggcatgcccatggagaagggtttcagcaaagaggagactgttggcttctgctcttgggtgaatgaaggcttggtgtagacggcgtttcccgctacgttctcgggcccctgcactatgtgaggctattccagctcccttggggctggactcccgagccttttttctttggcagcattctccccaaatgcctgggcaccctgttccctcctgatactctgctttcccaccgctttgaagggccttttctggatgctccttgggcccatgaggactctgttcactctctgcaggtttttgcctacactttgaacctttgccaggctgttttcctgtggttggacagtttctaatttcttttcaaatatttggcatttaaatttgttacctagaaggctggactgcataagcatggcagttttttcttcccttttaacttcatcgatttttttcttgtatttctgcatctaacatcttttctagcaaatacacctttctcaatttattttcataagttgaattgttggatgcaggttgaaacaaggggctctttgtattgtttttcaaaacaggagcttatctccatcttgcacatttgaaaaaagcagtttaatgaatggtaacaacattgattccgcatctagatttcctgctgagaaataaggcaagatgtaatttagcgcagtgataacatcactcttatcataagtgtctagctgctcactcccaaagactgacaagttgatgccactgctgtctgaggctgcctccggctcagtagtcagctcaatgctcatgtgcttcttctgggcttgtaacaccttcatgaacactctttctggattccctacagatgcttcttcacctgtcaaaaaaaagagactgctttgatcatgaaagataatggaacggcatgcatcagtccacagctgtatgccccagtcacacaaagtaggagtcagcaaacattagagtgccattcagagaggagaaacacacacccaagcctaaatctatgaaatggcaacaacaaaaggaggaaaagacatcttttgaaaatatggctacttacttggaacattcctagtgtgacatagagtaactctgcttaggattatttcgttgatccccaggggccaattgcccagtgctcagtcaaagcccaaggtggaagacaagtgcttccctgatgagctgtcctctctgcagactgctccgtaccctgtgctgtcctgcctcagatgcagagagagcacaagcctccctcctcatcctcagtgtgcctgtgttcttactaccatcacagctgaatgcaatgaaaggctatcctctgagaggagcagggtggagatgctaaagtggaggccccctcccattgctgatagatcctcatctggcatgcactccacccacccaccccattctctgctaccacatatcgtagccccattaaagaagaagtgacatggaaaaaacactgtgcccaccctagtccttttcttaaatttgggcagagatccagggtataggttaagagatttttaatttgccagatggtatgcctatgttgttaaatatacaatgaatctatggtatgatagcagtttctggataaacattacttgaggtcctaaaatgcagaagggaaaaagcagcttttgtcagatgcttactttgctttcatttcatctctaatattttggatggggaaccatccaaagcttctggccgcatgaaggtcaagtgtgccagtgtgcagctgggtttcttttccagaattaaaagtattttgggtggtgctgagggtcagaggaagaagtaaaaattgtgagaaaggagaaacatgggcttggggagaacccagaattggggacagaagacctggcactaagctatagcacttagcacctctgatcttgtttttcctcgtccgtaaaaggagattaacaatgcttttctgcccacctcttggggagaagggaataatttagttggtaaaaaaaaaacttttgaataataagcaactctgtctttatataagtagccaagcattattaattatccaccccatatcactggtagatacctgtattcaacagtcacattttagaagtcatgaagttggtgctaataaacctaatctacagaaaaactcttgaaagcacttgagcatttgttctgtgaatagaaaggtttgagattcagagcaagttcagagttggatggtctaagaatggaaaagccctccattccattagaagagccagggagcaatttctggttatggaaccagaagctctcaggcttcaaataaaacagcatcacttgtactcttataaaattgtaaaaacaaaaacaaaactggatctacatttgtcctaaaaggcagagagtacttgagacctcatgcatataaaaccagcttacaaactacatcgcactatatgaagaaattatcactgggggcaaatcaccaagtagggagcacaatacacagggtgtggatgttaatgtcattccctagccttctcattcccttctcttggtcctttatgcatatggaacagttccattattaaattttgtaataataactgagaacctgactcccagcaagggagtagttcagaagttgagggagtttaaatctgaatgagtaaataaagcaattatatcattagcttaaaattttatcatcaattaaaaataaatttaaaaacaaatacttaaaataatgtaacaatttatcaccaggcaatttggactcacgacaatgtgtggtgtttgtcagacatgcactgttgcaatgcagcttgactgtcttgcagacagcctcaatgctatttttaaattggcagaggcagcaggccatatggctaggtaagatcctataagatgaaaacacaaaacaataaatagtggtaaagcagttacttgagtaggcaaaggaggcaggccaacgctaccacagggctgggcagaaaggtgttactgaggcctgtggactggacagttgggtaggaaccagaagggcaatgggaaggaggacaaaggtgcccaactgaagggtaagcatggcagtgagtatggtatgcctagaataaaagtggttgggattagaattgggtgacactgatcagtagtttaattcagaagtatctcttcccaactcaaaagtctcactttgggctgaaagtacacaggaagaaagtagacttctaagaagagtctgaataagcccccaacttctggagtccctttctcaatttctgttggcagtgggaaatattagaaattactctgggcattaaaaatagctcagtttaacctggattgtggggttaaaaaaataacagattgcattggccaaatctcgacaatttgagcattcaaaagagtaacaataagctacaacataattaatatataaaaaagaatccatgaagaatgatatttaaaaagagagggagttgttctttaatgaaataatgccagctaatgaatgtagaaggaatgacagaattttaaaaagtgttactttgcaaccaccaatgtaataaaaattgattcagacaaggat

SEQ ID NO: 428492 - DNA, 5467 bp, Homo sapiens
  misc_feature (9)..(9): n is a, c, g, or t
ggcctcagntgcggcgtcactcagacaagggggcgggtggaggaggaagcggccaagtccacagtcctgctccggtgccgccgagcaccgcccacctcagctgaccagccctgtccgctactaggcctcgcctagaggagggaaaggccgtggcgtccgctccctccgcggctcatggcgacgacgcttggcacatccgggaccctcaggccgctgcagtcgcgtcgccggctgctcgggccccagccccggccgctgtggtgactccgccgcgcctcgccgtcgcccccgtcccgcccgccgccccagccgccagggacatgtctaacctcggaggccgtaggaacgggcctgtcgaagtgcgcctgacagggacatgccacccccgttttaggagaacttgtatttggtttgagaaggaattggaatcacggcgttatcctaccttcaccatttacccctgataaattgtccacgtttatatttgggaatcatattgacaggtcatgaaaatgagaccaaaagatctctggaagcgattaatgataaaatttcatggagaagaaggccttgactacggaggggttgccagggtgatgacaactccgtgagggtggagattatacatctctcatcatttcagcaacaaggaaataaattagtggcagagtaagggtgacttgagatctcttggaagcgaggatcctttaaaaatcctggaatatacactgcagtaaaagaacaaagcatacctcagccttaaacgactgaagaagaatgtcaagtggggaagtggctttggttttcagtttgtgggttctgaatccacacaaagacaggattgctttctgaaaacctgaattaattattgtccttacctcaataagacaaaaaattagaatcaaaatcgttagtattacagtcacagatatcaccaagattagtttgttgttatagccatatcctggaacttctttcgtgagctcactcgacttctgctctttctgttcactctgggcttctgtgctttcattaatatagttcttagttttccactggtctgtatcccattctgccttggacgcctttacttcctgctgctcactgagaagcctcatcaggaggcctgtcctggagatgagcttggcacaggtcacttgcacataggtctcggagcagtccgtcttcaaggtccagataacatgagaaatgaagcttctcacatcgttgttggggatgacggactgtagttgatgggttagcggaatttcaaactgatcacctggggatgagagcaatgggtaactgaagcttttgggctcgggggacaggtcagtgcccacgttgttgtattcccattttgtctcagtttgtttaacagttggctctaagttgaatgcagtcctagtgggaatctgcctcaggaagatgattgtagtttgtgttttcagagatggtgccttctggcatagtagtgttttccataaaaacgttttcttcagaggcatttcttgcagttgtgttttttacagtagtgttttctataaaacattctgaaggagcaaatacttctggaaaagggttttcttgaggactcaggtctcctgaggatgaaaaagccccttgtgaaggggaatttatgaggctcttcactgcagagaacggcggcctctttgcgagcatcagtctattgagataacttttctttctcaattttctaatctttttggccttgggtgttctgtgggccacacgggagtgagttttatgaaagtggtatttttttctggaatgtactactcgtttagcagccttcatattttttaactctagcctttgcattttctaaaattaaaatggtgtaggctaagtctttcaatctgtctatgacctgaggtagggcttttgcagttgtggaaggcagaaggcatgcccatggagaagggtttcagcaaagaggagactgttggcttctgctcttgggtgaatgaaggcttggtgtagacggcgtttcccgctacgttctcgggcccctgcactatgtgaggctattccagctcccttggggctggactcccgagccttttttctttggcagcattctccccaaatgcctgggcaccctgttccctcctgatactctgctttcccaccgctttgaagggccttttctggatgctccttgggcccatgaggactctgttcactctctgcaggtttttgcctacactttgaacctttgccaggctgttttcctgtggttggacagtttctaatttcttttcaaatatttggcatttaaatttgttacctagaaggctggactgcataagcatggcagttttttcttcccttttaacttcatcgatttttttcttgtatttctgcatctaacatcttttctagcaaatacacctttctcaatttattttcataagttgaattgttggatgcaggttgaaacaaggggctctttgtattgtttttcaaaacaggagcttatctccatcttgcacatttgaaaaaagcagtttaatgaatggtaacaacattgattccgcatctagatttcctgctgagaaataaggcaagatgtaatttagcgcagtgataacatcactcttatcataagtgtctagctgctcactcccaaagactgacaagttgatgccactgctgtctgaggctgcctccggctcagtagtcagctcaatgctcatgtgcttcttctgggcttgtaacaccttcatgaacactctttctggattccctacagatgcttcttcacctgtcaaaaaaaagagactgctttgatcatgaaagataatggaacggcatgcatcagtccacagctgtatgccccagtcacacaaagtaggagtcagcaaacattagagtgccattcagagaggagaaacacacacccaagcctaaatctatgaaatggcaacaacaaaaggaggaaaagacatcttttgaaaatatggctacttacttggaacattcctagtgtgacatagagtaactctgcttaggattatttcgttgatccccaggggccaattgcccagtgctcagtcaaagcccaaggtggaagacaagtgcttccctgatgagctgtcctctctgcagactgctccgtaccctgtgctgtcctgcctcagatgcagagagagcacaagcctccctcctcatcctcagtgtgcctgtgttcttactaccatcacagctgaatgcaatgaaaggctatcctctgagaggagcagggtggagatgctaaagtggaggccccctcccattgctgatagatcctcatctggcatgcactccacccacccaccccattctctgctaccacatatcgtagccccattaaagaagaagtgacatggaaaaaacactgtgcccaccctagtccttttcttaaatttgggcagagatccagggtataggttaagagatttttaatttgccagatggtatgcctatgttgttaaatatacaatgaatctatggtatgatagcagtttctggataaacattacttgaggtcctaaaatgcagaagggaaaaagcagcttttgtcagatgcttactttgctttcatttcatctctaatattttggatggggaaccatccaaagcttctggccgcatgaaggtcaagtgtgccagtgtgcagctgggtttcttttccagaattaaaagtattttgggtggtgctgagggtcagaggaagaagtaaaaattgtgagaaaggagaaacatgggcttggggagaacccagaattggggacagaagacctggcactaagctatagcacttagcacctctgatcttgtttttcctcgtccgtaaaaggagattaacaatgcttttctgcccacctcttggggagaagggaataatttagttggtaaaaaaaattatccaccccatatcactggtagatacctgtattcaagctatgtggacataaaagcagtcacattttagaagtcatgaagttggtgctaataaacctaatctacagaaaaactcttgaaagcacttgagcatttgttctgtgaatagaaaggtttgagattcagagcaagttcagagttggatggtctaagaatggaaaagccctccattccattagaagagccagggagcaatttctggttatggaaccagaagctctcaggcttcaaataaaacagcatcacttgtactcttataaaattgtaaaaacaaaaacaaaactggatctacatttgtcctaaaaggcagagagtacttgagacctcatgcatataaaaccagcttacaaactacatcgcactatatgaagaaattatcactgggggcaaatcaccaagtagggagcacaatacacagggtgtggatgttaatgtcattccctagccttctcattcccttctcttggtcctttatgcatatggaacagttccattattaaattttgtaataataactgagaacctgactcccagcaagggagtagttcagaagttgagggagtttaaatctgaatgagtaaataaagcaattatatcattagcttaaaattttatcatcaattaaaaataaatttaaaaacaaatacttaaaataatgtaacaatttatcaccaggcaatttggactcacgacaatgtgtggtgtttgtcagacatgcactgttgcaatgcagcttgactgtcttgcagacagcctcaatgctatttttaaattggcagaggcagcaggccatatggctaggtaagatcctataagatgaaaacacaaaacaataaatagtggtaaagcagttacttgagtaggcaaaggaggcaggccaacgctaccacagggctgggcagaaaggtgttactgaggcctgtggactggacagttgggtaggaaccagaagggcaatgggaaggaggacaaaggtgcccaactgaagggtaagcatggcagtgagtatggtatgcctagaataaaagtggttgggattagaattgggtgacactgatcagtagtttaattcagaagtatctcttcccaactcaaaagtctcactttgggctgaaagtacacaggaagaaagtagacttctaagaagagtctgaataagcccccaacttctggagtccctttctcaatttctgttggcagtgggaaatattagaaattactctgggcattaaaaatagctcagtttaacctggattgtggggttaaaaaaataacagattgcattggccaaatctcgacaatttgagcattcaaaagagtaacaataagctacaacataattaatatataaaaaagaatccatgaagaatgatatttaaaaagagagggagttgttctttaatgaaataatgccagctaatgaatgtagaaggaatgacagaattttaaaaagtgttactttgcaaccaccaatgtaataaaaattgattcagacaaggat

SEQ ID NO: 428493 - DNA, 5405 bp, Homo sapiens
  misc_feature (9)..(9): n is a, c, g, or t
ggcctcagntgcggcgtcactcagacaagggggcgggtggaggaggaagcggccaagtccacagtcctgctccggtgccgccgagcaccgcccacctcagctgaccagccctgtccgctactaggcctcgcctagaggagggaaaggccgtggcgtccgctccctccgcggctcatggcgacgacgcttggcacatccgggaccctcaggccgctgcagtcgcgtcgccggctgctcgggccccagccccggccgctgtggtgactccgccgcgcctcgccgtcgcccccgtcccgcccgccgccccagccgccagggacatgtctaacctcggaggccgtaggaacgggcctgtcgaagtgcgcctgacaggaatcatattgacaggtcatgaaaatgagaccaaaagatctctggaagcgattaatgataaaatttcatggagaagaaggccttgactacggaggggttgccagggtgatgacaactccgtgagggtggagattatacatctctcatcatttcagcaacaaggaaataaattagtggcagagtaagggtgacttgagatctcttggaagcgaggatcctttaaaaatcctggaatatacactgcagtaaaagaacaaagcatacctcagccttaaacgactgaagaagaatgtcaagtggggaagtggctttggttttcagtttgtgggttctgaatccacacaaagacaggattgctttctgaaaacctgaattaattattgtccttacctcaataagacaaaaaattagaatcaaaatcgttagtattacagtcacagatatcaccaagattagtttgttgttatagccatatcctggaacttctttcgtgagctcactcgacttctgctctttctgttcactctgggcttctgtgctttcattaatatagttcttagttttccactggtctgtatcccattctgccttggacgcctttacttcctgctgctcactgagaagcctcatcaggaggcctgtcctggagatgagcttggcacaggtcacttgcacataggtctcggagcagtccgtcttcaaggtccagataacatgagaaatgaagcttctcacatcgttgttggggatgacggactgtagttgatgggttagcggaatttcaaactgatcacctggggatgagagcaatgggtaactgaagcttttgggctcgggggacaggtcagtgcccacgttgttgtattcccattttgtctcagtttgtttaacagttggctctaagttgaatgcagtcctagtgggaatctgcctcaggaagatgattgtagtttgtgttttcagagatggtgccttctggcatagtagtgttttccataaaaacgttttcttcagaggcatttcttgcagttgtgttttttacagtagtgttttctataaaacattctgaaggagcaaatacttctggaaaagggttttcttgaggactcaggtctcctgaggatgaaaaagccccttgtgaaggggaatttatgaggctcttcactgcagagaacggcggcctctttgcgagcatcagtctattgagataacttttctttctcaattttctaatctttttggccttgggtgttctgtgggccacacgggagtgagttttatgaaagtggtatttttttctggaatgtactactcgtttagcagccttcatattttttaactctagcctttgcattttctaaaattaaaatggtgtaggctaagtctttcaatctgtctatgacctgaggtagggcttttgcagttgtggaaggcagaaggcatgcccatggagaagggtttcagcaaagaggagactgttggcttctgctcttgggtgaatgaaggcttggtgtagacggcgtttcccgctacgttctcgggcccctgcactatgtgaggctattccagctcccttggggctggactcccgagccttttttctttggcagcattctccccaaatgcctgggcaccctgttccctcctgatactctgctttcccaccgctttgaagggccttttctggatgctccttgggcccatgaggactctgttcactctctgcaggtttttgcctacactttgaacctttgccaggctgttttcctgtggttggacagtttctaatttcttttcaaatatttggcatttaaatttgttacctagaaggctggactgcataagcatggcagttttttcttcccttttaacttcatcgatttttttcttgtatttctgcatctaacatcttttctagcaaatacacctttctcaatttattttcataagttgaattgttggatgcaggttgaaacaaggggctctttgtattgtttttcaaaacaggagcttatctccatcttgcacatttgaaaaaagcagtttaatgaatggtaacaacattgattccgcatctagatttcctgctgagaaataaggcaagatgtaatttagcgcagtgataacatcactcttatcataagtgtctagctgctcactcccaaagactgacaagttgatgccactgctgtctgaggctgcctccggctcagtagtcagctcaatgctcatgtgcttcttctgggcttgtaacaccttcatgaacactctttctggattccctacagatgcttcttcacctgtcaaaaaaaagagactgctttgatcatgaaagataatggaacggcatgcatcagtccacagctgtatgccccagtcacacaaagtaggagtcagcaaacattagagtgccattcagagaggagaaacacacacccaagcctaaatctatgaaatggcaacaacaaaaggaggaaaagacatcttttgaaaatatggctacttacttggaacattcctagtgtgacatagagtaactctgcttaggattatttcgttgatccccaggggccaattgcccagtgctcagtcaaagcccaaggtggaagacaagtgcttccctgatgagctgtcctctctgcagactgctccgtaccctgtgctgtcctgcctcagatgcagagagagcacaagcctccctcctcatcctcagtgtgcctgtgttcttactaccatcacagctgaatgcaatgaaaggctatcctctgagaggagcagggtggagatgctaaagtggaggccccctcccattgctgatagatcctcatctggcatgcactccacccacccaccccattctctgctaccacatatcgtagccccattaaagaagaagtgacatggaaaaaacactgtgcccaccctagtccttttcttaaatttgggcagagatccagggtataggttaagagatttttaatttgccagatggtatgcctatgttgttaaatatacaatgaatctatggtatgatagcagtttctggataaacattacttgaggtcctaaaatgcagaagggaaaaagcagcttttgtcagatgcttactttgctttcatttcatctctaatattttggatggggaaccatccaaagcttctggccgcatgaaggtcaagtgtgccagtgtgcagctgggtttcttttccagaattaaaagtattttgggtggtgctgagggtcagaggaagaagtaaaaattgtgagaaaggagaaacatgggcttggggagaacccagaattggggacagaagacctggcactaagctatagcacttagcacctctgatcttgtttttcctcgtccgtaaaaggagattaacaatgcttttctgcccacctcttggggagaagggaataatttagttggtaaaaaaaaaacttttgaataataagcaactctgtctttatataagtagccaagcattattaattatccaccccatatcactggtagatacctgtattcaagctatgtggacataaaagcagtcacattttagaagtcatgaagttggtgctaataaacctaatctacagaaaaactcttgaaagcacttgagcatttgttctgtgaatagaaaggtttgagattcagagcaagttcagagttggatggtctaagaatggaaaagccctccattccattagaagagccagggagcaatttctggttatggaaccagaagctctcaggcttcaaataaaacagcatcacttgtactcttataaaattgtaaaaacaaaaacaaaactggatctacatttgtcctaaaaggcagagagtacttgagacctcatgcatataaaaccagcttacaaactacatcgcactatatgaagaaattatcactgggggcaaatcaccaagtagggagcacaatacacagggtgtggatgttaatgtcattccctagccttctcattcccttctcttggtcctttatgcatatggaacagttccattattaaattttgtaataataactgagaacctgactcccagcaagggagtagttcagaagttgagggagtttaaatctgaatgagtaaataaagcaattatatcattagcttaaaattttatcatcaattaaaaataaatttaaaaacaaatacttaaaataatgtaacaatttatcaccaggcaatttggactcacgacaatgtgtggtgtttgtcagacatgcactgttgcaatgcagcttgactgtcttgcagacagcctcaatgctatttttaaattggcagaggcagcaggccatatggctaggtaagatcctataagatgaaaacacaaaacaataaatagtggtaaagcagttacttgagtaggcaaaggaggcaggccaacgctaccacagggctgggcagaaaggtgttactgaggcctgtggactggacagttgggtaggaaccagaagggcaatgggaaggaggacaaaggtgcccaactgaagggtaagcatggcagtgagtatggtatgcctagaataaaagtggttgggattagaattgggtgacactgatcagtagtttaattcagaagtatctcttcccaactcaaaagtctcactttgggctgaaagtacacaggaagaaagtagacttctaagaagagtctgaataagcccccaacttctggagtccctttctcaatttctgttggcagtgggaaatattagaaattactctgggcattaaaaatagctcagtttaacctggattgtggggttaaaaaaataacagattgcattggccaaatctcgacaatttgagcattcaaaagagtaacaataagctacaacataattaatatataaaaaagaatccatgaagaatgatatttaaaaagagagggagttgttctttaatgaaataatgccagctaatgaatgtagaaggaatgacagaattttaaaaagtgttactttgcaaccaccaatgtaataaaaattgattcagacaaggat

SEQ ID NO: 428494 - DNA, 5639 bp, Homo sapiens
  misc_feature (9)..(9): n is a, c, g, or t
ggcctcagntgcggcgtcactcagacaagggggcgggtggaggaggaagcggccaagtccacagtcctgctccggtgccgccgagcaccgcccacctcagctgaccagccctgtccgctactaggcctcgcctagaggagggaaaggccgtggcgtccgctccctccgcggctcatggcgacgacgcttggcacatccgggaccctcaggccgctgcagtcgcgtcgccggctgctcgggccccagccccggccgctgtggtgactccgccgcgcctcgccgtcgcccccgtcccgcccgccgccccagccgccagggacatgtctaacctcggaggccgtaggaacgggcctgtcgaagtgcgcctgacagggacatgccacccccgttttaggagaacttgtatttggtttgagaaggaattggaatcacggcgttatcctaccttcaccatttacccctgataaattgtccacgtttatatttgggaatcatattgacaggtcatgaaaatgagaccaaaagatctctggaagcgattaatgataaaatttcatggagaagaaggccttgactacggaggggttgccagggtctccctctgtcacccaggctggagtgtagtggcgcgatctcgggtcactgcaacctccccaagctgggctcaagagatcctcccacctcagcctcctgagcagctgggactacagggtgatgacaactccgtgagggtggagattatacatctctcatcatttcagcaacaaggaaataaattagtggcagagtaagggtgacttgagatctcttggaagcgaggatcctttaaaaatcctggaatatacactgcagtaaaagaacaaagcatacctcagccttaaacgactgaagaagaatgtcaagtggggaagtggctttggttttcagtttgtgggttctgaatccacacaaagacaggattgctttctgaaaacctgaattaattattgtccttacctcaataagacaaaaaattagaatcaaaatcgttagtattacagtcacagatatcaccaagattagtttgttgttatagccatatcctggaacttctttcgtgagctcactcgacttctgctctttctgttcactctgggcttctgtgctttcattaatatagttcttagttttccactggtctgtatcccattctgccttggacgcctttacttcctgctgctcactgagaagcctcatcaggaggcctgtcctggagatgagcttggcacaggtcacttgcacataggtctcggagcagtccgtcttcaaggtccagataacatgagaaatgaagcttctcacatcgttgttggggatgacggactgtagttgatgggttagcggaatttcaaactgatcacctggggatgagagcaatgggtaactgaagcttttgggctcgggggacaggtcagtgcccacgttgttgtattcccattttgtctcagtttgtttaacagttggctctaagttgaatgcagtcctagtgggaatctgcctcaggaagatgattgtagtttgtgttttcagagatggtgccttctggcatagtagtgttttccataaaaacgttttcttcagaggcatttcttgcagttgtgttttttacagtagtgttttctataaaacattctgaaggagcaaatacttctggaaaagggttttcttgaggactcaggtctcctgaggatgaaaaagccccttgtgaaggggaatttatgaggctcttcactgcagagaacggcggcctctttgcgagcatcagtctattgagataacttttctttctcaattttctaatctttttggccttgggtgttctgtgggccacacgggagtgagttttatgaaagtggtatttttttctggaatgtactactcgtttagcagccttcatattttttaactctagcctttgcattttctaaaattaaaatggtgtaggctaagtctttcaatctgtctatgacctgaggtagggcttttgcagttgtggaaggcagaaggcatgcccatggagaagggtttcagcaaagaggagactgttggcttctgctcttgggtgaatgaaggcttggtgtagacggcgtttcccgctacgttctcgggcccctgcactatgtgaggctattccagctcccttggggctggactcccgagccttttttctttggcagcattctccccaaatgcctgggcaccctgttccctcctgatactctgctttcccaccgctttgaagggccttttctggatgctccttgggcccatgaggactctgttcactctctgcaggtttttgcctacactttgaacctttgccaggctgttttcctgtggttggacagtttctaatttcttttcaaatatttggcatttaaatttgttacctagaaggctggactgcataagcatggcagttttttcttcccttttaacttcatcgatttttttcttgtatttctgcatctaacatcttttctagcaaatacacctttctcaatttattttcataagttgaattgttggatgcaggttgaaacaaggggctctttgtattgtttttcaaaacaggagcttatctccatcttgcacatttgaaaaaagcagtttaatgaatggtaacaacattgattccgcatctagatttcctgctgagaaataaggcaagatgtaatttagcgcagtgataacatcactcttatcataagtgtctagctgctcactcccaaagactgacaagttgatgccactgctgtctgaggctgcctccggctcagtagtcagctcaatgctcatgtgcttcttctgggcttgtaacaccttcatgaacactctttctggattccctacagatgcttcttcacctgtcaaaaaaaagagactgctttgatcatgaaagataatggaacggcatgcatcagtccacagctgtatgccccagtcacacaaagtaggagtcagcaaacattagagtgccattcagagaggagaaacacacacccaagcctaaatctatgaaatggcaacaacaaaaggaggaaaagacatcttttgaaaatatggctacttacttggaacattcctagtgtgacatagagtaactctgcttaggattatttcgttgatccccaggggccaattgcccagtgctcagtcaaagcccaaggtggaagacaagtgcttccctgatgagctgtcctctctgcagactgctccgtaccctgtgctgtcctgcctcagatgcagagagagcacaagcctccctcctcatcctcagtgtgcctgtgttcttactaccatcacagctgaatgcaatgaaaggctatcctctgagaggagcagggtggagatgctaaagtggaggccccctcccattgctgatagatcctcatctggcatgcactccacccacccaccccattctctgctaccacatatcgtagccccattaaagaagaagtgacatggaaaaaacactgtgcccaccctagtccttttcttaaatttgggcagagatccagggtataggttaagagatttttaatttgccagatggtatgcctatgttgttaaatatacaatgaatctatggtatgatagcagtttctggataaacattacttgaggtcctaaaatgcagaagggaaaaagcagcttttgtcagatgcttactttgctttcatttcatctctaatattttggatggggaaccatccaaagcttctggccgcatgaaggtcaagtgtgccagtgtgcagctgggtttcttttccagaattaaaagtattttgggtggtgctgagggtcagaggaagaagtaaaaattgtgagaaaggagaaacatgggcttggggagaacccagaattggggacagaagacctggcactaagctatagcacttagcacctctgatcttgtttttcctcgtccgtaaaaggagattaacaatgcttttctgcccacctcttggggagaagggaataatttagttggtaaaaaaaaaacttttgaataataagcaactctgtctttatataagtagccaagcattattaattatccaccccatatcactggtagatacctgtattcaagctatgtggacataaaagcagtcacattttagaagtcatgaagttggtgctaataaacctaatctacagaaaaactcttgaaagcacttgagcatttgttctgtgaatagaaaggtttgagattcagagcaagttcagagttggatggtctaagaatggaaaagccctccattccattagaagagccagggagcaatttctggttatggaaccagaagctctcaggcttcaaataaaacagcatcacttgtactcttataaaattgtaaaaacaaaaacaaaactggatctacatttgtcctaaaaggcagagagtacttgagacctcatgcatataaaaccagcttacaaactacatcgcactatatgaagaaattatcactgggggcaaatcaccaagtagggagcacaatacacagggtgtggatgttaatgtcattccctagccttctcattcccttctcttggtcctttatgcatatggaacagttccattattaaattttgtaataataactgagaacctgactcccagcaagggagtagttcagaagttgagggagtttaaatctgaatgagtaaataaagcaattatatcattagcttaaaattttatcatcaattaaaaataaatttaaaaacaaatacttaaaataatgtaacaatttatcaccaggcaatttggactcacgacaatgtgtggtgtttgtcagacatgcactgttgcaatgcagcttgactgtcttgcagacagcctcaatgctatttttaaattggcagaggcagcaggccatatggctaggtaagatcctataagatgaaaacacaaaacaataaatagtggtaaagcagttacttgagtaggcaaaggaggcaggccaacgctaccacagggctgggcagaaaggtgttactgaggcctgtggactggacagttgggtaggaaccagaagggcaatgggaaggaggacaaaggtgcccaactgaagggtaagcatggcagtgagtatggtatgcctagaataaaagtggttgggattagaattgggtgacactgatcagtagtttaattcagaagtatctcttcccaactcaaaagtctcactttgggctgaaagtacacaggaagaaagtagacttctaagaagagtctgaataagcccccaacttctggagtccctttctcaatttctgttggcagtgggaaatattagaaattactctgggcattaaaaatagctcagtttaacctggattgtggggttaaaaaaataacagattgcattggccaaatctcgacaatttgagcattcaaaagagtaacaataagctacaacataattaatatataaaaaagaatccatgaagaatgatatttaaaaagagagggagttgttctttaatgaaataatgccagctaatgaatgtagaaggaatgacagaattttaaaaagtgttactttgcaaccaccaatgtaataaaaattgattcagacaaggat

SEQ ID NO: 428495 - DNA, 4931 bp, Homo sapiens
ggtgatcctcccacctcagcctctagagtagctggaattataggcacaagtcaccacacccaactaatttttgtattttttgtgaagatagggtttcactatattggtcaagctggtctcaaactcctctgacttcaagtgatctacccacctcggcctcccaaagtgctgggtttacaggcgtgagctaccatgcccagcctacagttcatcctgtgcactaatctgtttcactctctaaatgaacaaagtgggagatcactgtcatggccaaagttacatggccaagacaaactatggcctgggagtcccaggttctcctgtgtgggcactttcctggcatatgctaaatgatgggaaagtctgggtctcatgtttctgtgtggtcctcacctcactcgacttctgctctttctgttcactctgggcttctgtgctttcattaatatagttcttagttttccactggtctgtatcccattctgccttggacgcctttacttcctgctgctcactgagaagcctcatcaggaggcctgtcctggagatgagcttggcacaggtcacttgcacataggtctcggagcagtccgtcttcaaggtccagataacatgagaaatgaagcttctcacatcgttgttggggatgacggactgtagttgatgggttagcggaatttcaaactgatcacctggggatgagagcaatgggtaactgaagcttttgggctcgggggacaggtcagtgcccacgttgttgtattcccattttgtctcagtttgtttaacagttggctctaagttgaatgcagtcctagtgggaatctgcctcaggaagatgattgtagtttgtgttttcagagatggtgccttctggcatagtagtgttttccataaaaacgttttcttcagaggcatttcttgcagttgtgttttttacagtagtgttttctataaaacattctgaaggagcaaatacttctggaaaagggttttcttgaggactcaggtctcctgaggatgaaaaagccccttgtgaaggggaatttatgaggctcttcactgcagagaacggcggcctctttgcgagcatcagtctattgagataacttttctttctcaattttctaatctttttggccttgggtgttctgtgggccacacgggagtgagttttatgaaagtggtatttttttctggaatgtactactcgtttagcagccttcatattttttaactctagcctttgcattttctaaaattaaaatggtgtaggctaagtctttcaatctgtctatgacctgaggtagggcttttgcagttgtggaaggcagaaggcatgcccatggagaagggtttcagcaaagaggagactgttggcttctgctcttgggtgaatgaaggcttggtgtagacggcgtttcccgctacgttctcgggcccctgcactatgtgaggctattccagctcccttggggctggactcccgagccttttttctttggcagcattctccccaaatgcctgggcaccctgttccctcctgatactctgctttcccaccgctttgaagggccttttctggatgctccttgggcccatgaggactctgttcactctctgcaggtttttgcctacactttgaacctttgccaggctgttttcctgtggttggacagtttctaatttcttttcaaatatttggcatttaaatttgttacctagaaggctggactgcataagcatggcagttttttcttcccttttaacttcatcgatttttttcttgtatttctgcatctaacatcttttctagcaaatacacctttctcaatttattttcataagttgaattgttggatgcaggttgaaacaaggggctctttgtattgtttttcaaaacaggagcttatctccatcttgcacatttgaaaaaagcagtttaatgaatggtaacaacattgattccgcatctagatttcctgctgagaaataaggcaagatgtaatttagcgcagtgataacatcactcttatcataagtgtctagctgctcactcccaaagactgacaagttgatgccactgctgtctgaggctgcctccggctcagtagtcagctcaatgctcatgtgcttcttctgggcttgtaacaccttcatgaacactctttctggattccctacagatgcttcttcacctgtcaaaaaaaagagactgctttgatcatgaaagataatggaacggcatgcatcagtccacagctgtatgccccagtcacacaaagtaggagtcagcaaacattagagtgccattcagagaggagaaacacacacccaagcctaaatctatgaaatggcaacaacaaaaggaggaaaagacatcttttgaaaatatggctacttacttggaacattcctagtgtgacatagagtaactctgcttaggattatttcgttgatccccaggggccaattgcccagtgctcagtcaaagcccaaggtggaagacaagtgcttccctgatgagctgtcctctctgcagactgctccgtaccctgtgctgtcctgcctcagatgcagagagagcacaagcctccctcctcatcctcagtgtgcctgtgttcttactaccatcacagctgaatgcaatgaaaggctatcctctgagaggagcagggtggagatgctaaagtggaggccccctcccattgctgatagatcctcatctggcatgcactccacccacccaccccattctctgctaccacatatcgtagccccattaaagaagaagtgacatggaaaaaacactgtgcccaccctagtccttttcttaaatttgggcagagatccagggtataggttaagagatttttaatttgccagatggtatgcctatgttgttaaatatacaatgaatctatggtatgatagcagtttctggataaacattacttgaggtcctaaaatgcagaagggaaaaagcagcttttgtcagatgcttactttgctttcatttcatctctaatattttggatggggaaccatccaaagcttctggccgcatgaaggtcaagtgtgccagtgtgcagctgggtttcttttccagaattaaaagtattttgggtggtgctgagggtcagaggaagaagtaaaaattgtgagaaaggagaaacatgggcttggggagaacccagaattggggacagaagacctggcactaagctatagcacttagcacctctgatcttgtttttcctcgtccgtaaaaggagattaacaatgcttttctgcccacctcttggggagaagggaataatttagttggtaaaaaaaaaacttttgaataataagcaactctgtctttatataagtagccaagcattattaattatccaccccatatcactggtagatacctgtattcaagctatgtggacataaaagcagtcacattttagaagtcatgaagttggtgctaataaacctaatctacagaaaaactcttgaaagcacttgagcatttgttctgtgaatagaaaggtttgagattcagagcaagttcagagttggatggtctaagaatggaaaagccctccattccattagaagagccagggagcaatttctggttatggaaccagaagctctcaggcttcaaataaaacagcatcacttgtactcttataaaattgtaaaaacaaaaacaaaactggatctacatttgtcctaaaaggcagagagtacttgagacctcatgcatataaaaccagcttacaaactacatcgcactatatgaagaaattatcactgggggcaaatcaccaagtagggagcacaatacacagggtgtggatgttaatgtcattccctagccttctcattcccttctcttggtcctttatgcatatggaacagttccattattaaattttgtaataataactgagaacctgactcccagcaagggagtagttcagaagttgagggagtttaaatctgaatgagtaaataaagcaattatatcattagcttaaaattttatcatcaattaaaaataaatttaaaaacaaatacttaaaataatgtaacaatttatcaccaggcaatttggactcacgacaatgtgtggtgtttgtcagacatgcactgttgcaatgcagcttgactgtcttgcagacagcctcaatgctatttttaaattggcagaggcagcaggccatatggctaggtaagatcctataagatgaaaacacaaaacaataaatagtggtaaagcagttacttgagtaggcaaaggaggcaggccaacgctaccacagggctgggcagaaaggtgttactgaggcctgtggactggacagttgggtaggaaccagaagggcaatgggaaggaggacaaaggtgcccaactgaagggtaagcatggcagtgagtatggtatgcctagaataaaagtggttgggattagaattgggtgacactgatcagtagtttaattcagaagtatctcttcccaactcaaaagtctcactttgggctgaaagtacacaggaagaaagtagacttctaagaagagtctgaataagcccccaacttctggagtccctttctcaatttctgttggcagtgggaaatattagaaattactctgggcattaaaaatagctcagtttaacctggattgtggggttaaaaaaataacagattgcattggccaaatctcgacaatttgagcattcaaaagagtaacaataagctacaacataattaatatataaaaaagaatccatgaagaatgatatttaaaaagagagggagttgttctttaatgaaataatgccagctaatgaatgtagaaggaatgacagaattttaaaaagtgttactttgcaaccaccaatgtaataaaaattgattcagacaaggat

SEQ ID NO: 428496 - DNA, 5548 bp, Homo sapiens
  misc_feature (9)..(9): n is a, c, g, or t
ggcctcagntgcggcgtcactcagacaagggggcgggtggaggaggaagcggccaagtccacagtcctgctccggtgccgccgagcaccgcccacctcagctgaccagccctgtccgctactaggcctcgcctagaggagggaaaggccgtggcgtccgctccctccgcggctcatggcgacgacgcttggcacatccgggaccctcaggccgctgcagtcgcgtcgccggctgctcgggccccagccccggccgctgtggtgactccgccgcgcctcgccgtcgcccccgtcccgcccgccgccccagccgccagggacatgtctaacctcggaggccgtaggaacgggcctgtcgaagtgcgcctgacagggacatgccacccccgttttaggagaacttgtatttggtttgagaaggaattggaatcacggcgttatcctaccttcaccatttacccctgataaattgtccacgtttatatttgggaatcatattgacaggtcatgaaaatgagaccaaaagatctctggaagcgattaatgataaaatttcatggagaagaaggccttgactacggaggggttgccagggtgatgacaactccgtgagggtggagattatacatctctcatcatttcagcaacaaggaaataaattagtggcagagtaagggtgacttgtgggattaactttgtttcaattcacagagatctcttggaagcgaggatcctttaaaaatcctggaatatacactgcagtaaaagaacaaagcatacctcagccttaaacgactgaagaagaatgtcaagtggggaagtggctttggttttcagtttgtgggttctgaatccacacaaagacaggattgctttctgaaaacctgaattaattattgtccttacctcaataagacaaaaaattagaatcaaaatcgttagtattacagtcacagatatcaccaagattagtttgttgttatagccatatcctggaacttctttcgtgagctcactcgacttctgctctttctgttcactctgggcttctgtgctttcattaatatagttcttagttttccactggtctgtatcccattctgccttggacgcctttacttcctgctgctcactgagaagcctcatcaggaggcctgtcctggagatgagcttggcacaggtcacttgcacataggtctcggagcagtccgtcttcaaggtccagataacatgagaaatgaagcttctcacatcgttgttggggatgacggactgtagttgatgggttagcggaatttcaaactgatcacctggggatgagagcaatgggtaactgaagcttttgggctcgggggacaggtcagtgcccacgttgttgtattcccattttgtctcagtttgtttaacagttggctctaagttgaatgcagtcctagtgggaatctgcctcaggaagatgattgtagtttgtgttttcagagatggtgccttctggcatagtagtgttttccataaaaacgttttcttcagaggcatttcttgcagttgtgttttttacagtagtgttttctataaaacattctgaaggagcaaatacttctggaaaagggttttcttgaggactcaggtctcctgaggatgaaaaagccccttgtgaaggggaatttatgaggctcttcactgcagagaacggcggcctctttgcgagcatcagtctattgagataacttttctttctcaattttctaatctttttggccttgggtgttctgtgggccacacgggagtgagttttatgaaagtggtatttttttctggaatgtactactcgtttagcagccttcatattttttaactctagcctttgcattttctaaaattaaaatggtgtaggctaagtctttcaatctgtctatgacctgaggtagggcttttgcagttgtggaaggcagaaggcatgcccatggagaagggtttcagcaaagaggagactgttggcttctgctcttgggtgaatgaaggcttggtgtagacggcgtttcccgctacgttctcgggcccctgcactatgtgaggctattccagctcccttggggctggactcccgagccttttttctttggcagcattctccccaaatgcctgggcaccctgttccctcctgatactctgctttcccaccgctttgaagggccttttctggatgctccttgggcccatgaggactctgttcactctctgcaggtttttgcctacactttgaacctttgccaggctgttttcctgtggttggacagtttctaatttcttttcaaatatttggcatttaaatttgttacctagaaggctggactgcataagcatggcagttttttcttcccttttaacttcatcgatttttttcttgtatttctgcatctaacatcttttctagcaaatacacctttctcaatttattttcataagttgaattgttggatgcaggttgaaacaaggggctctttgtattgtttttcaaaacaggagcttatctccatcttgcacatttgaaaaaagcagtttaatgaatggtaacaacattgattccgcatctagatttcctgctgagaaataaggcaagatgtaatttagcgcagtgataacatcactcttatcataagtgtctagctgctcactcccaaagactgacaagttgatgccactgctgtctgaggctgcctccggctcagtagtcagctcaatgctcatgtgcttcttctgggcttgtaacaccttcatgaacactctttctggattccctacagatgcttcttcacctgtcaaaaaaaagagactgctttgatcatgaaagataatggaacggcatgcatcagtccacagctgtatgccccagtcacacaaagtaggagtcagcaaacattagagtgccattcagagaggagaaacacacacccaagcctaaatctatgaaatggcaacaacaaaaggaggaaaagacatcttttgaaaatatggctacttacttggaacattcctagtgtgacatagagtaactctgcttaggattatttcgttgatccccaggggccaattgcccagtgctcagtcaaagcccaaggtggaagacaagtgcttccctgatgagctgtcctctctgcagactgctccgtaccctgtgctgtcctgcctcagatgcagagagagcacaagcctccctcctcatcctcagtgtgcctgtgttcttactaccatcacagctgaatgcaatgaaaggctatcctctgagaggagcagggtggagatgctaaagtggaggccccctcccattgctgatagatcctcatctggcatgcactccacccacccaccccattctctgctaccacatatcgtagccccattaaagaagaagtgacatggaaaaaacactgtgcccaccctagtccttttcttaaatttgggcagagatccagggtataggttaagagatttttaatttgccagatggtatgcctatgttgttaaatatacaatgaatctatggtatgatagcagtttctggataaacattacttgaggtcctaaaatgcagaagggaaaaagcagcttttgtcagatgcttactttgctttcatttcatctctaatattttggatggggaaccatccaaagcttctggccgcatgaaggtcaagtgtgccagtgtgcagctgggtttcttttccagaattaaaagtattttgggtggtgctgagggtcagaggaagaagtaaaaattgtgagaaaggagaaacatgggcttggggagaacccagaattggggacagaagacctggcactaagctatagcacttagcacctctgatcttgtttttcctcgtccgtaaaaggagattaacaatgcttttctgcccacctcttggggagaagggaataatttagttggtaaaaaaaaaacttttgaataataagcaactctgtctttatataagtagccaagcattattaattatccaccccatatcactggtagatacctgtattcaagctatgtggacataaaagcagtcacattttagaagtcatgaagttggtgctaataaacctaatctacagaaaaactcttgaaagcacttgagcatttgttctgtgaatagaaaggtttgagattcagagcaagttcagagttggatggtctaagaatggaaaagccctccattccattagaagagccagggagcaatttctggttatggaaccagaagctctcaggcttcaaataaaacagcatcacttgtactcttataaaattgtaaaaacaaaaacaaaactggatctacatttgtcctaaaaggcagagagtacttgagacctcatgcatataaaaccagcttacaaactacatcgcactatatgaagaaattatcactgggggcaaatcaccaagtagggagcacaatacacagggtgtggatgttaatgtcattccctagccttctcattcccttctcttggtcctttatgcatatggaacagttccattattaaattttgtaataataactgagaacctgactcccagcaagggagtagttcagaagttgagggagtttaaatctgaatgagtaaataaagcaattatatcattagcttaaaattttatcatcaattaaaaataaatttaaaaacaaatacttaaaataatgtaacaatttatcaccaggcaatttggactcacgacaatgtgtggtgtttgtcagacatgcactgttgcaatgcagcttgactgtcttgcagacagcctcaatgctatttttaaattggcagaggcagcaggccatatggctaggtaagatcctataagatgaaaacacaaaacaataaatagtggtaaagcagttacttgagtaggcaaaggaggcaggccaacgctaccacagggctgggcagaaaggtgttactgaggcctgtggactggacagttgggtaggaaccagaagggcaatgggaaggaggacaaaggtgcccaactgaagggtaagcatggcagtgagtatggtatgcctagaataaaagtggttgggattagaattgggtgacactgatcagtagtttaattcagaagtatctcttcccaactcaaaagtctcactttgggctgaaagtacacaggaagaaagtagacttctaagaagagtctgaataagcccccaacttctggagtccctttctcaatttctgttggcagtgggaaatattagaaattactctgggcattaaaaatagctcagtttaacctggattgtggggttaaaaaaataacagattgcattggccaaatctcgacaatttgagcattcaaaagagtaacaataagctacaacataattaatatataaaaaagaatccatgaagaatgatatttaaaaagagagggagttgttctttaatgaaataatgccagctaatgaatgtagaaggaatgacagaattttaaaaagtgttactttgcaaccaccaatgtaataaaaattgattcagacaaggat

SEQ ID NO: 428497 - DNA, 5187 bp, Homo sapiens
ggccaacaatttttttaaaagatggttaccctgcagtgctttaactggacctatttagacaacgccttacacactggagaaggatgatactttgtgactctaataaatctaccagacaatacttctctcttttggctgtctccttcctctccagggtgatgacaactccgtgagggtggagattatacatctctcatcatttcagcaacaaggaaataaattagtggcagagtaagggtgacttggtgagtacatccaattgttgacatagttttgggtgggagaaattttgctattatatcaacttcttaaaatggtctagtgggattaactttgtttcaattcacagagatctcttggaagcgaggatcctttaaaaatcctggaatatacactgcagtaaaagaacaaagcatacctcagccttaaacgactgaagaagaatgtcaagtggggaagtggctttggttttcagtttgtgggttctgaatccacacaaagacaggattgctttctgaaaacctgaattaattattgtccttacctcaataagacaaaaaattagaatcaaaatcgttagtattacagtcacagatatcaccaagattagtttgttgttatagccatatcctggaacttctttcgtgagctcactcgacttctgctctttctgttcactctgggcttctgtgctttcattaatatagttcttagttttccactggtctgtatcccattctgccttggacgcctttacttcctgctgctcactgagaagcctcatcaggaggcctgtcctggagatgagcttggcacaggtcacttgcacataggtctcggagcagtccgtcttcaaggtccagataacatgagaaatgaagcttctcacatcgttgttggggatgacggactgtagttgatgggttagcggaatttcaaactgatcacctggggatgagagcaatgggtaactgaagcttttgggctcgggggacaggtcagtgcccacgttgttgtattcccattttgtctcagtttgtttaacagttggctctaagttgaatgcagtcctagtgggaatctgcctcaggaagatgattgtagtttgtgttttcagagatggtgccttctggcatagtagtgttttccataaaaacgttttcttcagaggcatttcttgcagttgtgttttttacagtagtgttttctataaaacattctgaaggagcaaatacttctggaaaagggttttcttgaggactcaggtctcctgaggatgaaaaagccccttgtgaaggggaatttatgaggctcttcactgcagagaacggcggcctctttgcgagcatcagtctattgagataacttttctttctcaattttctaatctttttggccttgggtgttctgtgggccacacgggagtgagttttatgaaagtggtatttttttctggaatgtactactcgtttagcagccttcatattttttaactctagcctttgcattttctaaaattaaaatggtgtaggctaagtctttcaatctgtctatgacctgaggtagggcttttgcagttgtggaaggcagaaggcatgcccatggagaagggtttcagcaaagaggagactgttggcttctgctcttgggtgaatgaaggcttggtgtagacggcgtttcccgctacgttctcgggcccctgcactatgtgaggctattccagctcccttggggctggactcccgagccttttttctttggcagcattctccccaaatgcctgggcaccctgttccctcctgatactctgctttcccaccgctttgaagggccttttctggatgctccttgggcccatgaggactctgttcactctctgcaggtttttgcctacactttgaacctttgccaggctgttttcctgtggttggacagtttctaatttcttttcaaatatttggcatttaaatttgttacctagaaggctggactgcataagcatggcagttttttcttcccttttaacttcatcgatttttttcttgtatttctgcatctaacatcttttctagcaaatacacctttctcaatttattttcataagttgaattgttggatgcaggttgaaacaaggggctctttgtattgtttttcaaaacaggagcttatctccatcttgcacatttgaaaaaagcagtttaatgaatggtaacaacattgattccgcatctagatttcctgctgagaaataaggcaagatgtaatttagcgcagtgataacatcactcttatcataagtgtctagctgctcactcccaaagactgacaagttgatgccactgctgtctgaggctgcctccggctcagtagtcagctcaatgctcatgtgcttcttctgggcttgtaacaccttcatgaacactctttctggattccctacagatgcttcttcacctgtcaaaaaaaagagactgctttgatcatgaaagataatggaacggcatgcatcagtccacagctgtatgccccagtcacacaaagtaggagtcagcaaacattagagtgccattcagagaggagaaacacacacccaagcctaaatctatgaaatggcaacaacaaaaggaggaaaagacatcttttgaaaatatggctacttacttggaacattcctagtgtgacatagagtaactctgcttaggattatttcgttgatccccaggggccaattgcccagtgctcagtcaaagcccaaggtggaagacaagtgcttccctgatgagctgtcctctctgcagactgctccgtaccctgtgctgtcctgcctcagatgcagagagagcacaagcctccctcctcatcctcagtgtgcctgtgttcttactaccatcacagctgaatgcaatgaaaggctatcctctgagaggagcagggtggagatgctaaagtggaggccccctcccattgctgatagatcctcatctggcatgcactccacccacccaccccattctctgctaccacatatcgtagccccattaaagaagaagtgacatggaaaaaacactgtgcccaccctagtccttttcttaaatttgggcagagatccagggtataggttaagagatttttaatttgccagatggtatgcctatgttgttaaatatacaatgaatctatggtatgatagcagtttctggataaacattacttgaggtcctaaaatgcagaagggaaaaagcagcttttgtcagatgcttactttgctttcatttcatctctaatattttggatggggaaccatccaaagcttctggccgcatgaaggtcaagtgtgccagtgtgcagctgggtttcttttccagaattaaaagtattttgggtggtgctgagggtcagaggaagaagtaaaaattgtgagaaaggagaaacatgggcttggggagaacccagaattggggacagaagacctggcactaagctatagcacttagcacctctgatcttgtttttcctcgtccgtaaaaggagattaacaatgcttttctgcccacctcttggggagaagggaataatttagttggtaaaaaaaaaacttttgaataataagcaactctgtctttatataagtagccaagcattattaattatccaccccatatcactggtagatacctgtattcaagctatgtggacataaaagcagtcacattttagaagtcatgaagttggtgctaataaacctaatctacagaaaaactcttgaaagcacttgagcatttgttctgtgaatagaaaggtttgagattcagagcaagttcagagttggatggtctaagaatggaaaagccctccattccattagaagagccagggagcaatttctggttatggaaccagaagctctcaggcttcaaataaaacagcatcacttgtactcttataaaattgtaaaaacaaaaacaaaactggatctacatttgtcctaaaaggcagagagtacttgagacctcatgcatataaaaccagcttacaaactacatcgcactatatgaagaaattatcactgggggcaaatcaccaagtagggagcacaatacacagggtgtggatgttaatgtcattccctagccttctcattcccttctcttggtcctttatgcatatggaacagttccattattaaattttgtaataataactgagaacctgactcccagcaagggagtagttcagaagttgagggagtttaaatctgaatgagtaaataaagcaattatatcattagcttaaaattttatcatcaattaaaaataaatttaaaaacaaatacttaaaataatgtaacaatttatcaccaggcaatttggactcacgacaatgtgtggtgtttgtcagacatgcactgttgcaatgcagcttgactgtcttgcagacagcctcaatgctatttttaaattggcagaggcagcaggccatatggctaggtaagatcctataagatgaaaacacaaaacaataaatagtggtaaagcagttacttgagtaggcaaaggaggcaggccaacgctaccacagggctgggcagaaaggtgttactgaggcctgtggactggacagttgggtaggaaccagaagggcaatgggaaggaggacaaaggtgcccaactgaagggtaagcatggcagtgagtatggtatgcctagaataaaagtggttgggattagaattgggtgacactgatcagtagtttaattcagaagtatctcttcccaactcaaaagtctcactttgggctgaaagtacacaggaagaaagtagacttctaagaagagtctgaataagcccccaacttctggagtccctttctcaatttctgttggcagtgggaaatattagaaattactctgggcattaaaaatagctcagtttaacctggattgtggggttaaaaaaataacagattgcattggccaaatctcgacaatttgagcattcaaaagagtaacaataagctacaacataattaatatataaaaaagaatccatgaagaatgatatttaaaaagagagggagttgttctttaatgaaataatgccagctaatgaatgtagaaggaatgacagaattttaaaaagtgttactttgcaaccaccaatgtaataaaaattgattcagacaaggat

SEQ ID NO: 428498 - DNA, 4629 bp, Homo sapiens
ttttttttttttagaaaaaagttattacagtcacagatatcaccaagattagtttgttgttatagccatatcctggaacttctttcgtgagctcactcgacttctgctctttctgttcactctgggcttctgtgctttcattaatatagttcttagttttccactggtctgtatcccattctgccttggacgcctttacttcctgctgctcactgagaagcctcatcaggaggcctgtcctggagatgagcttggcacaggtcacttgcacataggtctcggagcagtccgtcttcaaggtccagataacatgagaaatgaagcttctcacatcgttgttggggatgacggactgtagttgatgggttagcggaatttcaaactgatcacctggggatgagagcaatgggtaactgaagcttttgggctcgggggacaggtcagtgcccacgttgttgtattcccattttgtctcagtttgtttaacagttggctctaagttgaatgcagtcctagtgggaatctgcctcaggaagatgattgtagtttgtgttttcagagatggtgccttctggcatagtagtgttttccataaaaacgttttcttcagaggcatttcttgcagttgtgttttttacagtagtgttttctataaaacattctgaaggagcaaatacttctggaaaagggttttcttgaggactcaggtctcctgaggatgaaaaagccccttgtgaaggggaatttatgaggctcttcactgcagagaacggcggcctctttgcgagcatcagtctattgagataacttttctttctcaattttctaatctttttggccttgggtgttctgtgggccacacgggagtgagttttatgaaagtggtatttttttctggaatgtactactcgtttagcagccttcatattttttaactctagcctttgcattttctaaaattaaaatggtgtaggctaagtctttcaatctgtctatgacctgaggtagggcttttgcagttgtggaaggcagaaggcatgcccatggagaagggtttcagcaaagaggagactgttggcttctgctcttgggtgaatgaaggcttggtgtagacggcgtttcccgctacgttctcgggcccctgcactatgtgaggctattccagctcccttggggctggactcccgagccttttttctttggcagcattctccccaaatgcctgggcaccctgttccctcctgatactctgctttcccaccgctttgaagggccttttctggatgctccttgggcccatgaggactctgttcactctctgcaggtttttgcctacactttgaacctttgccaggctgttttcctgtggttggacagtttctaatttcttttcaaatatttggcatttaaatttgttacctagaaggctggactgcataagcatggcagttttttcttcccttttaacttcatcgatttttttcttgtatttctgcatctaacatcttttctagcaaatacacctttctcaatttattttcataagttgaattgttggatgcaggttgaaacaaggggctctttgtattgtttttcaaaacaggagcttatctccatcttgcacatttgaaaaaagcagtttaatgaatggtaacaacattgattccgcatctagatttcctgctgagaaataaggcaagatgtaatttagcgcagtgataacatcactcttatcataagtgtctagctgctcactcccaaagactgacaagttgatgccactgctgtctgaggctgcctccggctcagtagtcagctcaatgctcatgtgcttcttctgggcttgtaacaccttcatgaacactctttctggattccctacagatgcttcttcacctgtcaaaaaaaagagactgctttgatcatgaaagataatggaacggcatgcatcagtccacagctgtatgccccagtcacacaaagtaggagtcagcaaacattagagtgccattcagagaggagaaacacacacccaagcctaaatctatgaaatggcaacaacaaaaggaggaaaagacatcttttgaaaatatggctacttacttggaacattcctagtgtgacatagagtaactctgcttaggattatttcgttgatccccaggggccaattgcccagtgctcagtcaaagcccaaggtggaagacaagtgcttccctgatgagctgtcctctctgcagactgctccgtaccctgtgctgtcctgcctcagatgcagagagagcacaagcctccctcctcatcctcagtgtgcctgtgttcttactaccatcacagctgaatgcaatgaaaggctatcctctgagaggagcagggtggagatgctaaagtggaggccccctcccattgctgatagatcctcatctggcatgcactccacccacccaccccattctctgctaccacatatcgtagccccattaaagaagaagtgacatggaaaaaacactgtgcccaccctagtccttttcttaaatttgggcagagatccagggtataggttaagagatttttaatttgccagatggtatgcctatgttgttaaatatacaatgaatctatggtatgatagcagtttctggataaacattacttgaggtcctaaaatgcagaagggaaaaagcagcttttgtcagatgcttactttgctttcatttcatctctaatattttggatggggaaccatccaaagcttctggccgcatgaaggtcaagtgtgccagtgtgcagctgggtttcttttccagaattaaaagtattttgggtggtgctgagggtcagaggaagaagtaaaaattgtgagaaaggagaaacatgggcttggggagaacccagaattggggacagaagacctggcactaagctatagcacttagcacctctgatcttgtttttcctcgtccgtaaaaggagattaacaatgcttttctgcccacctcttggggagaagggaataatttagttggtaaaaaaaaaacttttgaataataagcaactctgtctttatataagtagccaagcattattaattatccaccccatatcactggtagatacctgtattcaagctatgtggacataaaagcagtcacattttagaagtcatgaagttggtgctaataaacctaatctacagaaaaactcttgaaagcacttgagcatttgttctgtgaatagaaaggtttgagattcagagcaagttcagagttggatggtctaagaatggaaaagccctccattccattagaagagccagggagcaatttctggttatggaaccagaagctctcaggcttcaaataaaacagcatcacttgtactcttataaaattgtaaaaacaaaaacaaaactggatctacatttgtcctaaaaggcagagagtacttgagacctcatgcatataaaaccagcttacaaactacatcgcactatatgaagaaattatcactgggggcaaatcaccaagtagggagcacaatacacagggtgtggatgttaatgtcattccctagccttctcattcccttctcttggtcctttatgcatatggaacagttccattattaaattttgtaataataactgagaacctgactcccagcaagggagtagttcagaagttgagggagtttaaatctgaatgagtaaataaagcaattatatcattagcttaaaattttatcatcaattaaaaataaatttaaaaacaaatacttaaaataatgtaacaatttatcaccaggcaatttggactcacgacaatgtgtggtgtttgtcagacatgcactgttgcaatgcagcttgactgtcttgcagacagcctcaatgctatttttaaattggcagaggcagcaggccatatggctaggtaagatcctataagatgaaaacacaaaacaataaatagtggtaaagcagttacttgagtaggcaaaggaggcaggccaacgctaccacagggctgggcagaaaggtgttactgaggcctgtggactggacagttgggtaggaaccagaagggcaatgggaaggaggacaaaggtgcccaactgaagggtaagcatggcagtgagtatggtatgcctagaataaaagtggttgggattagaattgggtgacactgatcagtagtttaattcagaagtatctcttcccaactcaaaagtctcactttgggctgaaagtacacaggaagaaagtagacttctaagaagagtctgaataagcccccaacttctggagtccctttctcaatttctgttggcagtgggaaatattagaaattactctgggcattaaaaatagctcagtttaacctggattgtggggttaaaaaaataacagattgcattggccaaatctcgacaatttgagcattcaaaagagtaacaataagctacaacataattaatatataaaaaagaatccatgaagaatgatatttaaaaagagagggagttgttctttaatgaaataatgccagctaatgaatgtagaaggaatgacagaattttaaaaagtgttactttgcaaccaccaatgtaataaaaattgattcagacaaggat

SEQ ID NO: 428499 - DNA, 4926 bp, Homo sapiens
tactactactaaattcgcggccgcgtcgacaataaattagtggcagagtaagggtgacttgtgggattaactttgtttcaattcacagagatctcttggaagcgaggatcctttaaaaatcctggaatatacactgcagtaaaagaacaaagcatacctcagccttaaacgactgaagaagaatgtcaagtggggaagtggctttggttttcagtttgtgggttctgaatccacacaaagacaggattgctttctgaaaacctgaattaattattgtccttacctcaataagacaaaaaattagaatcaaaatcgttagtattacagtcacagatatcaccaagattagtttgttgttatagccatatcctggaacttctttcgtgagctcactcgacttctgctctttctgttcactctgggcttctgtgctttcattaatatagttcttagttttccactggtctgtatcccattctgccttggacgcctttacttcctgctgctcactgagaagcctcatcaggaggcctgtcctggagatgagcttggcacaggtcacttgcacataggtctcggagcagtccgtcttcaaggtccagataacatgagaaatgaagcttctcacatcgttgttggggatgacggactgtagttgatgggttagcggaatttcaaactgatcacctggggatgagagcaatgggtaactgaagcttttgggctcgggggacaggtcagtgcccacgttgttgtattcccattttgtctcagtttgtttaacagttggctctaagttgaatgcagtcctagtgggaatctgcctcaggaagatgattgtagtttgtgttttcagagatggtgccttctggcatagtagtgttttccataaaaacgttttcttcagaggcatttcttgcagttgtgttttttacagtagtgttttctataaaacattctgaaggagcaaatacttctggaaaagggttttcttgaggactcaggtctcctgaggatgaaaaagccccttgtgaaggggaatttatgaggctcttcactgcagagaacggcggcctctttgcgagcatcagtctattgagataacttttctttctcaattttctaatctttttggccttgggtgttctgtgggccacacgggagtgagttttatgaaagtggtatttttttctggaatgtactactcgtttagcagccttcatattttttaactctagcctttgcattttctaaaattaaaatggtgtaggctaagtctttcaatctgtctatgacctgaggtagggcttttgcagttgtggaaggcagaaggcatgcccatggagaagggtttcagcaaagaggagactgttggcttctgctcttgggtgaatgaaggcttggtgtagacggcgtttcccgctacgttctcgggcccctgcactatgtgaggctattccagctcccttggggctggactcccgagccttttttctttggcagcattctccccaaatgcctgggcaccctgttccctcctgatactctgctttcccaccgctttgaagggccttttctggatgctccttgggcccatgaggactctgttcactctctgcaggtttttgcctacactttgaacctttgccaggctgttttcctgtggttggacagtttctaatttcttttcaaatatttggcatttaaatttgttacctagaaggctggactgcataagcatggcagttttttcttcccttttaacttcatcgatttttttcttgtatttctgcatctaacatcttttctagcaaatacacctttctcaatttattttcataagttgaattgttggatgcaggttgaaacaaggggctctttgtattgtttttcaaaacaggagcttatctccatcttgcacatttgaaaaaagcagtttaatgaatggtaacaacattgattccgcatctagatttcctgctgagaaataaggcaagatgtaatttagcgcagtgataacatcactcttatcataagtgtctagctgctcactcccaaagactgacaagttgatgccactgctgtctgaggctgcctccggctcagtagtcagctcaatgctcatgtgcttcttctgggcttgtaacaccttcatgaacactctttctggattccctacagatgcttcttcacctgtcaaaaaaaagagactgctttgatcatgaaagataatggaacggcatgcatcagtccacagctgtatgccccagtcacacaaagtaggagtcagcaaacattagagtgccattcagagaggagaaacacacacccaagcctaaatctatgaaatggcaacaacaaaaggaggaaaagacatcttttgaaaatatggctacttacttggaacattcctagtgtgacatagagtaactctgcttaggattatttcgttgatccccaggggccaattgcccagtgctcagtcaaagcccaaggtggaagacaagtgcttccctgatgagctgtcctctctgcagactgctccgtaccctgtgctgtcctgcctcagatgcagagagagcacaagcctccctcctcatcctcagtgtgcctgtgttcttactaccatcacagctgaatgcaatgaaaggctatcctctgagaggagcagggtggagatgctaaagtggaggccccctcccattgctgatagatcctcatctggcatgcactccacccacccaccccattctctgctaccacatatcgtagccccattaaagaagaagtgacatggaaaaaacactgtgcccaccctagtccttttcttaaatttgggcagagatccagggtataggttaagagatttttaatttgccagatggtatgcctatgttgttaaatatacaatgaatctatggtatgatagcagtttctggataaacattacttgaggtcctaaaatgcagaagggaaaaagcagcttttgtcagatgcttactttgctttcatttcatctctaatattttggatggggaaccatccaaagcttctggccgcatgaaggtcaagtgtgccagtgtgcagctgggtttcttttccagaattaaaagtattttgggtggtgctgagggtcagaggaagaagtaaaaattgtgagaaaggagaaacatgggcttggggagaacccagaattggggacagaagacctggcactaagctatagcacttagcacctctgatcttgtttttcctcgtccgtaaaaggagattaacaatgcttttctgcccacctcttggggagaagggaataatttagttggtaaaaaaaaaacttttgaataataagcaactctgtctttatataagtagccaagcattattaattatccaccccatatcactggtagatacctgtattcaagctatgtggacataaaagcagtcacattttagaagtcatgaagttggtgctaataaacctaatctacagaaaaactcttgaaagcacttgagcatttgttctgtgaatagaaaggtttgagattcagagcaagttcagagttggatggtctaagaatggaaaagccctccattccattagaagagccagggagcaatttctggttatggaaccagaagctctcaggcttcaaataaaacagcatcacttgtactcttataaaattgtaaaaacaaaaacaaaactggatctacatttgtcctaaaaggcagagagtacttgagacctcatgcatataaaaccagcttacaaactacatcgcactatatgaagaaattatcactgggggcaaatcaccaagtagggagcacaatacacagggtgtggatgttaatgtcattccctagccttctcattcccttctcttggtcctttatgcatatggaacagttccattattaaattttgtaataataactgagaacctgactcccagcaagggagtagttcagaagttgagggagtttaaatctgaatgagtaaataaagcaattatatcattagcttaaaattttatcatcaattaaaaataaatttaaaaacaaatacttaaaataatgtaacaatttatcaccaggcaatttggactcacgacaatgtgtggtgtttgtcagacatgcactgttgcaatgcagcttgactgtcttgcagacagcctcaatgctatttttaaattggcagaggcagcaggccatatggctaggtaagatcctataagatgaaaacacaaaacaataaatagtggtaaagcagttacttgagtaggcaaaggaggcaggccaacgctaccacagggctgggcagaaaggtgttactgaggcctgtggactggacagttgggtaggaaccagaagggcaatgggaaggaggacaaaggtgcccaactgaagggtaagcatggcagtgagtatggtatgcctagaataaaagtggttgggattagaattgggtgacactgatcagtagtttaattcagaagtatctcttcccaactcaaaagtctcactttgggctgaaagtacacaggaagaaagtagacttctaagaagagtctgaataagcccccaacttctggagtccctttctcaatttctgttggcagtgggaaatattagaaattactctgggcattaaaaatagctcagtttaacctggattgtggggttaaaaaaataacagattgcattggccaaatctcgacaatttgagcattcaaaagagtaacaataagctacaacataattaatatataaaaaagaatccatgaagaatgatatttaaaaagagagggagttgttctttaatgaaataatgccagctaatgaatgtagaaggaatgacagaattttaaaaagtgttactttgcaaccaccaatgtaataaaaattgattcagacaaggat

SEQ ID NO: 428500 - DNA, 4244 bp, Homo sapiens
tagtctagatattatgtatacgggttcttcgaatgtagtaggtaaggtggggggcatccatatagtcactccaggtttatggagggttcttctactatataggactttttcgcttcgaagcgaaggcttctcaaatcatgaaaattattaatattactgctgttagagaaatgaatatcgaacagtgggacgtcccactgttttccataaaaacgttttcttcagaggcatttcttgcagttgtgttttttacagtagtgttttctataaaacattctgaaggagcaaatacttctggaaaagggttttcttgaggactcaggtctcctgaggatgaaaaagccccttgtgaaggggaatttatgaggctcttcactgcagagaacggcggcctctttgcgagcatcagtctattgagataacttttctttctcaattttctaatctttttggccttgggtgttctgtgggccacacgggagtgagttttatgaaagtggtatttttttctggaatgtactactcgtttagcagccttcatattttttaactctagcctttgcattttctaaaattaaaatggtgtaggctaagtctttcaatctgtctatgacctgaggtagggcttttgcagttgtggaaggcagaaggcatgcccatggagaagggtttcagcaaagaggagactgttggcttctgctcttgggtgaatgaaggcttggtgtagacggcgtttcccgctacgttctcgggcccctgcactatgtgaggctattccagctcccttggggctggactcccgagccttttttctttggcagcattctccccaaatgcctgggcaccctgttccctcctgatactctgctttcccaccgctttgaagggccttttctggatgctccttgggcccatgaggactctgttcactctctgcaggtttttgcctacactttgaacctttgccaggctgttttcctgtggttggacagtttctaatttcttttcaaatatttggcatttaaatttgttacctagaaggctggactgcataagcatggcagttttttcttcccttttaacttcatcgatttttttcttgtatttctgcatctaacatcttttctagcaaatacacctttctcaatttattttcataagttgaattgttggatgcaggttgaaacaaggggctctttgtattgtttttcaaaacaggagcttatctccatcttgcacatttgaaaaaagcagtttaatgaatggtaacaacattgattccgcatctagatttcctgctgagaaataaggcaagatgtaatttagcgcagtgataacatcactcttatcataagtgtctagctgctcactcccaaagactgacaagttgatgccactgctgtctgaggctgcctccggctcagtagtcagctcaatgctcatgtgcttcttctgggcttgtaacaccttcatgaacactctttctggattccctacagatgcttcttcacctgtcaaaaaaaagagactgctttgatcatgaaagataatggaacggcatgcatcagtccacagctgtatgccccagtcacacaaagtaggagtcagcaaacattagagtgccattcagagaggagaaacacacacccaagcctaaatctatgaaatggcaacaacaaaaggaggaaaagacatcttttgaaaatatggctacttacttggaacattcctagtgtgacatagagtaactctgcttaggattatttcgttgatccccaggggccaattgcccagtgctcagtcaaagcccaaggtggaagacaagtgcttccctgatgagctgtcctctctgcagactgctccgtaccctgtgctgtcctgcctcagatgcagagagagcacaagcctccctcctcatcctcagtgtgcctgtgttcttactaccatcacagctgaatgcaatgaaaggctatcctctgagaggagcagggtggagatgctaaagtggaggccccctcccattgctgatagatcctcatctggcatgcactccacccacccaccccattctctgctaccacatatcgtagccccattaaagaagaagtgacatggaaaaaacactgtgcccaccctagtccttttcttaaatttgggcagagatccagggtataggttaagagatttttaatttgccagatggtatgcctatgttgttaaatatacaatgaatctatggtatgatagcagtttctggataaacattacttgaggtcctaaaatgcagaagggaaaaagcagcttttgtcagatgcttactttgctttcatttcatctctaatattttggatggggaaccatccaaagcttctggccgcatgaaggtcaagtgtgccagtgtgcagctgggtttcttttccagaattaaaagtattttgggtggtgctgagggtcagaggaagaagtaaaaattgtgagaaaggagaaacatgggcttggggagaacccagaattggggacagaagacctggcactaagctatagcacttagcacctctgatcttgtttttcctcgtccgtaaaaggagattaacaatgcttttctgcccacctcttggggagaagggaataatttagttggtaaaaaaaaaacttttgaataataagcaactctgtctttatataagtagccaagcattattaattatccaccccatatcactggtagatacctgtattcaagctatgtggacataaaagcagtcacattttagaagtcatgaagttggtgctaataaacctaatctacagaaaaactcttgaaagcacttgagcatttgttctgtgaatagaaaggtttgagattcagagcaagttcagagttggatggtctaagaatggaaaagccctccattccattagaagagccagggagcaatttctggttatggaaccagaagctctcaggcttcaaataaaacagcatcacttgtactcttataaaattgtaaaaacaaaaacaaaactggatctacatttgtcctaaaaggcagagagtacttgagacctcatgcatataaaaccagcttacaaactacatcgcactatatgaagaaattatcactgggggcaaatcaccaagtagggagcacaatacacagggtgtggatgttaatgtcattccctagccttctcattcccttctcttggtcctttatgcatatggaacagttccattattaaattttgtaataataactgagaacctgactcccagcaagggagtagttcagaagttgagggagtttaaatctgaatgagtaaataaagcaattatatcattagcttaaaattttatcatcaattaaaaataaatttaaaaacaaatacttaaaataatgtaacaatttatcaccaggcaatttggactcacgacaatgtgtggtgtttgtcagacatgcactgttgcaatgcagcttgactgtcttgcagacagcctcaatgctatttttaaattggcagaggcagcaggccatatggctaggtaagatcctataagatgaaaacacaaaacaataaatagtggtaaagcagttacttgagtaggcaaaggaggcaggccaacgctaccacagggctgggcagaaaggtgttactgaggcctgtggactggacagttgggtaggaaccagaagggcaatgggaaggaggacaaaggtgcccaactgaagggtaagcatggcagtgagtatggtatgcctagaataaaagtggttgggattagaattgggtgacactgatcagtagtttaattcagaagtatctcttcccaactcaaaagtctcactttgggctgaaagtacacaggaagaaagtagacttctaagaagagtctgaataagcccccaacttctggagtccctttctcaatttctgttggcagtgggaaatattagaaattactctgggcattaaaaatagctcagtttaacctggattgtggggttaaaaaaataacagattgcattggccaaatctcgacaatttgagcattcaaaagagtaacaataagctacaacataattaatatataaaaaagaatccatgaagaatgatatttaaaaagagagggagttgttctttaatgaaataatgccagctaatgaatgtagaaggaatgacagaattttaaaaagtgttactttgcaaccaccaatgtaataaaaattgattcagacaaggat

SEQ ID NO: 428501 - DNA, 3091 bp, Homo sapiens
  misc_feature (9)..(9): n is a, c, g, or t
ggcctcagntgcggcgtcactcagacaagggggcgggtggaggaggaagcggccaagtccacagtcctgctccggtgccgccgagcaccgcccacctcagctgaccagccctgtccgctactaggcctcgcctagaggagggaaaggccgtggcgtccgctccctccgcggctcatggcgacgacgcttggcacatccgggaccctcaggccgctgcagtcgcgtcgccggctgctcgggccccagccccggccgctgtggtgactccgccgcgcctcgccgtcgcccccgtcccgcccgccgccccagccgccagggacatgtctaacctcggaggccgtaggaacgggcctgtcgaagtgcgcctgacagggacatgccacccccgttttaggagaacttgtatttggtttgagaaggaattggaatcacggcgttatcctaccttcaccatttacccctgataaattgtccacgtttatatttgggaatcatattgacaggtcatgaaaatgagaccaaaagatctctggaagcgattaatgataaaatttcatggagaagaaggccttgactacggaggggttgccagggtgatgacaactccgtgagggtggagattatacatctctcatcatttcagcaacaaggaaataaattagtggcagagtaagggtgacttgagatctcttggaagcgaggatcctttaaaaatcctggaatatacactgcagtaaaagaacaaagcatacctcagccttaaacgactgaagaagaatgtcaagtggggaagtggctttggttttcagtttgtgggttctgaatccacacaaagacaggattgctttctgaaaacctgaattaattattgtccttacctcaataagacaaaaaattagaatcaaaatcgttagtattacagtcacagatatcaccaagattagtttgttgttatagccatatcctggaacttctttcgtgagctcactcgacttctgctctttctgttcactctgggcttctgtgctttcattaatatagttcttagttttccactggtctgtatcccattctgccttggacgcctttacttcctgctgctcactgagaagcctcatcaggaggcctgtcctggagatgagcttggcacaggtcacttgcacataggtctcggagcagtccgtcttcaaggtccagataacatgagaaatgaagcttctcacatcgttgttggggatgacggactgtagttgatgggttagcggaatttcaaactgatcacctggggatgagagcaatgggtaactgaagcttttgggctcgggggacaggtcagtgcccacgttgttgtattcccattttgtctcagtttgtttaacagttggctctaagttgaatgcagtcctagtgggaatctgcctcaggaagatgattgtagtttgtgttttcagagatggtgccttctggcatagtagtgttttccataaaaacgttttcttcagaggcatttcttgcagttgtgttttttacagtagtgttttctataaaacattctgaaggagcaaatacttctggaaaagggttttcttgaggactcaggtctcctgaggatgaaaaagccccttgtgaaggggaatttatgaggctcttcactgcagagaacggcggcctctttgcgagcatcagtctattgagataacttttctttctcaattttctaatctttttggccttgggtgttctgtgggccacacgggagtgagttttatgaaagtggtatttttttctggaatgtactactcgtttagcagccttcatattttttaactctagcctttgcattttctaaaattaaaatggtgtaggctaagtctttcaatctgtctatgacctgaggtagggcttttgcagttgtggaaggcagaaggcatgcccatggagaagggtttcagcaaagaggagactgttggcttctgctcttgggtgaatgaaggcttggtgtagacggcgtttcccgctacgttctcgggcccctgcactatgtgaggctattccagctcccttggggctggactcccgagccttttttctttggcagcattctccccaaatgcctgggcaccctgttccctcctgatactctgctttcccaccgctttgaagggccttttctggatgctccttgggcccatgaggactctgttcactctctgcaggtttttgcctacactttgaacctttgccaggctgttttcctgtggttggacagtttctaatttcttttcaaatatttggcatttaaatttgttacctagaaggctggactgcataagcatggcagttttttcttcccttttaacttcatcgatttttttcttgtatttctgcatctaacatcttttctagcaaatacacctttctcaatttattttcataagttgaattgttggatgcaggttgaaacaaggggctctttgtattgtttttcaaaacaggagcttatctccatcttgcacatttgaaaaaagcagtttaatgaatggtaacaacattgattccgcatctagatttcctgctgagaaataaggcaagatgtaatttagcgcagtgataacatcactcttatcataagtgtctagctgctcactcccaaagactgacaagttgatgccactgctgtctgaggctgcctccggctcagtagtcagctcaatgctcatgtgcttcttctgggcttgtaacaccttcatgaacactctttctggattccctacagatgcttcttcacctgtcaaaaaaaagagactgctttgatcatgaaagataatggaacggcatgcatcagtccacagctgtatgccccagtcacacaaagtaggagtcagcaaacattagagtgccattcagagaggagaaacacacacccaagcctaaatctatgaaatggcaacaacaaaaggaggaaaagacatcttttgaaaatatggctacttacttggaacattcctagtgtgacatagagtcaggcgcagacgattatcatgattacggactcgctggccctcgttttaccctcaggaatcggctatga

SEQ ID NO: 428502 - DNA, 1859 bp, Homo sapiens
  misc_feature (9)..(9): n is a, c, g, or t
ggcctcagntgcggcgtcactcagacaagggggcgggtggaggaggaagcggccaagtccacagtcctgctccggtgccgccgagcaccgcccacctcagctgaccagccctgtccgctactaggcctcgcctagaggagggaaaggccgtggcgtccgctccctccgcggctcatggcgacgacgcttggcacatccgggaccctcaggccgctgcagtcgcgtcgccggctgctcgggccccagccccggccgctgtggtgactccgccgcgcctcgccgtcgcccccgtcccgcccgccgccccagccgccagggacatgtctaacctcggaggccgtaggaacgggcctgtcgaagtgcgcctgacagggacatgccacccccgttttaggagaacttgtatttggtttgagaaggaattggaatcacggcgttatcctaccttcaccatttacccctgataaattgtccacgtttatatttgggaatcatattgacaggtcatgaaaatgagaccaaaagatctctggaagcgattaatgataaaatttcatggagaagaaggccttgactacggaggggttgccagggtctccctctgtcacccaggctggagtgtagtggcgcgatctcgggtcactgcaacctccccaagctgggctcaagagatcctcccacctcagcctcctgagcagctgggactacagggtgatgacaactccgtgagggtggagattatacatctctcatcatttcagcaacaaggaaataaattagtggcagagtaagggtgacttggttcatgttgctgaggaggcagagggctgagttcttccatccatcgccttcaagtgtcaggcggcttccggttggacaagatggctaccccagtgggcttgtttcctctctggtctctttttctgtctaagactcactccataccagcctgagcttgggaccattgttttgctcctctcatcctcctacccccagagctgacagatttagcaaataaaatttacaagatcctgttaaattaagaatttcggacaaacaacaaactaccccacactgtctcaggagggtccctcagagataagtgtcactgagcctcgggaaggaggaagctccatccctgcccatcaagccccctcttgggtcccctcaaggaagacagtggttccagaaggtgtgttcccaccccctttcacagcctacctctctcccatccctctctgaccccaggttccagctggcctggggatttctgggaggatccgaagaacaaggccatctgcagtaggagcctcctgttcctcgccacctacgcttcagccctgcccaactaacagctctccatgttctaaagaaggcaggagtgctggaccaccccagccttctggaaccccagttctgtgacattatccatctcctggaaatatgctggttttaaccatgcaaattagttaagcatcaggcagaaatagcagctgggcctggaagcacaggtgacgtctgtgaggaaaatggctgggtgggacagggtggagagcacgggctgttcccttcctttctgggaacagcaccacctttggggtaactccttctctcatggggttttaggcgggggctgccagtgccagtgcccggtcccctgtcaccccccatagtcataggaacgcttctgcgccagtcactacatttataaggggaagctggtggagctgctcagcttccaacaggaagcccatgtgtgcagggccagaggacacagcccatctgaggtgctaagcttctgtgaagagggagtggagtctggaccggattccagtcccacggtccaccctttctgggac

SEQ ID NO: 428503 - DNA, 1741 bp, Homo sapiens
  misc_feature (9)..(9): n is a, c, g, or t
ggcctcagntgcggcgtcactcagacaagggggcgggtggaggaggaagcggccaagtccacagtcctgctccggtgccgccgagcaccgcccacctcagctgaccagccctgtccgctactaggcctcgcctagaggagggaaaggccgtggcgtccgctccctccgcggctcatggcgacgacgcttggcacatccgggaccctcaggccgctgcagtcgcgtcgccggctgctcgggccccagccccggccgctgtggtgactccgccgcgcctcgccgtcgcccccgtcccgcccgccgccccagccgccagggacatgtctaacctcggaggccgtaggaacgggcctgtcgaagtgcgcctgacagggacatgccacccccgttttaggagaacttgtatttggtttgagaaggaattggaatcacggcgttatcctaccttcaccatttacccctgataaattgtccacgtttatatttgggaatcatattgacaggtcatgaaaatgagaccaaaagatctctggaagcgattaatgataaaatttcatggagaagaaggccttgactacggaggggttgccagggtgatgacaactccgtgagggtggagattatacatctctcatcatttcagcaacaaggaaataaattagtggcagagtaagggtgacttggttcatgttgctgaggaggcagagggctgagttcttccatccatcgccttcaagtgtcaggcggcttccggttggacaagatggctaccccagtgggcttgtttcctctctggtctctttttctgtctaagactcactccataccagcctgagcttgggaccattgttttgctcctctcatcctcctacccccagagctgacagatttagcaaataaaatttacaagatcctgttaaattaagaatttcggacaaacaacaaactaccccacactgtctcaggagggtccctcagagataagtgtcactgagcctcgggaaggaggaagctccatccctgcccatcaagccccctcttgggtcccctcaaggaagacagtggttccagaaggtgtgttcccaccccctttcacagcctacctctctcccatccctctctgaccccaggttccagctggcctggggatttctgggaggatccgaagaacaaggccatctgcagtaggagcctcctgttcctcgccacctacgcttcagccctgcccaactaacagctctccatgttctaaagaaggcaggagtgctggaccaccccagccttctggaaccccagttctgtgacattatccatctcctggaaatatgctggttttaaccatgcaaattagttaagcatcaggcagaaatagcagctgggcctggaagcacaggtgacgtctgtgaggaaaatggctgggtgggacagggtggagagcacgggctgttcccttcctttctgggaacagcaccacctttggggtaactccttctctcatggggttttaggcgggggctgccagtgccagtgcccggtcccctgtcaccccccatagtcataggaacgcttctgcgccagtcactacatttataaggggaagctggtggagctgctcagcttccaacaggaagcccatgtgtgcagggccagaggacacagcccatctgaggtgctaagcttctgtgaagagggagtggagtctggaccggattccagtcccacggtccaccctttctgggac

SEQ ID NO: 428504 - DNA, 1034 bp, Homo sapiens
  misc_feature (9)..(9): n is a, c, g, or t
ggcctcagntgcggcgtcactcagacaagggggcgggtggaggaggaagcggccaagtccacagtcctgctccggtgccgccgagcaccgcccacctcagctgaccagccctgtccgctactaggcctcgcctagaggagggaaaggccgtggcgtccgctccctccgcggctcatggcgacgacgcttggcacatccgggaccctcaggccgctgcagtcgcgtcgccggctgctcgggccccagccccggccgctgtggtgactccgccgcgcctcgccgtcgcccccgtcccgcccgccgccccagccgccagggacatgtctaacctcggaggccgtaggaacgggcctgtcgaagtgcgcctgacagggacatgccacccccgttttaggagaacttgtatttggtttgagaaggaattggaatcacggcgttatcctaccttcaccatttacccctgataaattgtccacgtttatatttgggaatcatattgacaggtcatgaaaatgagaccaaaagatctctggaagcgattaatgataaaatttcatggagaagaaggccttgactacggaggggttgccagggtctccctctgtcacccaggctggagtgtagtggcgcgatctcgggtcactgcaacctccccaagctgggctcaagagatcctcccacctcagcctcctgagcagctgggactacaggtacaagccaccacagccagctaatttttgtaatttttttgtagagatggggtttcgccatgttgcctaggctgatctcgaactcctgagctcaagtagtctgcctgccccggcctcccaaagtgctgggattacaggtgtgagccaccgcacccagccagtgatttatttctgatattatatttactataagaattcttttctaaatatgaaaattagttttatataaatgtaggataaacactgtagctctctactgaaatgttttaaggatcattgtaattctgctttccctaatcttaaatccaaccaaaattaaattat

SEQ ID NO: 428505 - DNA, 5521 bp, Homo sapiens
  misc_feature (9)..(9): n is a, c, g, or t
ggcctcagntgcggcgtcactcagacaagggggcgggtggaggaggaagcggccaagtccacagtcctgctccggtgccgccgagcaccgcccacctcagctgaccagccctgtccgctactaggcctcgcctagaggagggaaaggccgtggcgtccgctccctccgcggctcatggcgacgacgcttggcacatccgggaccctcaggccgctgcagtcgcgtcgccggctgctcgggccccagccccggccgctgtggtgactccgccgcgcctcgccgtcgcccccgtcccgcccgccgccccagccgccagggacatgtctaacctcggaggccgtaggaacgggcctgtcgaagtgcgcctgacagggacatgccacccccgttttaggagaacttgtatttggtttgagaaggaattggaatcacggcgttatcctaccttcaccatttacccctgataaattgtccacgtttatatttgggaatcatattgacaggtcatgaaaatgagaccaaaagatctctggaagcgattaatgataaaatttcatggagaagaaggccttgactacggaggggttgccagggtgatgacaactccgtgagggtggagattatacatctctcatcatttcagcaacaaggaaataaattagtggcagagtaagggtgacttgagatctcttggaagcgaggatcctttaaaaatcctggaatatacactgcagtaaaagaacaaagcatacctcagccttaaacgactgaagaagaatgtcaagtggggaagtggctttggttttcagtttgtgggttctgaatccacacaaagacaggattgctttctgaaaacctgaattaattattgtccttacctcaataagacaaaaaattagaatcaaaatcgttagtattacagtcacagatatcaccaagattagtttgttgttatagccatatcctggaacttctttcgtgagctcactcgacttctgctctttctgttcactctgggcttctgtgctttcattaatatagttcttagttttccactggtctgtatcccattctgccttggacgcctttacttcctgctgctcactgagaagcctcatcaggaggcctgtcctggagatgagcttggcacaggtcacttgcacataggtctcggagcagtccgtcttcaaggtccagataacatgagaaatgaagcttctcacatcgttgttggggatgacggactgtagttgatgggttagcggaatttcaaactgatcacctggggatgagagcaatgggtaactgaagcttttgggctcgggggacaggtcagtgcccacgttgttgtattcccattttgtctcagtttgtttaacagttggctctaagttgaatgcagtcctagtgggaatctgcctcaggaagatgattgtagtttgtgttttcagagatggtgccttctggcatagtagtgttttccataaaaacgttttcttcagaggcatttcttgcagttgtgttttttacagtagtgttttctataaaacattctgaaggagcaaatacttctggaaaagggttttcttgaggactcaggtctcctgaggatgaaaaagccccttgtgaaggggaatttatgaggctcttcactgcagagaacggcggcctctttgcgagcatcagtctattgagataacttttctttctcaattttctaatctttttggccttgggtgttctgtgggccacacgggagtgagttttatgaaagtggtatttttttctggaatgtactactcgtttagcagccttcatattttttaactctagcctttgcattttctaaaattaaaatggtgtaggctaagtctttcaatctgtctatgacctgaggtagggcttttgcagttgtggaaggcagaaggcatgcccatggagaagggtttcagcaaagaggagactgttggcttctgctcttgggtgaatgaaggcttggtgtagacggcgtttcccgctacgttctcgggcccctgcactatgtgaggctattccagctcccttggggctggactcccgagccttttttctttggcagcattctccccaaatgcctgggcaccctgttccctcctgatactctgctttcccaccgctttgaagggccttttctggatgctccttgggcccatgaggactctgttcactctctgcaggtttttgcctacactttgaacctttgccaggctgttttcctgtggttggacagtttctaatttcttttcaaatatttggcatttaaatttgttacctagaaggctggactgcataagcatggcagttttttcttcccttttaacttcatcgatttttttcttgtatttctgcatctaacatcttttctagcaaatacacctttctcaatttattttcataagttgaattgttggatgcaggttgaaacaaggggctctttgtattgtttttcaaaacaggagcttatctccatcttgcacatttgaaaaaagcagtttaatgaatggtaacaacattgattccgcatctagatttcctgctgagaaataaggcaagatgtaatttagcgcagtgataacatcactcttatcataagtgtctagctgctcactcccaaagactgacaagttgatgccactgctgtctgaggctgcctccggctcagtagtcagctcaatgctcatgtgcttcttctgggcttgtaacaccttcatgaacactctttctggattccctacagatgcttcttcacctgtcaaaaaaaagagactgctttgatcatgaaagataatggaacggcatgcatcagtccacagctgtatgccccagtcacacaaagtaggagtcagcaaacattagagtgccattcagagaggagaaacacacacccaagcctaaatctatgaaatggcaacaacaaaaggaggaaaagacatcttttgaaaatatggctacttacttggaacattcctagtgtgacatagagtaactctgcttaggattatttcgttgatccccaggggccaattgcccagtgctcagtcaaagcccaaggtggaagacaagtgcttccctgatgagctgtcctctctgcagactgctccgtaccctgtgctgtcctgcctcagatgcagagagagcacaagcctccctcctcatcctcagtgtgcctgtgttcttactaccatcacagctgaatgcaatgaaaggctatcctctgagaggagcagggtggagatgctaaagtggaggccccctcccattgctgatagatcctcatctggcatgcactccacccacccaccccattctctgctaccacatatcgtagccccattaaagaagaagtgacatggaaaaaacactgtgcccaccctagtccttttcttaaatttgggcagagatccagggtataggttaagagatttttaatttgccagatggtatgcctatgttgttaaatatacaatgaatctatggtatgatagcagtttctggataaacattacttgaggtcctaaaatgcagaagggaaaaagcagcttttgtcagatgcttactttgctttcatttcatctctaatattttggatggggaaccatccaaagcttctggccgcatgaaggtcaagtgtgccagtgtgcagctgggtttcttttccagaattaaaagtattttgggtggtgctgagggtcagaggaagaagtaaaaattgtgagaaaggagaaacatgggcttggggagaacccagaattggggacagaagacctggcactaagctatagcacttagcacctctgatcttgtttttcctcgtccgtaaaaggagattaacaatgcttttctgcccacctcttggggagaagggaataatttagttggtaaaaaaaaaacttttgaataataagcaactctgtctttatataagtagccaagcattattaattatccaccccatatcactggtagatacctgtattcaagctatgtggacataaaagcagtcacattttagaagtcatgaagttggtgctaataaacctaatctacagaaaaactcttgaaagcacttgagcatttgttctgtgaatagaaaggtttgagattcagagcaagttcagagttggatggtctaagaatggaaaagccctccattccattagaagagccagggagcaatttctggttatggaaccagaagctctcaggcttcaaataaaacagcatcacttgtactcttataaaattgtaaaaacaaaaacaaaactggatctacatttgtcctaaaaggcagagagtacttgagacctcatgcatataaaaccagcttacaaactacatcgcactatatgaagaaattatcactgggggcaaatcaccaagtagggagcacaatacacagggtgtggatgttaatgtcattccctagccttctcattcccttctcttggtcctttatgcatatggaacagttccattattaaattttgtaataataactgagaacctgactcccagcaagggagtagttcagaagttgagggagtttaaatctgaatgagtaaataaagcaattatatcattagcttaaaattttatcatcaattaaaaataaatttaaaaacaaatacttaaaataatgtaacaatttatcaccaggcaatttggactcacgacaatgtgtggtgtttgtcagacatgcactgttgcaatgcagcttgactgtcttgcagacagcctcaatgctatttttaaattggcagaggcagcaggccatatggctaggtaagatcctataagatgaaaacacaaaacaataaatagtggtaaagcagttacttgagtaggcaaaggaggcaggccaacgctaccacagggctgggcagaaaggtgttactgaggcctgtggactggacagttgggtaggaaccagaagggcaatgggaaggaggacaaaggtgcccaactgaagggtaagcatggcagtgagtatggtatgcctagaataaaagtggttgggattagaattgggtgacactgatcagtagtttaattcagaagtatctcttcccaactcaaaagtctcactttgggctgaaagtacacaggaagaaagtagacttctaagaagagtctgaataagcccccaacttctggagtccctttctcaatttctgttggcagtgggaaatattagaaattactctgggcattaaaaatagctcagtttaacctggattgtggggttaaaaaaataacagattgcattggccaaatctcgacaatttgagcattcaaaagagtaacaataagctacaacataattaatatataaaaaagaatccatgaagaatgatatttaaaaagagagggagttgttctttaatgaaataatgccagctaatgaatgtagaaggaatgacagaattttaaaaagtgttactttgcaaccaccaatgtaataaaaattgattcagacaaggat

SEQ ID NO: 428506 - DNA, 4089 bp, Homo sapiens
  misc_feature (9)..(9): n is a, c, g, or t
ggcctcagntgcggcgtcactcagacaagggggcgggtggaggaggaagcggccaagtccacagtcctgctccggtgccgccgagcaccgcccacctcagctgaccagccctgtccgctactaggcctcgcctagaggagggaaaggccgtggcgtccgctccctccgcggctcatggcgacgacgcttggcacatccgggaccctcaggccgctgcagtcgcgtcgccggctgctcgggccccagccccggccgctgtggtgactccgccgcgcctcgccgtcgcccccgtcccgcccgccgccccagccgccagggacatgtctaacctcggaggccgtaggaacgggcctgtcgaagtgcgcctgacagggacatgccacccccgttttaggagaacttgtatttggtttgagaaggaattggaatcacggcgttatcctaccttcaccatttacccctgataaattgtccacgtttatatttgggaatcatattgacaggtcatgaaaatgagaccaaaagatctctggaagcgattaatgataaaatttcatggagaagaaggccttgactacggaggggttgccagggtgatgacaactccgtgagggtggagattatacatctctcatcatttcagcaacaaggaaataaattagtggcagagtaagggtgacttgagatctcttggaagcgaggatcctttaaaaatcctggaatatacactgcagtaaaagaacaaagcatacctcagccttaaacgactgaagaagaatgtcaagtggggaagtggctttggttttcagtttgtgggttctgaatccacacaaagacaggattgctttctgaaaacctgaattaattattgtccttacctcaataagacaaaaaattagaatcaaaatcgttagtattacagtcacagatatcaccaagattagtttgttgttatagccatatcctggaacttctttcgtgagctcactcgacttctgctctttctgttcactctgggcttctgtgctttcattaatatagttcttagttttccactggtctgtatcccattctgccttggacgcctttacttcctgctgctcactgagaagcctcatcaggaggcctgtcctggagatgagcttggcacaggtcacttgcacataggtctcggagcagtccgtcttcaaggtccagataacatgagaaatgaagcttctcacatcgttgttggggatgacggactgtagttgatgggttagcggaatttcaaactgatcacctggggatgagagcaatgggtaactgaagcttttgggctcgggggacaggtcagtgcccacgttgttgtattcccattttgtctcagtttgtttaacagttggctctaagttgaatgcagtcctagtgggaatctgcctcaggaagatgattgtagtttgtgttttcagagatggtgccttctggcatagtagtgttttccataaaaacgttttcttcagaggcatttcttgcagttgtgttttttacagtagtgttttctataaaacattctgaaggagcaaatacttctggaaaagggttttcttgaggactcaggtctcctgaggatgaaaaagccccttgtgaaggggaatttatgaggctcttcactgcagagaacggcggcctctttgcgagcatcagtctattgagataacttttctttctcaattttctaatctttttggccttgggtgttctgtgggccacacgggagtgagttttatgaaagtggtatttttttctggaatgtactactcgtttagcagccttcatattttttaactctagcctttgcattttctaaaattaaaatggtgtaggctaagtctttcaatctgtctatgacctgaggtagggcttttgcagttgtggaaggcagaaggcatgcccatggagaagggtttcagcaaagaggagactgttggcttctgctcttgggtgaatgaaggcttggtgtagacggcgtttcccgctacgttctcgggcccctgcactatgtgaggctattccagctcccttggggctggactcccgagccttttttctttggcagcattctccccaaatgcctgggcaccctgttccctcctgatactctgctttcccaccgctttgaagggccttttctggatgctccttgggcccatgaggactctgttcactctctgcaggtttttgcctacactttgaacctttgccaggctgttttcctgtggttggacagtttctaatttcttttcaaatatttggcatttaaatttgttacctagaaggctggactgcataagcatggcagttttttcttcccttttaacttcatcgatttttttcttgtatttctgcatctaacatcttttctagcaaatacacctttctcaatttattttcataagttgaattgttggatgcaggttgaaacaaggggctctttgtattgtttttcaaaacaggagcttatctccatcttgcacatttgaaaaaagcagtttaatgaatggtaacaacattgattccgcatctagatttcctgctgagaaataaggcaagatgtaatttagcgcagtgataacatcactcttatcataagtgtctagctgctcactcccaaagactgacaagttgatgccactgctgtctgaggctgcctccggctcagtagtcagctcaatgctcatgtgcttcttctgggcttgtaacaccttcatgaacactctttctggattccctacagatgcttcttcacctgtcaaaaaaaagagactgctttgatcatgaaagataatggaacggcatgcatcagtccacagctgtatgccccagtcacacaaagtaggagtcagcaaacattagagtgccattcagagaggagaaacacacacccaagcctaaatctatgaaatggcaacaacaaaaggaggaaaagacatcttttgaaaatatggctacttacttggaacattcctagtgtgacatagagtaactctgcttaggattatttcgttgatccccaggggccaattgcccagtgctcagtcaaagcccaaggtggaagacaagtgcttccctgatgagctgtcctctctgcagactgctccgtaccctgtgctgtcctgcctcagatgcagagagagcacaagcctccctcctcatcctcagtgtgcctgtgttcttactaccatcacagctgaatgcaatgaaaggctatcctctgagaggagcagggtggagatgctaaagtggaggccccctcccattgctgatagatcctcatctggcatgcactccacccacccaccccattctctgctaccacatatcgtagccccattaaagaagaagtgacatggaaaaaacactgtgcccaccctagtccttttcttaaatttgggcagagatccagggtataggttaagagatttttaatttgccagatggtatgcctatgttgttaaatatacaatgaatctatggtatgatagcagtttctggataaacattacttgaggtcctaaaatgcagaagggaaaaagcagcttttgtcagatgcttactttgctttcatttcatctctaatattttggatggggaaccatccaaagcttctggccgcatgaaggtcaagtgtgccagtgtgcagctgggtttcttttccagaattaaaagtattttgggtggtgctgagggtcagaggaagaagtaaaaattgtgagaaaggagaaacatgggcttggggagaacccagaattggggacagaagacctggcactaagctatagcacttagcacctctgatcttgtttttcctcgtccgtaaaaggagattaacaatgcttttctgcccacctcttggggagaagggaataatttagttggtaaaaaaaaaacttttgaataataagcaactctgtctttatataagtagccaagcattattaattatccaccccatatcactggtagatacctgtattcaagctatgtggacataaaagcagtcacattttagaagtcatgaagttggtgctaataaacctaatctacaga

SEQ ID NO: 428507 - DNA, 4571 bp, Homo sapiens
  misc_feature (9)..(9): n is a, c, g, or t
ggcctcagntgcggcgtcactcagacaagggggcgggtggaggaggaagcggccaagtccacagtcctgctccggtgccgccgagcaccgcccacctcagctgaccagccctgtccgctactaggcctcgcctagaggagggaaaggccgtggcgtccgctccctccgcggctcatggcgacgacgcttggcacatccgggaccctcaggccgctgcagtcgcgtcgccggctgctcgggccccagccccggccgctgtggtgactccgccgcgcctcgccgtcgcccccgtcccgcccgccgccccagccgccagggacatgtctaacctcggaggccgtaggaacgggcctgtcgaagtgcgcctgacagggacatgccacccccgttttaggagaacttgtatttggtttgagaaggaattggaatcacggcgttatcctaccttcaccatttacccctgataaattgtccacgtttatatttgggaatcatattgacaggtcatgaaaatgagaccaaaagatctctggaagcgattaatgataaaatttcatggagaagaaggccttgactacggaggggttgccagggtgatgacaactccgtgagggtggagattatacatctctcatcatttcagcaacaaggaaataaattagtggcagagtaagggtgacttgagatctcttggaagcgaggatcctttaaaaatcctggaatatacactgcagtaaaagaacaaagcatacctcagccttaaacgactgaagaagaatgtcaagtggggaagtggctttggttttcagtttgtgggttctgaatccacacaaagacaggattgctttctgaaaacctgaattaattattgtccttacctcaataagacaaaaaattagaatcaaaatcgttagtattacagtcacagatatcaccaagattagtttgttgttatagccatatcctggaacttctttcgtgagctcactcgacttctgctctttctgttcactctgggcttctgtgctttcattaatatagttcttagttttccactggtctgtatcccattctgccttggacgcctttacttcctgctgctcactgagaagcctcatcaggaggcctgtcctggagatgagcttggcacaggtcacttgcacataggtctcggagcagtccgtcttcaaggtccagataacatgagaaatgaagcttctcacatcgttgttggggatgacggactgtagttgatgggttagcggaatttcaaactgatcacctggggatgagagcaatgggtaactgaagcttttgggctcgggggacaggtcagtgcccacgttgttgtattcccattttgtctcagtttgtttaacagttggctctaagttgaatgcagtcctagtgggaatctgcctcaggaagatgattgtagtttgtgttttcagagatggtgccttctggcatagtagtgttttccataaaaacgttttcttcagaggcatttcttgcagttgtgttttttacagtagtgttttctataaaacattctgaaggagcaaatacttctggaaaagggttttcttgaggactcaggtctcctgaggatgaaaaagccccttgtgaaggggaatttatgaggctcttcactgcagagaacggcggcctctttgcgagcatcagtctattgagataacttttctttctcaattttctaatctttttggccttgggtgttctgtgggccacacgggagtgagttttatgaaagtggtatttttttctggaatgtactactcgtttagcagccttcatattttttaactctagcctttgcattttctaaaattaaaatggtgtaggctaagtctttcaatctgtctatgacctgaggtagggcttttgcagttgtggaaggcagaaggcatgcccatggagaagggtttcagcaaagaggagactgttggcttctgctcttgggtgaatgaaggcttggtgtagacggcgtttcccgctacgttctcgggcccctgcactatgtgaggctattccagctcccttggggctggactcccgagccttttttctttggcagcattctccccaaatgcctgggcaccctgttccctcctgatactctgctttcccaccgctttgaagggccttttctggatgctccttgggcccatgaggactctgttcactctctgcaggtttttgcctacactttgaacctttgccaggctgttttcctgtggttggacagtttctaatttcttttcaaatatttggcatttaaatttgttacctagaaggctggactgcataagcatggcagttttttcttcccttttaacttcatcgatttttttcttgtatttctgcatctaacatcttttctagcaaatacacctttctcaatttattttcataagttgaattgttggatgcaggttgaaacaaggggctctttgtattgtttttcaaaacaggagcttatctccatcttgcacatttgaaaaaagcagtttaatgaatggtaacaacattgattccgcatctagatttcctgctgagaaataaggcaagatgtaatttagcgcagtgataacatcactcttatcataagtgtctagctgctcactcccaaagactgacaagttgatgccactgctgtctgaggctgcctccggctcagtagtcagctcaatgctcatgtgcttcttctgggcttgtaacaccttcatgaacactctttctggattccctacagatgcttcttcacctgtcaaaaaaaagagactgctttgatcatgaaagataatggaacggcatgcatcagtccacagctgtatgccccagtcacacaaagtaggagtcagcaaacattagagtgccattcagagaggagaaacacacacccaagcctaaatctatgaaatggcaacaacaaaaggaggaaaagacatcttttgaaaatatggctacttacttggaacattcctagtgtgacatagagtaactctgcttaggattatttcgttgatccccaggggccaattgcccagtgctcagtcaaagcccaaggtggaagacaagtgcttccctgatgagctgtcctctctgcagactgctccgtaccctgtgctgtcctgcctcagatgcagagagagcacaagcctccctcctcatcctcagtgtgcctgtgttcttactaccatcacagctgaatgcaatgaaaggctatcctctgagaggagcagggtggagatgctaaagtggaggccccctcccattgctgatagatcctcatctggcatgcactccacccacccaccccattctctgctaccacatatcgtagccccattaaagaagaagtgacatggaaaaaacactgtgcccaccctagtccttttcttaaatttgggcagagatccagggtataggttaagagatttttaatttgccagatggtatgcctatgttgttaaatatacaatgaatctatggtatgatagcagtttctggataaacattacttgaggtcctaaaatgcagaagggaaaaagcagcttttgtcagatgcttactttgctttcatttcatctctaatattttggatggggaaccatccaaagcttctggccgcatgaaggtcaagtgtgccagtgtgcagctgggtttcttttccagaattaaaagtattttgggtggtgctgagggtcagaggaagaagtaaaaattgtgagaaaggagaaacatgggcttggggagaacccagaattggggacagaagacctggcactaagctatagcacttagcacctctgatcttgtttttcctcgtccgtaaaaggagattaacaatgcttttctgcccacctcttggggagaagggaataatttagttggtaaaaaaaaaacttttgaataataagcaactctgtctttatataagtagccaagcattattaattatccaccccatatcactggtagatacctgtattcaagctatgtggacataaaagcagtcacattttagaagtcatgaagttggtgctaataaacctaatctacagaaaaactcttgaaagcacttgagcatttgttctgtgaatagaaaggtttgagattcagagcaagttcagagttggatggtctaagaatggaaaagccctccattccattagaagagccagggagcaatttctggttatggaaccagaagctctcaggcttcaaataaaacagcatcacttgtactcttataaaattgtaaaaacaaaaacaaaactggatctacatttgtcctaaaaggcagagagtacttgagacctcatgcatataaaaccagttgccagctcggcgcccgccccggcgccgcctcgagttcatgattctttagtctccttcaatctagatctgttcccaggattgtttaaaagcatactgacaaacctttgagactgtaaatgacctgaggtatacattatctttacttgagaatagtaatttttcaatatgcattaaagatcattacacatgagctaagaaaaatgagc

SEQ ID NO: 428508 - DNA, 5432 bp, Homo sapiens
  misc_feature (9)..(9): n is a, c, g, or t
ggcctcagntgcggcgtcactcagacaagggggcgggtggaggaggaagcggccaagtccacagtcctgctccggtgccgccgagcaccgcccacctcagctgaccagccctgtccgctactaggcctcgcctagaggagggaaaggccgtggcgtccgctccctccgcggctcatggcgacgacgcttggcacatccgggaccctcaggccgctgcagtcgcgtcgccggctgctcgggccccagccccggccgctgtggtgactccgccgcgcctcgccgtcgcccccgtcccgcccgccgccccagccgccagggacatgtctaacctcggaggccgtaggaacgggcctgtcgaagtgcgcctgacaggaatcatattgacaggtcatgaaaatgagaccaaaagatctctggaagcgattaatgataaaatttcatggagaagaaggccttgactacggaggggttgccagggtgatgacaactccgtgagggtggagattatacatctctcatcatttcagcaacaaggaaataaattagtggcagagtaagggtgacttgtgggattaactttgtttcaattcacagagatctcttggaagcgaggatcctttaaaaatcctggaatatacactgcagtaaaagaacaaagcatacctcagccttaaacgactgaagaagaatgtcaagtggggaagtggctttggttttcagtttgtgggttctgaatccacacaaagacaggattgctttctgaaaacctgaattaattattgtccttacctcaataagacaaaaaattagaatcaaaatcgttagtattacagtcacagatatcaccaagattagtttgttgttatagccatatcctggaacttctttcgtgagctcactcgacttctgctctttctgttcactctgggcttctgtgctttcattaatatagttcttagttttccactggtctgtatcccattctgccttggacgcctttacttcctgctgctcactgagaagcctcatcaggaggcctgtcctggagatgagcttggcacaggtcacttgcacataggtctcggagcagtccgtcttcaaggtccagataacatgagaaatgaagcttctcacatcgttgttggggatgacggactgtagttgatgggttagcggaatttcaaactgatcacctggggatgagagcaatgggtaactgaagcttttgggctcgggggacaggtcagtgcccacgttgttgtattcccattttgtctcagtttgtttaacagttggctctaagttgaatgcagtcctagtgggaatctgcctcaggaagatgattgtagtttgtgttttcagagatggtgccttctggcatagtagtgttttccataaaaacgttttcttcagaggcatttcttgcagttgtgttttttacagtagtgttttctataaaacattctgaaggagcaaatacttctggaaaagggttttcttgaggactcaggtctcctgaggatgaaaaagccccttgtgaaggggaatttatgaggctcttcactgcagagaacggcggcctctttgcgagcatcagtctattgagataacttttctttctcaattttctaatctttttggccttgggtgttctgtgggccacacgggagtgagttttatgaaagtggtatttttttctggaatgtactactcgtttagcagccttcatattttttaactctagcctttgcattttctaaaattaaaatggtgtaggctaagtctttcaatctgtctatgacctgaggtagggcttttgcagttgtggaaggcagaaggcatgcccatggagaagggtttcagcaaagaggagactgttggcttctgctcttgggtgaatgaaggcttggtgtagacggcgtttcccgctacgttctcgggcccctgcactatgtgaggctattccagctcccttggggctggactcccgagccttttttctttggcagcattctccccaaatgcctgggcaccctgttccctcctgatactctgctttcccaccgctttgaagggccttttctggatgctccttgggcccatgaggactctgttcactctctgcaggtttttgcctacactttgaacctttgccaggctgttttcctgtggttggacagtttctaatttcttttcaaatatttggcatttaaatttgttacctagaaggctggactgcataagcatggcagttttttcttcccttttaacttcatcgatttttttcttgtatttctgcatctaacatcttttctagcaaatacacctttctcaatttattttcataagttgaattgttggatgcaggttgaaacaaggggctctttgtattgtttttcaaaacaggagcttatctccatcttgcacatttgaaaaaagcagtttaatgaatggtaacaacattgattccgcatctagatttcctgctgagaaataaggcaagatgtaatttagcgcagtgataacatcactcttatcataagtgtctagctgctcactcccaaagactgacaagttgatgccactgctgtctgaggctgcctccggctcagtagtcagctcaatgctcatgtgcttcttctgggcttgtaacaccttcatgaacactctttctggattccctacagatgcttcttcacctgtcaaaaaaaagagactgctttgatcatgaaagataatggaacggcatgcatcagtccacagctgtatgccccagtcacacaaagtaggagtcagcaaacattagagtgccattcagagaggagaaacacacacccaagcctaaatctatgaaatggcaacaacaaaaggaggaaaagacatcttttgaaaatatggctacttacttggaacattcctagtgtgacatagagtaactctgcttaggattatttcgttgatccccaggggccaattgcccagtgctcagtcaaagcccaaggtggaagacaagtgcttccctgatgagctgtcctctctgcagactgctccgtaccctgtgctgtcctgcctcagatgcagagagagcacaagcctccctcctcatcctcagtgtgcctgtgttcttactaccatcacagctgaatgcaatgaaaggctatcctctgagaggagcagggtggagatgctaaagtggaggccccctcccattgctgatagatcctcatctggcatgcactccacccacccaccccattctctgctaccacatatcgtagccccattaaagaagaagtgacatggaaaaaacactgtgcccaccctagtccttttcttaaatttgggcagagatccagggtataggttaagagatttttaatttgccagatggtatgcctatgttgttaaatatacaatgaatctatggtatgatagcagtttctggataaacattacttgaggtcctaaaatgcagaagggaaaaagcagcttttgtcagatgcttactttgctttcatttcatctctaatattttggatggggaaccatccaaagcttctggccgcatgaaggtcaagtgtgccagtgtgcagctgggtttcttttccagaattaaaagtattttgggtggtgctgagggtcagaggaagaagtaaaaattgtgagaaaggagaaacatgggcttggggagaacccagaattggggacagaagacctggcactaagctatagcacttagcacctctgatcttgtttttcctcgtccgtaaaaggagattaacaatgcttttctgcccacctcttggggagaagggaataatttagttggtaaaaaaaaaacttttgaataataagcaactctgtctttatataagtagccaagcattattaattatccaccccatatcactggtagatacctgtattcaagctatgtggacataaaagcagtcacattttagaagtcatgaagttggtgctaataaacctaatctacagaaaaactcttgaaagcacttgagcatttgttctgtgaatagaaaggtttgagattcagagcaagttcagagttggatggtctaagaatggaaaagccctccattccattagaagagccagggagcaatttctggttatggaaccagaagctctcaggcttcaaataaaacagcatcacttgtactcttataaaattgtaaaaacaaaaacaaaactggatctacatttgtcctaaaaggcagagagtacttgagacctcatgcatataaaaccagcttacaaactacatcgcactatatgaagaaattatcactgggggcaaatcaccaagtagggagcacaatacacagggtgtggatgttaatgtcattccctagccttctcattcccttctcttggtcctttatgcatatggaacagttccattattaaattttgtaataataactgagaacctgactcccagcaagggagtagttcagaagttgagggagtttaaatctgaatgagtaaataaagcaattatatcattagcttaaaattttatcatcaattaaaaataaatttaaaaacaaatacttaaaataatgtaacaatttatcaccaggcaatttggactcacgacaatgtgtggtgtttgtcagacatgcactgttgcaatgcagcttgactgtcttgcagacagcctcaatgctatttttaaattggcagaggcagcaggccatatggctaggtaagatcctataagatgaaaacacaaaacaataaatagtggtaaagcagttacttgagtaggcaaaggaggcaggccaacgctaccacagggctgggcagaaaggtgttactgaggcctgtggactggacagttgggtaggaaccagaagggcaatgggaaggaggacaaaggtgcccaactgaagggtaagcatggcagtgagtatggtatgcctagaataaaagtggttgggattagaattgggtgacactgatcagtagtttaattcagaagtatctcttcccaactcaaaagtctcactttgggctgaaagtacacaggaagaaagtagacttctaagaagagtctgaataagcccccaacttctggagtccctttctcaatttctgttggcagtgggaaatattagaaattactctgggcattaaaaatagctcagtttaacctggattgtggggttaaaaaaataacagattgcattggccaaatctcgacaatttgagcattcaaaagagtaacaataagctacaacataattaatatataaaaaagaatccatgaagaatgatatttaaaaagagagggagttgttctttaatgaaataatgccagctaatgaatgtagaaggaatgacagaattttaaaaagtgttactttgcaaccaccaatgtaataaaaattgattcagacaaggat

SEQ ID NO: 428509 - DNA, 3393 bp, Homo sapiens
  misc_feature (9)..(9): n is a, c, g, or t
ggcctcagntgcggcgtcactcagacaagggggcgggtggaggaggaagcggccaagtccacagtcctgctccggtgccgccgagcaccgcccacctcagctgaccagccctgtccgctactaggcctcgcctagaggagggaaaggccgtggcgtccgctccctccgcggctcatggcgacgacgcttggcacatccgggaccctcaggccgctgcagtcgcgtcgccggctgctcgggccccagccccggccgctgtggtgactccgccgcgcctcgccgtcgcccccgtcccgcccgccgccccagccgccagggacatgtctaacctcggaggccgtaggaacgggcctgtcgaagtgcgcctgacagggacatgccacccccgttttaggagaacttgtatttggtttgagaaggaattggaatcacggcgttatcctaccttcaccatttacccctgataaattgtccacgtttatatttgggaatcatattgacaggtcatgaaaatgagaccaaaagatctctggaagcgattaatgataaaatttcatggagaagaaggccttgactacggaggggttgccagggtgatgacaactccgtgagggtggagattatacatctctcatcatttcagcaacaaggaaataaattagtggcagagtaagggtgacttgagatctcttggaagcgaggatcctttaaaaatcctggaatatacactgcagtaaaagaacaaagcatacctcagccttaaacgactgaagaagaatgtcaagtggggaagtggctttggttttcagtttgtgggttctgaatccacacaaagacaggattgctttctgaaaacctgaattaattattgtccttacctcaataagacaaaaaattagaatcaaaatcgttagtattacagtcacagatatcaccaagattagtttgttgttatagccatatcctggaacttctttcgtgagctcactcgacttctgctctttctgttcactctgggcttctgtgctttcattaatatagttcttagttttccactggtctgtatcccattctgccttggacgcctttacttcctgctgctcactgagaagcctcatcaggaggcctgtcctggagatgagcttggcacaggtcacttgcacataggtctcggagcagtccgtcttcaaggtccagataacatgagaaatgaagcttctcacatcgttgttggggatgacggactgtagttgatgggttagcggaatttcaaactgatcacctggggatgagagcaatgggtaactgaagcttttgggctcgggggacaggtcagtgcccacgttgttgtattcccattttgtctcagtttgtttaacagttggctctaagttgaatgcagtcctagtgggaatctgcctcaggaagatgattgtagtttgtgttttcagagatggtgccttctggcatagtagtgttttccataaaaacgttttcttcagaggcatttcttgcagttgtgttttttacagtagtgttttctataaaacattctgaaggagcaaatacttctggaaaagggttttcttgaggactcaggtctcctgaggatgaaaaagccccttgtgaaggggaatttatgaggctcttcactgcagagaacggcggcctctttgcgagcatcagtctattgagataacttttctttctcaattttctaatctttttggccttgggtgttctgtgggccacacgggagtgagttttatgaaagtggtatttttttctggaatgtactactcgtttagcagccttcatattttttaactctagcctttgcattttctaaaattaaaatggtgtaggctaagtctttcaatctgtctatgacctgaggtagggcttttgcagttgtggaaggcagaaggcatgcccatggagaagggtttcagcaaagaggagactgttggcttctgctcttgggtgaatgaaggcttggtgtagacggcgtttcccgctacgttctcgggcccctgcactatgtgaggctattccagctcccttggggctggactcccgagccttttttctttggcagcattctccccaaatgcctgggcaccctgttccctcctgatactctgctttcccaccgctttgaagggccttttctggatgctccttgggcccatgaggactctgttcactctctgcaggtttttgcctacactttgaacctttgccaggctgttttcctgtggttggacagtttctaatttcttttcaaatatttggcatttaaatttgttacctagaaggctggactgcataagcatggcagttttttcttcccttttaacttcatcgatttttttcttgtatttctgcatctaacatcttttctagcaaatacacctttctcaatttattttcataagttgaattgttggatgcaggttgaaacaaggggctctttgtattgtttttcaaaacaggagcttatctccatcttgcacatttgaaaaaagcagtttaatgaatggtaacaacattgattccgcatctagatttcctgctgagaaataaggcaagatgtaatttagcgcagtgataacatcactcttatcataagtgtctagctgctcactcccaaagactgacaagttgatgccactgctgtctgaggctgcctccggctcagtagtcagctcaatgctcatgtgcttcttctgggcttgtaacaccttcatgaacactctttctggattccctacagatgcttcttcacctgtcaaaaaaaagagactgctttgatcatgaaagataatggaacggcatgcatcagtccacagctgtatgccccagtcacacaaagtaggagtcagcaaacattagagtgccattcagagaggagaaacacacacccaagcctaaatctatgaaatggcaacaacaaaaggaggaaaagacatcttttgaaaatatggctacttacttggaacattcctagtgtgacatagagtaactctgcttaggattatttcgttgatccccaggggccaattgcccagtgctcagtcaaagcccaaggtggaagacaagtgcttccctgatgagctgtcctctctgcagactgctccgtaccctgtgctgtcctgcctcagatgcagagagagcacaagcctccctcctcatcctcagtgtgcctgtgttcttactaccatcacagctgaatgcaatgaaaggctatcctctgagaggagcagggtggagatgctaaagtggaggccccctcccattgctgatagatcctcatctggcatgcactccacccacccaccccattctctgctaccacatatcgtagccccattaaagaagaagtgacatgga

SEQ ID NO: 428510 - DNA, 1770 bp, Homo sapiens
  misc_feature (137)..(137): n is a, c, g, or t
  misc_feature (325)..(325): n is a, c, g, or t
  misc_feature (331)..(331): n is a, c, g, or t
  misc_feature (570)..(570): n is a, c, g, or t
gttagtgtttctgagagcaccttagtgttgctctgcctcagccagctgggcaaggagttggggagcggggaggaggccggcgccatggagtggggaagggagccgtcactgttggggatcagccgctagtgtaaacnagcatctccacccacccagataagccccccacccaagtgtggagccctgctcagggagtacctcaagggccccggcctgggtggcgccagcaggcttggacactgccctggcagcaggggccccgtggaaggcaggatacccagcagggggtgccacccagtgtggatggaggggcagggcgggggcncccctnagtcactgggcagaggcacgagcacgtccacatagctgagcaggaagaagcccgactggccgtccagcatgccctcgtatcagttctcgttcatctggttgatcagcatgaagacatcgccctcatggaagcccagctccctatctttctccggctccaagtcatacagcccttgcagctcggctggtctaggggcggcatgctcctgctaggagtccagatggacttgtcgtaagatnggaaagaggacgaagctgcgatgttccggacgtgtgggtgcaggggaagccccggttggactgctcaggctttccgaggtcaaagcactcccggggcttgggcttatactcccgcctgggtcgtgaggaagcttcccggatcctgcacttgaacttctgggccagctggtccaggatctgcacggcctgccggtggtagtccagctgcgcctctgccaaggccgggagttgactcacctactggatgtcggtctccaggaggttgtgcatgctggtttctgccacctccttggactcctcaaacttctccagcgcctggtgcagctcctcttcggggatcttgccctgccgcttcttttagtcaaagtccaggcggcggccctccagcttctgcaggtggtgctggatctccttcaggtctttctcacataggttctggagggggtcaatgaagttatgcttgacctctatgtccagggagtccttcacctctgccaggtgcttcatgggctcgccggcatccagcagtgcatcgctgaagttggactcgtcgcgcagctccttcccatggcggatcaggcactcgcccaggagcccccctgactgcaggtagccggggttcttcacctggccccggatcttgcacgcggtgttgagcatggtcagtttagcctgcgaggctgggttgggctgcgggtactcgatggtcctggacagtacttacgtcaccgccttgctgatgacatccaccttctccatctcttcgaagtcatcatccagcttggtcccctcagcccctccgaccttctcactgaccagttggctcgccttgtagaactgcttcttcagcccggcaaccgacatgctgcctcctgccgcggaaccttccgcccagacccccctgcccagaccccgccagcgacaggctcccgggcaccaccaaccctctgcgcgcctcagcggcccccatcagcaccgcctccaccacccgcttgccagctcggcgcccgccccggcgccgcctcgagttcatgattctttagtctccttcaatctagatctgttcccaggattgtttaaaagcatactgacaaacctttgagactgtaaatgacctgaggtatacattatctttacttgagaatagtaatttttcaatatgcattaaagatcattacacatgagctaagaaaaatgagc

SEQ ID NO: 428511 - DNA, 599 bp, Homo sapiens
aaattattaatgttatagatctttcattgtagtacttctgaattaaccaaaatcacagtattctgaagatgattctacaaagcctgctgtttctacaaaggctgctgatgatttctacaaagcctgctgtagtgttgctgtggcctctgcttaaaaaagtagaaaacacattgatgcagcatgttcaccccaacctccctgcctaaaggctcagggaccatcttggaagaggaaggcgcgtgagattgtaagagccgaattagggggatggagtgtggagaataaggacacttcatcttggatgctcacctgccaaattgacttctgatgaaagccagctccagaaatgtgcctacagttactactttcacctaaaccctgcccttagtcaaatccttctcttcttctaagcaatcaacttcaattccttgtataacccacagtataaaagggcttttataccattctatcctattgcatgtaagccttgggtctgggaggtaacagtgtgggattccaccatctcatctccctgccacccaaacatgcctgctcttctttaagcaatattaaatgtttgtacttcagaaaaaaaaaat

SEQ ID NO: 428512 - DNA, 319 bp, Homo sapiens
tgtctgcttatgcggtggctcgctgctcagaacaggatggcagagatgagcaccaccatcaaaaactcaaggaccagtgctgtgggtccagtcatctgtttcatggaattcaccagtctggtatcttcaaaatccagaaggatgatggcagatggcaggaaggaggaagagggtaatctggaagagtttcctgacctactctgctgctgtgattaaacaaccaccaggaaattttgatgacactgttctcctgagctcctccctttcctcggggaagaaaagcattgaaactacaaaaataaagtgttatttggctgga

SEQ ID NO: 428513 - DNA, 1060 bp, Homo sapiens
tgtctgcttatgcggtggctcgctgctcagaacaggatggcagagatgagcaccaccatcaaaaactcaaggaccagtgctgtgggtccagtcatctgtttcatggaattcaccagtctggtatcttcaaaatccagaaggatgatggcagatggcaggaaggaggaagagggtaatctggaagagtttcctgacctactctgctgctgtgattaaacaaccaccaggaaattttgatgacactgttctcctgagctcctccctttcctcggggaagaaaagcattgaaactacaaaaataaagtgttatttggctggagtgaggtctcatgtctgcttatgcggtggctcgctgctcagaacagggaaccattggagatactcattactctttgaaggcttacagtggaatgaattcaaatacgacttatttgaggaattgaagttgactttatggagctgataagaatcttcttggagaaaaaaagactggtacttctgaattaaccaaaatcacagtattctgaagatgattctacaaagcctgctgtttctacaaaggctgctgatgatttctacaaagcctgctgtagtgttgctgtggcctctgcttaaaaaagtagaaaacacattgatgcagcatgttcaccccaacctccctgcctaaaggctcagggaccatcttggaagaggaaggcgcgtgagattgtaagagccgaattagggggatggagtgtggagaataaggacacttcatcttggatgctcacctgccaaattgacttctgatgaaagccagctccagaaatgtgcctacagttactactttcacctaaaccctgcccttagtcaaatccttctcttcttctaagcaatcaacttcaattccttgtataacccacagtataaaagggcttttataccattctatcctattgcatgtaagccttgggtctgggaggtaacagtgtgggattccaccatctcatctccctgccacccaaacatgcctgctcttctttaagcaatattaaatgtttgtacttcagaaaaaaaaaat

SEQ ID NO: 428514 - DNA, 1181 bp, Homo sapiens
tgtctgcttatgcggtggctcgctgctcagaacaggatggcagagatgagcaccaccatcaaaaactcaaggaccagtgctgtgggtccagtcatctgtttcatggaattcaccagtctggtatcttcaaaatccagaaggatgatggcagatggcaggaaggaggaagagggtaatctggaagagtttcctgacctactctgctgctgtgattaaacaaccaccaggaaattttgatgacactgttctcctgagctcctccctttcctcggggaagaaaagcattgaaactacaaaaataaagtgttatttggctggagtgaggtctcatgtctgcttatgcggtggctcgctgctcagaacagggaaccattggagatactcattactctttgaaggcttacagtggaatgaattcaaatacgacttatttgaggaattgaagttgactttatggagctgataagaatcttcttggagaaaaaaagactgggtatattttcaatatgctttccttttaaggtccctcacctgtggaaagtaaagaatgtcactttctgacaggctcaggaacctcaagttatgtagggatctcaagaagatgggggaattcacccagttcatacaggtgaaattgctgttgcaaagattatgaatatgagagaagtccagcatggctgacttcatctcgtgtctggcctcaggctggctgcccttgctcactcttgggcataggccaagctagccatgggaggaatttagtttatagtttaactttgaagcacggatgataatagtctctccctaaaatgaaccccttccttgctcagggactgaaactacctttgtatgacaaatgaaagcccacaagattaagattatgagaggggcctgaattctgctaaaatgcaggtgtagctgactgataacaagtcattgtcccacagcttgcctttctataatctcttgcttctcaggagtcacatggccagaggtcctgagatttccagtcctgtgacccccacccagagatggacttagtgcatgaggaccattttccacacccctatgatttcatcctcaaacaatcagcagcaaccattccctagccccctgccttccaaattatccataaaaatcctagcctctgagttattagggagattgattaataatcccag

SEQ ID NO: 428515 - DNA, 2003 bp, Homo sapiens
cgccaccgcttccgccgggccatggggccgcgcgtgctgcagccgccgctgctgctgctcctgctggcgctgctgctggcggcgctgccgtgcggtgccgaagaggcctcgccgctgcgccccgcgcaggtcacgttgtcgccgccgccggccgtgacgaacgggagccagccgggcgcgccacacaacagcacgcacacgcgtccgccgggggcgtcgggctcggcgctgacgcgctccttctacgtgatcctgggcttctgcggcctgaccgcgctctacttcctgatccgggcgtttaggtgcgtcaggcgcacgtgggcgccgtctctcagccttggccaattagcgcgcgcctagtgcgtcacgtgccgggccgcggggtcctcccctccctccctccctccctccctctctccctgttggagtgggcgtgggcggtgctgtgcggggtcgtcacgtggtgtgggcggtgcaggggccacgggactcacccgctctccagcctgcgcctggggttggaggtgcccagcgcgccgcctcttaactcgggggtgacgctgcccgtttcccaggtggggccactgaagccggagcatgccgggcaggggtcaggccctggcggggcgagggggcctccttggctccttgtcgccggatgcccgtcctcgttctcatcttcccgcctgccgccaggcctttccgtggggtcccgatattttcctttcttgcttctcccgggtgggagagacacagcgaggaccttatccctccccatcaccaccctggcaaagtcaagccgctttttattttttataagtttttattgtagcgatggggtctcgccatgttacccgcgctggtctgaactcctgggctcaagtgatcctttttcgttggcctcccaaagtgctggcattatagatgtgagcacctgcactccgccatgctgctttttatgggccctgtgcagagcctcccctgtgctccacacctcttcctgtggaagcacctgctgcgcgctctcccctgcctgtatgccgcgccctccctgcctcccgggctgctggggccaccaggggcttggccctgagacaggcttccattctgttgtctttggcaaagtctcacccctgtgtgagcctcagtcttttcatcagtgcaatgggagtgacatcagcgtgcctctcctggggtcctggcgcaggggagatgggagggcctggtagggcacatgtcttcttactgtcatcgccatgggagtgaatggtaatcacttggcgattaggacatgaaagaagcaggcacagcaaaaccagggaggtctgcagcagggctcggggctccagtagaggacggcaatgagagtcctgagggaaggaggaggcagggttggcggggaggggccactgactatgcctggacctacttccaggttgaagaagcctcagcggaggcgatacggcctcctcgccaacactgaggaccccacggagatggcctcgctggacagcgacgaggagacggtctttgagtcccggaatctgagatgatgctgagccagggaggcggcccttccagcagccatgagggaaggacaggagatggggcccaccccagtgcccagcaaccccctgctccaccgctcattcccctgctggccccggggctggtctcacccagtgccaacccgagagctccttttggaacctgcacagcccgccgacctgttgccacctgcacccaccgctggaccatgcagcctcgcctcctggatgctgtcccagcctggccgagggtcccaggtgaagactggagggaccccaacagccaccgcccaggacgctgaggctcccttgcctgactgtgacttgtgcctctctcctgcccccgtggggacatggcagcccagagccaaggctgggtgggcaggtgacccaaggaacctttctgggaacaccttctcgccgggctgggaacaataaatgcagccatgtctctgc

SEQ ID NO: 428516 - DNA, 870 bp, Homo sapiens
cgccaccgcttccgccgggccatggggccgcgcgtgctgcagccgccgctgctgctgctcctgctggcgctgctgctggcggcgctgccgtgcggtgccgaagaggcctcgccgctgcgccccgcgcaggtcacgttgtcgccgccgccggccgtgacgaacgggagccagccgggcgcgccacacaacagcacgcacacgcgtccgccgggggcgtcgggctcggcgctgacgcgctccttctacgtgatcctgggcttctgcggcctgaccgcgctctacttcctgatccgggcgtttaggttgaagaagcctcagcggaggcgatacggcctcctcgccaacactgaggaccccacggagatggcctcgctggacagcgacgaggagacggtctttgagtcccggaatctgagatgatgctgagccagggaggcggcccttccagcagccatgagggaaggacaggagatggggcccaccccagtgcccagcaaccccctgctccaccgctcattcccctgctggccccggggctggtctcacccagtgccaacccgagagctccttttggaacctgcacagcccgccgacctgttgccacctgcacccaccgctggaccatgcagcctcgcctcctggatgctgtcccagcctggccgagggtcccaggtgaagactggagggaccccaacagccaccgcccaggacgctgaggctcccttgcctgactgtgacttgtgcctctctcctgcccccgtggggacatggcagcccagagccaaggctgggtgggcaggtgacccaaggaacctttctgggaacaccttctcgccgggctgggaacaataaatgcagccatgtctctgc

SEQ ID NO: 428517 - DNA, 1143 bp, Homo sapiens
cgccaccgcttccgccgggccatggggccgcgcgtgctgcagccgccgctgctgctgctcctgctggcgctgctgctggcggcgctgccgtgcggtgccgaagaggcctcgccgctgcgccccgcgcaggtcacgttgtcgccgccgccggccgtgacgaacgggagccagccgggcgcgccacacaacagcacgcacacgcgtccgccgggggcgtcgggctcggcgctgacgcgctccttctacgtgatcctgggcttctgcggcctgaccgcgctctacttcctgatccgggcgtttaggtgcgtcaggcgcacgtgggcgccgtctctcagccttggccaattagcgcgcgcctagtgcgtcacgtgccgggccgcggggtcctcccctccctccctccctccctccctctctccctgttggagtgggcgtgggcggtgctgtgcggggtcgtcacgtggtgtgggcggtgcaggggccacgggactcacccgctctccagcctgcgcctggggttggaggtgcccagcgcgccgcctcttaactcgggggtgacgctgcccgtttcccaggttgaagaagcctcagcggaggcgatacggcctcctcgccaacactgaggaccccacggagatggcctcgctggacagcgacgaggagacggtctttgagtcccggaatctgagatgatgctgagccagggaggcggcccttccagcagccatgagggaaggacaggagatggggcccaccccagtgcccagcaaccccctgctccaccgctcattcccctgctggccccggggctggtctcacccagtgccaacccgagagctccttttggaacctgcacagcccgccgacctgttgccacctgcacccaccgctggaccatgcagcctcgcctcctggatgctgtcccagcctggccgagggtcccaggtgaagactggagggaccccaacagccaccgcccaggacgctgaggctcccttgcctgactgtgacttgtgcctctctcctgcccccgtggggacatggcagcccagagccaaggctgggtgggcaggtgacccaaggaacctttctgggaacaccttctcgccgggctgggaacaataaatgcagccatgtctctgc

SEQ ID NO: 428518 - DNA, 898 bp, Homo sapiens
cgccaccgcttccgccgggccatggggccgcgcgtgctgcagccgccgctgctgctgctcctgctggcgctgctgctggcggcgctgccgtgcggtgccgaagaggcctcgccgctgcgccccgcgcaggtcacgttgtcgccgccgccggccgtgacgaacgggagccagccgggcgcgccacacaacagcacgcacacgcgtccgccgggggcgtcgggctcggcgctgacgcgctccttctacgtgatcctgggcttctgcggcctgaccgcgctctacttcctgatccgggcgtttaggttgaagaagcctcagcggaggcgatacggcctcctcgccaacactgaggaccccacggagatggcctcgctggacagcgacgaggagacggtctttgagtcccggaatctgagatgatgctgagccagggaggcggcccttccagcagccatgagggaaggacaggagatggggcccaccccagtgcccagcaaccccctgctccaccgctcattcccctgctggccccggggctggtctcacccagtgccaacccgagagctccttttggaacctgcacagcccgccgacctgttgccacctgcacccaccgctggaccatgcagcctcgcctcctggatgctgtcccagcctggccgagggtcccaggtgaagactggagggaccccaacagccaccgcccaggacgctgaggctcccttgcctgactgtgacttgtgcctctctcctgcccccgtggggacatggcagcccagagccaaggctgggtgggcaggtgacccaaggaacctttctgggaacaccttctcgccgggctgggaacaataaatgcagccatgtctctgcaaaaaaaaaaaaaaaaaaaaaaaaaaac

SEQ ID NO: 428519 - DNA, 1023 bp, Homo sapiens
cgccaccgcttccgccgggccatggggccgcgcgtgctgcagccgccgctgctgctgctcctgctggcgctgctgctggcggcgctgccgtgcggtgccgaagaggcctcgccgctgcgccccgcgcaggtcacgttgtcgccgccgccggccgtgacgaacgggagccagccgggcgcgccacacaacagcacgcacacgcgtccgccgggggcgtcgggctcggcgctgacgcgctccttctacgtgatcctgggcttctgcggcctgaccgcgctctacttcctgatccgggcgtttaggttgaagaagcctcagcggaggcgatacggcctcctcgccaacactgaggaccccacggagatggcctcgctggacagcgacgaggagacggtctttgagtcccggaatctgagatgatgctgagccagggaggcggcccttccagcagccatgagggaaggacaggagatggggcccaccccagtgcccagcaaccccctgctccaccgctcattcccctgctggccccggggctggtctcacccagtgccaacccgagagctccttttggaacctgcacagcccgccgacctgttgccacctgcacccaccgctggaccatgcagcctcgcctcctggatgctgtcccagcctggccgagggtcccaggtgaagactggagggaccccaacagccaccgcccaggacgctgaggctcccttgcctgactgtgacttgtgcctctctcctgcccccgtggggacatggcagcccagagccaaggctgggtgggcaggtgacccaaggaacctttctgggaacaccttctcgccgggctgggaacaataaatgcagccatgtctctgcaaaaaaaaaaaattaaaaaattaaaaaaccttaatgataatggaaaataaaaaaaactcaggggggggccggttccaaattccctattgggagcctttacaattcaatgcccggctttaacaactcgtattggaaaaacccggtttcccaatc

SEQ ID NO: 428520 - DNA, 893 bp, Homo sapiens
cgccaccgcttccgccgggccatggggccgcgcgtgctgcagccgccgctgctgctgctcctgctggcgctgctgctggcggcgctgccgtgcggtgccgaagaggcctcgccgctgcgccccgcgcaggtcacgttgtcgccgccgccggccgtgacgaacgggagccagccgggcgcgccacacaacagcacgcacacgcgtccgccgggggcgtcgggctcggcgctgacgcgctccttctacgtgatcctgggcttctgcggcctgaccgcgctctacttcctgatccgggcgtttaggttgaagaagcctcagcggaggcgatacggcctcctcgccaacactgaggaccccacggagatggcctcgctggacagcgacgaggagacggtctttgagtcccggaatctgagatgatgctgagccagggaggcggcccttccagcagccatgagggaaggacaggagatggggcccaccccagtgcccagcaaccccctgctccaccgctcattcccctgctggccccggggctggtctcacccagtgccaacccgagagctccttttggaacctgcacagcccgccgacctgttgccacctgcacccaccgctggaccatgcagcctcgcctcctggatgctgtcccagcctggccgagggtcccaggtgaagactggagggaccccaacagccaccgcccaggacgctgaggctcccttgcctgactgtgacttgtgcctctctcctgcccccgtggggacatggcagcccagagccaaggctgggtgggcaggtgacccaaggaacctttctgggaacaccttctcgccgggctgggaacaataaatgcagccatgtctctgcagctggtgctgaccccatgccac

SEQ ID NO: 428521 - DNA, 437 bp, Homo sapiens
ctcctgacctcaagtgatctgcctgccttggcctcccaaagtgctggaattacaggcgtgagccactgtgccttcccatggtttcttatacttattttaacaatgttatttttgctttaaccatttcaaatatcaaatttctggtagatctgagatactttcaagtttataggacaactggcatctcaaacttgaagtatccaaaatggggctctcttgtcatctccaaccttggtcctcacctgcttttcctctattccaacagttactcaaaataaaaatttaagacttgtctttggcttctctttttcttcatcaatgccttcacactccttaccctgaacatccaatctagcagcaatttgtgttttttctgggaaggaggggagtccaaaatatatattgaattaatctatttcttgctttctctacagcca

SEQ ID NO: 428522 - DNA, 1459 bp, Homo sapiens
tccaccccctccccagagcactagtcatgccgcaaatgctaggaagtgccattttcattttctccactgtgcgtgtgtgctcaagtctttcgctctcacgtgggtgtacatgtgtgtgagcgtgtgtgtgtctctctctaaagcatgccaagggaatggtccatgtgtacatagactcattgtgctgtagatactgtcctgcattgtaattgtgagatgcggctgtaacaagttgctgggggagatggcggggaaagaggcaaggagcagagtcctccctacatccatggctgtcacatggcatcagtgtgtattcaaaccaagctatgctccttccaagggcaggaccccatattcctcctagtcccatcatcagaaccgagtggggagtcactcagaatatcactgtaaatgaaagtgcctactatcgatggggtaagcaaacagcataaggaattatgacgtggacgaggtgacctaggagagaaaatttcagattttactctcatttcatgagtctgagggattcttatatttcctggcatttaacagggtaggccctgctccactgtgaaaatgagcagcatgtgttgagtaaatccccagaaacaggaaggtctccaagtgtcaactcccagtgaaagaatgatgaaccacttggagatcctaagcagccctgttttacctcctccctaatcttaaataacatttgtcccatgaattcccctgagcagagattgtttcctatttcagataaaatacagtgaaagtgagcaaggcagaaaaagtcaacagatgcccaggctcctactgtattctggagatactgtcagagctctaatacagagcactggccataatgaaaagcagttcactccttgtgctcctctgcagatgtttttcccagtgttctaggttaatgttttatttggttgcctgcataatccctgttctgtttcactgatggtgtttgcagcaccactgttcatggtggtccactgttatcctatgccagggtgctaagaattgcatgatattcatcttccctgctctatttaaatttacatctataagagtcatcttgacattaacactgaaatgtgatctaggtccttaaccaaaattgctgggcaacttgtaataaatttagacagaaattttatgagtaccacaaagcttggtgttaccacatcaccagaaggatttcttaggaaatgtcttgccgagagagctggctctctgcatatagatgtctttgtcagaaaaccaacccttgctctcacttacacagtagtaagcactgaaagtggttcagttcatgagaggacagagaattattttgagattatatttgaatgtaatcttgcagagccaaatatggtatgtcattaagttggaaccttgtaaatagctgttccatgttataaaatgagaaactttgtaactggaaaaaaaaaaa

SEQ ID NO: 428523 - DNA, 672 bp, Homo sapiens
atctgcagaggagcacaaggagtgaactgcttttcattatggccagtgctctgtattagagctctgacagtatctccagaatacagtaggagcctgggcatctgttgatgtttttcccagtgttctaggttaatgttttatttggttgcctgcataatccctgttctgtttcactgatggtgtttgcagcaccactgttcatggtggtccactgttatcctatgccagggtgctaagaattgcatgatattcatcttccctgctctatttaaatttacatctataagagtcatcttgacattaacactgaaatgtgatctaggtccttaaccaaaattgctgggcaacttgtaataaatttagacagaaattttatgagtaccacaaagcttggtgttaccacatcaccagaaggatttcttaggaaatgtcttgccgagagagctggctctctgcatatagatgtctttgtcagaaaaccaacccttgctctcacttacacagtagtaagcactgaaagtggttcagttcatgagaggacagagaattattttgagattatatttgaatgtaatcttgcagagccaaatatggtatgtcattaagttggaaccttgtaaatagctgttccatgttataaaatgagaaactttgtaactggaaaaaaaaaaa

SEQ ID NO: 428524 - DNA, 719 bp, Homo sapiens
tatagattgagctttaccctgtgtcccatgcacagttggacgtgttgtggcctagctgcgccaggccctgcgtggctccctctactacctgctcagtgccctgccccagcccaaggccccaggatacatctgccatggcctcagtcctgggggcctctccaatgggagccgtgaggaatgctactggggccacgtcttctgggaccaggtgagcactgtacacccagcaccagccacacagcaggcgacacatggaggtccacggtctctgccctccctgggaccagggctatggttggggaagcacagggactgtggcaaaagggaagaggcctggaaggtgtgcaggagtttggtagaggagtgatctaggtgaggggaatggaaggtgcagagaccagagctgagagggcctgaggcactttccagagcgtggggaggggcctccaccaaggcgagaagggctgcaggtccagatcaccagcgtttgtagacagtagtgtggcgcttggagtttacctgagggccagtggagctccagggacctatcaggacggggacctgtggggactgggaaggcctgtggggctgcgtggagcccggtactggaggccgacgggggtgacggggacgctgagggcacagagcggaggggcatgatggctgctgggcgtggaggtgtcgagagtaactgtgcatgggaccggctccatcgttgt

SEQ ID NO: 428525 - DNA, 383 bp, Homo sapiens
  misc_feature (375)..(375): n is a, c, g, or t
acagagggtgggggcaagaccggggttgtggggggtgcgtttggaaagcagggttaggactggaattctaaggtagcaggagggagagacacactcaggggctcagctgggttcctggagatcaacctttggggtctgagcccctctgagagtcgagctcctttcctgcgaggccccgtctaggaggggcctcaggaaaatcggggctgcccagctggttccgcaactccccccagttctgagggaggcttcaggggattacagacggtctcaagagggaggcccagccagtcccgcggcccctgacaccccatcaggccgctcaggcccagcagctccatggaggacgccggcgagaccttgcctgcccggggnggattcct

SEQ ID NO: 428526 - DNA, 355 bp, Homo sapiens
gtccatgagccttcccggcaaaacgcccaataagggagaaggggcaggcgcggcgggggccggggttccctgaagtccccttcgtttccagaatccctaaagatcattccgccccccagggaggaaacccaagctccgccgagcgcggcgggtctgtgccttcgcttcgcttccagcctctcgcttccttctgacccgaccccgagttctttctccggacggtgtcgagaacccgggcgccggctggggctggagtctcgctggcctcggagcgcccccgagccctcgggcgacagcgaggcgaggacccagggaacgtcaggcctctgcatgtgacccacgcggcctccccctt

SEQ ID NO: 428527 - DNA, 309 bp, Homo sapiens
cacgctgaggcctgagcctgcctctctgccttctcagcagagcggccggccgctgtgaccactgctctcaggagagtgggggatgagaggccagaggtgatgcaggctcaggcctcagcgtggacagcagggataaggggcacgaaggacggggactcggccccttcagaattccccagggttcggtcgtcagcagtttcccaagaacaagatgtgatggcatctgctgctgaaaccctgatgaggaccaggccccctgcaccgctgtcagcctgaggaattaaagctttggtgctgggaagagcatta

SEQ ID NO: 428528 - DNA, 2715 bp, Homo sapiens
acagagggtgggggcaagaccggggttgtggggggtgcgtttggaaagcagggttaggactggaattctaaggtagcaggagggagagacacactcaggggctcagctgggttcctggagatcaacctttggggtctgagcccctctgagagtcgagctcctttcctgcgaggccccgtctaggaggggcctcaggaaaatcggggctgcccagctggttccgcaactccccccagttctgagggaggcttcaggggattacagacggtctcaagagggaggcccagccagtcccgcggcccctgacaccccatcaggccgctcaggcccagcagctccatggaggacgccggcgaggaccccaccacgtttgctgcccactctctgcccagtgacccccgtctcttggccactgtgaccaacgcatacctgggcacacgagtgtttcacgacacgctgcacgtgagcggcgtgtacaatggggctggcggggacacgcaccgggccatgctgcccagccccctcaacgtccggctggaggcccctgcagggatgggggagcagctgaccgagaccttcgccctggacaccaacacaggctcctttcttcacaccctggagggcccccgcttccgggcctcccagtgcatctatgcgcatcgcacgctgccccacgtgctggctttccgagtgtccatcgcccgcctggccccggggagcgggcccatcacgctgctcctgcggtcagccttctccccagaaagcccagacctggacctgcatcagggtcctgacttccagggagcccggtacctgtatggccacaccctcacccctgagcagcccggggggccacagcaagaggtacacatgctgtggacaccagcacccccagacctgacccttggggaaggtgaggaggctaggacgtgggacttcctgacagcagtgggcggcagccaggctgaggctcaggcctgcctcactgaggccctgcagctgcaggccaggggagctctgtatacggctcacgcacaggcctgggcccagctctgggtagaatgtggcttggacgtggtggggcccctgcagctgcgccaggccctgcgtggctccctctactacctgctcagtgccctgccccagcccaaggccccaggatacatctgccatggcctcagtcctgggggcctctccaatgggagccgtgaggaatgctactggggccacgtcttctgggaccaggacctctggatgttcccgagtatcctgatgttccacccagaagccgccagggccatcctggagtaccgcatccgcacgctggacggggccctggagaacgcccagaacctgggctaccagggagccaagtttgcctgggagagtgcagactccggcctagaggtttgccctgaggacatttacggagtccaggaggtccacgtcaacggggccgtggtgttggccttcgagctgtactaccataccacccaggacctgcagctatttcgagaggctggtggctgggacgtggtcagggctgtggccgagttttggtgcagtcgtgttgagtggagccccagggaggaaaagtaccacctgaggggagtcatgtcccccgacgagtaccactcaggggtcaacaactctgtgtacaccaacgtcctggtccagaacagcctgcgctttgctgctgccctggcccaggacctgggtcttcccatccccagccagtggctggcggtggctgacaagatcaaggtaccctttgacgtggagcagaacttccacccggaagttccagctccgagttccctgggaggactttttcagatgttagggacccgctccagagccccctctgggtcaccctgggttcctgcagccaggctctcagggaaggtccatgctgcttggcctgagttcaaggctttctgcctgtagcctggactcccgtggacccccgtgggcaggtggcttccccgtggcatctccacaccgcctctgcctgcccctgtggactgatgctatcgcgcaccgtcccacgaccccaccccgagctcctgaagccggggtctgagcctgcatcacctctggcctctcatcccccactctcctgagagcagtggtcacagcggccggccgctctgctgagaaggcagagaggcaggctcaggcctcagcgtggacagcagggataaggggcacgaaggacggggactcggccccttcagaattcctcaggactctcaggtgcagctttgccaaaaaggaacttttcatgtcatgcagttgaggggacttagtctcaatcccaggctcctcttgactctgggcagctttaatcaggttgggcagcctctgctacagcgtggagtgggatggctctcttccctcagccacgccgcttgtgaggacagaggtgggggagtgggaagtgggaagtcaccagagaacaggagagggatttgagggcgcgaccccagcgctctccacggaccagccagagggactggagccaggtgtgcatgggttcaaggccctggccctgcccagcctctgtcttgggagctcagccccagggttcggtcgtcagcagtttcccaagaacaagatgtgatggcatctgctgctgaaaccctgatgaggaccaggccccctgcaccgctgtcagcctgaggaattaaagctttggtgctgggaagagcatta

SEQ ID NO: 428529 - DNA, 3572 bp, Homo sapiens
acagagggtgggggcaagaccggggttgtggggggtgcgtttggaaagcagggttaggactggaattctaaggtagcaggagggagagacacactcaggggctcagctgggttcctggagatcaacctttggggtctgagcccctctgagagtcgagctcctttcctgcgaggccccgtctaggaggggcctcaggaaaatcggggctgcccagctggttccgcaactccccccagttctgagggaggcttcaggggattacagacggtctcaagagggaggcccagccagtcccgcggcccctgacaccccatcaggccgctcaggcccagcagctccatggaggacgccggcgaggaccccaccacgtttgctgcccactctctgcccagtgacccccgtctcttggccactgtgaccaacgcatacctgggcacacgagtgtttcacgacacgctgcacgtgagcggcgtgtacaatggggctggcggggacacgcaccgggccatgctgcccagccccctcaacgtccggctggaggcccctgcagggatgggggagcagctgaccgagaccttcgccctggacaccaacacaggctcctttcttcacaccctggagggcccccgcttccgggcctcccagtgcatctatgcgcatcgcacgctgccccacgtgctggctttccgagtgtccatcgcccgcctggccccggggagcgggcccatcacgctgctcctgcggtcagccttctccccagaaagcccagacctggacctgcatcagggtcctgacttccagggagcccggtacctgtatggccacaccctcacccctgagcagcccggggggccacagcaagaggtacacatgctgtggacaccagcacccccagacctgacccttggggaaggtgaggaggctaggacgtgggacttcctgacagcagtgggcggcagccaggctgaggctcaggcctgcctcactgaggccctgcagctgcaggccaggggagctctgtatacggctcacgcacaggcctgggcccagctctgggtagaatgtggcttggacgtggtggggcccctgcagctgcgccaggccctgcgtggctccctctactacctgctcagtgccctgccccagcccaaggccccaggatacatctgccatggcctcagtcctgggggcctctccaatgggagccgtgaggaatgctactggggccacgtcttctgggaccaggacctctggatgttcccgagtatcctgatgttccacccagaagccgccagggccatcctggagtaccgcatccgcacgctggacggggccctggagaacgcccagaacctgggctaccagggagccaagtttgcctgggagagtgcagactccggcctagaggtttgccctgaggacatttacggagtccaggaggtccacgtcaacggggccgtggtgttggccttcgagctgtactaccataccacccaggacctgcagctatttcgagaggctggtggctgggacgtggtcagggctgtggccgagttttggtgcagtcgtgttgagtggagccccagggaggaaaagtaccacctgaggggtgaggccatggtggggaggggctcggggaggaatggtggatgctcccagactcagcagatgattttcagacacctcacgtgtgccagccccacgctgaccaccggcgtggagggaaggcctctgagactctgcactgagcaccatcttggacttgtgtgtccaggagtcatgtcccccgacgagtaccactcaggggtcaacaactctgtgtacaccaacgtcctggtccagaacagcctgcgctttgctgctgccctggcccaggacctgggtcttcccatccccagccagtggctggcggtggctgacaagatcaaggtaccctttgacgtggagcagaacttccacccggagttcgatgggtatgagcctggaaaaatctggagatttacgaggctgtgacgtccccccagggccccgccatgacctggagcatgtttgctgtgggctggatggagctgaaggacgcagtgcgggcccggggcctcctggacaggagctttgccaacatggctgaacccttcaaggtgtggacggagaatgcagacgggtcaggcgctgtgaacttcctgacaggcatggggggcttcctgcaggcggtggtcttcgggtgcacggggttcagggtcacccgagcgggtgtgacctttgaccctgtgtgtctgtcggggatctccagagtgagcgtctccggcatcttctaccaggggaacaagctcaacttctctttttccgaggactccgtgaccgtggaggtcacagctcgagcagggccctgggctcctcacctggaggctgagctgtggccatcccagtcccggctctccctgttgccaggacacaaggtctcctttccccgctcggctggccggatacaaatgtcacccccgaagctgcctggaagttccagctccgagttccctgggaggactttttcagatgttagggacccgctccagagccccctctgggtcaccctgggttcctccagccccaccgagtcactcactgtggaccctgcctctgaataatcaggaacggtggcttcagagacgtctcttgggccttccctctggccacgtctgcacccacccctcctgggcaccctcctagcctgccatccctcacctgcagccaggctctcagggaaggtccatgctgcttggcctgagttcaaggctttctgcctgtagcctggactcccgtggacccccgtgggcaggtggcttccccgtggcatctccacaccgcctctgcctgcccctgtggactgatgctatcgcgcaccgtcccacgaccccaccccgagctcctgaagccggggtctgagcctgcatcacctctggcctctcatcccccactctcctgagagcagtggtcacagcggccggccgctctgctgagaaggcagagaggcaggctcaggcctcagcgtggacagcagggataaggggcacgaaggacggggactcggccccttcagaattcctcaggactctcaggtgcagctttgccaaaaaggaacttttcatgtcatgcagttgaggggacttagtctcaatcccaggctcctcttgactctgggcagctttaatcaggttgggcagcctctgctacagcgtggagtgggatggctctcttccctcagccacgccgcttgtgaggacagaggtgggggagtgggaagtgggaagtcaccagagaacaggagagggatttgagggcgcgaccccagcgctctccacggaccagccagagggactggagccaggtgtgcatgggttcaaggccctggccctgcccagcctctgtcttgggagctcagccccagggttcggtcgtcagcagtttcccaagaacaagatgtgatggcatctgctgctgaaaccctgatgaggaccaggccccctgcaccgctgtcagcctgaggaattaaagctttggtgctgggaagagcatta

SEQ ID NO: 428530 - DNA, 2473 bp, Homo sapiens
tggggagggcctgcagatctgagtgggcagccgaggaggaacccagaagacgccagcgatggagctctgccggggcggaatgtggccaggaggggcgggagcagtgacggcctgtccggcgctagaacgagggaccgtgctctcaggacctctggatgttcccgagtatcctgatgttccacccagaagccgccagggccatcctggagtaccgcatccgcacgctggacggggccctggagaacgcccagaacctgggctaccagggagccaagtttgcctgggagagtgcagactccggcctagaggtttgccctgaggacatttacggagtccaggaggtccacgtcaacggggccgtggtgttggccttcgagctgtactaccataccacccaggacctgcagctatttcgagaggctggtggctgggacgtggtcagggctgtggccgagttttggtgcagtcgtgttgagtggagccccagggaggaaaagtaccacctgaggggtgaggccatggtggggaggggctcggggaggaatggtggatgctcccagactcagcagatgattttcagacacctcacgtgtgccagccccacgctgaccaccggcgtggagggaaggcctctgagactctgcactgagcaccatcttggacttgtgtgtccaggagtcatgtcccccgacgagtaccactcaggggtcaacaactctgtgtacaccaacgtcctggtccagaacagcctgcgctttgctgctgccctggcccaggacctgggtcttcccatccccagccagtggctggcggtggctgacaagatcaaggtaccctttgacgtggagcagaacttccacccggagttcgatgggtatgagcctggaaaaatctggagatttacgaggctgtgacgtccccccagggccccgccatgacctggagcatgtttgctgtgggctggatggagctgaaggacgcagtgcgggcccggggcctcctggacaggagctttgccaacatggctgaacccttcaaggtgtggacggagaatgcagacgggtcaggcgctgtgaacttcctgacaggcatggggggcttcctgcaggcggtggtcttcgggtgcacggggttcagggtcacccgagcgggtgtgacctttgaccctgtgtgtctgtcggggatctccagagtgagcgtctccggcatcttctaccaggggaacaagctcaacttctctttttccgaggactccgtgaccgtggaggtcacagctcgagcagggccctgggctcctcacctggaggctgagctgtggccatcccagtcccggctctccctgttgccaggacacaaggtctcctttccccgctcggctggccggatacaaatgtcacccccgaagctgcctggaagttccagctccgagttccctgggaggactttttcagatgttagggacccgctccagagccccctctgggtcaccctgggttcctccagccccaccgagtcactcactgtggaccctgcctctgaataatcaggaacggtggcttcagagacgtctcttgggccttccctctggccacgtctgcacccacccctcctgggcaccctcctagcctgccatccctcacctgcagccaggctctcagggaaggtccatgctgcttggcctgagttcaaggctttctgcctgtagcctggactcccgtggacccccgtgggcaggtggcttccccgtggcatctccacaccgcctctgcctgcccctgtggactgatgctatcgcgcaccgtcccacgaccccaccccgagctcctgaagccggggtctgagcctgcatcacctctggcctctcatcccccactctcctgagagcagtggtcacagcggccggccgctctgctgagaaggcagagaggcaggctcaggcctcagcgtggacagcagggataaggggcacgaaggacggggactcggccccttcagaattcctcaggactctcaggtgcagctttgccaaaaaggaacttttcatgtcatgcagttgaggggacttagtctcaatcccaggctcctcttgactctgggcagctttaatcaggttgggcagcctctgctacagcgtggagtgggatggctctcttccctcagccacgccgcttgtgaggacagaggtgggggagtgggaagtgggaagtcaccagagaacaggagagggatttgagggcgcgaccccagcgctctccacggaccagccagagggactggagccaggtgtgcatgggttcaaggccctggccctgcccagcctctgtcttgggagctcagccccagggttcggtcgtcagcagtttcccaagaacaagatgtgatggcatctgctgctgaaaccctgatgaggaccaggccccctgcaccgctgtcagcctgaggaattaaagctttggtgctgggaagagcatta

SEQ ID NO: 428531 - DNA, 3739 bp, Homo sapiens
acagagggtgggggcaagaccggggttgtggggggtgcgtttggaaagcagggttaggactggaattctaaggtagcaggagggagagacacactcaggggctcagctgggttcctggagatcaacctttggggtctgagcccctctgagagtcgagctcctttcctgcgaggccccgtctaggaggggcctcaggaaaatcggggctgcccagctggttccgcaactccccccagttctgagggaggcttcaggggattacagacggtctcaagagggaggcccagccagtcccgcggcccctgacaccccatcaggccgctcaggcccagcagctccatggaggacgccggcgaggaccccaccacgtttgctgcccactctctgcccagtgacccccgtctcttggccactgtgaccaacgcatacctgggcacacgagtgtttcacgacacgctgcacgtgagcggcgtgtacaatggggctggcggggacacgcaccgggccatgctgcccagccccctcaacgtccggctggaggcccctgcagggatgggggagcagctgaccgagaccttcgccctggacaccaacacaggctcctttcttcacaccctggagggcccccgcttccgggcctcccagtgcatctatgcgcatcgcacgctgccccacgtgctggctttccgagtgtccatcgcccgcctggccccggggagcgggcccatcacgctgctcctgcggtcagccttctccccagaaagcccagacctggacctgcatcagggtcctgacttccagggagcccggtacctgtatggccacaccctcacccctgagcagcccggggggccacagcaagaggtacacatgctgtggacaccagcacccccagacctgacccttggggaaggtgaggaggctaggacgtgggacttcctgacagcagtgggcggcagccaggctgaggctcaggcctgcctcactgaggccctgcagctgcaggccaggggagctctgtatacggctcacgcacaggcctgggcccagctctgggtagaatgtggcttggacgtggtggggcccctgcagctgcgccaggccctgcgtggctccctctactacctgctcagtgccctgccccagcccaaggccccaggatacatctgccatggcctcagtcctgggggcctctccaatgggagccgtgaggaatgctactggggccacgtcttctgggaccaggacctctggatgttcccgagtatcctgatgttccacccagaagccgccagggccatcctggagtaccgcatccgcacgctggacggggccctggagaacgcccagaacctgggctaccagggagccaagtttgcctgggagagtgcagactccggcctagaggtttgccctgaggacatttacggagtccaggaggtccacgtcaacggggccgtggtgttggccttcgagctgtactaccataccacccaggacctgcagctatttcgagaggctggtggctgggacgtggtcagggctgtggccgagttttggtgcagtcgtgttgagtggagccccagggaggaaaagtaccacctgaggggtgaggccatggtggggaggggctcggggaggaatggtggatgctcccagactcagcagatgattttcagacacctcacgtgtgccagccccacgctgaccaccggcgtggagggaaggcctctgagactctgcactgagcaccatcttggacttgtgtgtccaggagtcatgtcccccgacgagtaccactcaggggtcaacaactctgtgtacaccaacgtcctggtccagaacagcctgcgctttgctgctgccctggcccaggacctgggtcttcccatccccagccagtggctggcggtggctgacaagatcaaggtaccctttgacgtggagcagaacttccacccggagttcgatgggtatgagcctggtgagtggaccccttcaagggctcctcccctgccgtcgagaccctcgagtctgtcctggaacaccttccagtcagcggcacctccctgtaggagaggtggtgaagcaggcagacgtcgtgctcctgggatacccagtccccttctccctgagtcctgatgttcgcaggaaaaatctggagatttacgaggctgtgacgtccccccagggccccgccatgacctggagcatgtttgctgtgggctggatggagctgaaggacgcagtgcgggcccggggcctcctggacaggagctttgccaacatggctgaacccttcaaggtgtggacggagaatgcagacgggtcaggcgctgtgaacttcctgacaggcatggggggcttcctgcaggcggtggtcttcgggtgcacggggttcagggtcacccgagcgggtgtgacctttgaccctgtgtgtctgtcggggatctccagagtgagcgtctccggcatcttctaccaggggaacaagctcaacttctctttttccgaggactccgtgaccgtggaggtcacagctcgagcagggccctgggctcctcacctggaggctgagctgtggccatcccagtcccggctctccctgttgccaggacacaaggtctcctttccccgctcggctggccggatacaaatgtcacccccgaagctgcctggaagttccagctccgagttccctgggaggactttttcagatgttagggacccgctccagagccccctctgggtcaccctgggttcctccagccccaccgagtcactcactgtggaccctgcctctgaataatcaggaacggtggcttcagagacgtctcttgggccttccctctggccacgtctgcacccacccctcctgggcaccctcctagcctgccatccctcacctgcagccaggctctcagggaaggtccatgctgcttggcctgagttcaaggctttctgcctgtagcctggactcccgtggacccccgtgggcaggtggcttccccgtggcatctccacaccgcctctgcctgcccctgtggactgatgctatcgcgcaccgtcccacgaccccaccccgagctcctgaagccggggtctgagcctgcatcacctctggcctctcatcccccactctcctgagagcagtggtcacagcggccggccgctctgctgagaaggcagagaggcaggctcaggcctcagcgtggacagcagggataaggggcacgaaggacggggactcggccccttcagaattcctcaggactctcaggtgcagctttgccaaaaaggaacttttcatgtcatgcagttgaggggacttagtctcaatcccaggctcctcttgactctgggcagctttaatcaggttgggcagcctctgctacagcgtggagtgggatggctctcttccctcagccacgccgcttgtgaggacagaggtgggggagtgggaagtgggaagtcaccagagaacaggagagggatttgagggcgcgaccccagcgctctccacggaccagccagagggactggagccaggtgtgcatgggttcaaggccctggccctgcccagcctctgtcttgggagctcagccccagggttcggtcgtcagcagtttcccaagaacaagatgtgatggcatctgctgctgaaaccctgatgaggaccaggccccctgcaccgctgtcagcctgaggaattaaagctttggtgctgggaagagcatta

SEQ ID NO: 428532 - DNA, 3483 bp, Homo sapiens
acagagggtgggggcaagaccggggttgtggggggtgcgtttggaaagcagggttaggactggaattctaaggtagcaggagggagagacacactcaggggctcagctgggttcctggagatcaacctttggggtctgagcccctctgagagtcgagctcctttcctgcgaggccccgtctaggaggggcctcaggaaaatcggggctgcccagctggttccgcaactccccccagttctgagggaggcttcaggggattacagacggtctcaagagggaggcccagccagtcccgcggcccctgacaccccatcaggccgctcaggcccagcagctccatggaggacgccggcgaggaccccaccacgtttgctgcccactctctgcccagtgacccccgtctcttggccactgtgaccaacgcatacctgggcacacgagtgtttcacgacacgctgcacgtgagcggcgtgtacaatggggctggcggggacacgcaccgggccatgctgcccagccccctcaacgtccggctggaggcccctgcagggatgggggagcagctgaccgagaccttcgccctggacaccaacacaggctcctttcttcacaccctggagggcccccgcttccgggcctcccagtgcatctatgcgcatcgcacgctgccccacgtgctggctttccgagtgtccatcgcccgcctggccccggggagcgggcccatcacgctgctcctgcggtcagccttctccccagaaagcccagacctggacctgcatcagggtcctgacttccagggagcccggtacctgtatggccacaccctcacccctgagcagcccggggggccacagcaagaggtacacatgctgtggacaccagcacccccagacctgacccttggggaaggtgaggaggctaggacgtgggacttcctgacagcagtgggcggcagccaggctgaggctcaggcctgcctcactgaggccctgcagctgcaggccaggggagctctgtatacggctcacgcacaggcctgggcccagctctgggtagaatgtggcttggacgtggtggggcccctgcagctgcgccaggccctgcgtggctccctctactacctgctcagtgccctgccccagcccaaggccccaggatacatctgccatggcctcagtcctgggggcctctccaatgggagccgtgaggaatgctactggggccacgtcttctgggaccaggacctctggatgttcccgagtatcctgatgttccacccagaagccgccagggccatcctggagtaccgcatccgcacgctggacggggccctggagaacgcccagaacctgggctaccagggagccaagtttgcctgggagagtgcagactccggcctagaggtttgccctgaggacatttacggagtccaggaggtccacgtcaacggggccgtggtgttggccttcgagctgtactaccataccacccaggacctgcagctatttcgagaggctggtggctgggacgtggtcagggctgtggccgagttttggtgcagtcgtgttgagtggagccccagggaggaaaagtaccacctgaggggagtcatgtcccccgacgagtaccactcaggggtcaacaactctgtgtacaccaacgtcctggtccagaacagcctgcgctttgctgctgccctggcccaggacctgggtcttcccatccccagccagtggctggcggtggctgacaagatcaaggtaccctttgacgtggagcagaacttccacccggagttcgatgggtatgagcctggagaggtggtgaagcaggcagacgtcgtgctcctgggatacccagtccccttctccctgagtcctgatgttcgcaggaaaaatctggagatttacgaggctgtgacgtccccccagggccccgccatgacctggagcatgtttgctgtgggctggatggagctgaaggacgcagtgcgggcccggggcctcctggacaggagctttgccaacatggctgaacccttcaaggtgtggacggagaatgcagacgggtcaggcgctgtgaacttcctgacaggcatggggggcttcctgcaggcggtggtcttcgggtgcacggggttcagggtcacccgagcgggtgtgacctttgaccctgtgtgtctgtcggggatctccagagtgagcgtctccggcatcttctaccaggggaacaagctcaacttctctttttccgaggactccgtgaccgtggaggtcacagctcgagcagggccctgggctcctcacctggaggctgagctgtggccatcccagtcccggctctccctgttgccaggacacaaggtctcctttccccgctcggctggccggatacaaatgtcacccccgaagctgcctggaagttccagctccgagttccctgggaggactttttcagatgttagggacccgctccagagccccctctgggtcaccctgggttcctccagccccaccgagtcactcactgtggaccctgcctctgaataatcaggaacggtggcttcagagacgtctcttgggccttccctctggccacgtctgcacccacccctcctgggcaccctcctagcctgccatccctcacctgcagccaggctctcagggaaggtccatgctgcttggcctgagttcaaggctttctgcctgtagcctggactcccgtggacccccgtgggcaggtggcttccccgtggcatctccacaccgcctctgcctgcccctgtggactgatgctatcgcgcaccgtcccacgaccccaccccgagctcctgaagccggggtctgagcctgcatcacctctggcctctcatcccccactctcctgagagcagtggtcacagcggccggccgctctgctgagaaggcagagaggcaggctcaggcctcagcgtggacagcagggataaggggcacgaaggacggggactcggccccttcagaattcctcaggactctcaggtgcagctttgccaaaaaggaacttttcatgtcatgcagttgaggggacttagtctcaatcccaggctcctcttgactctgggcagctttaatcaggttgggcagcctctgctacagcgtggagtgggatggctctcttccctcagccacgccgcttgtgaggacagaggtgggggagtgggaagtgggaagtcaccagagaacaggagagggatttgagggcgcgaccccagcgctctccacggaccagccagagggactggagccaggtgtgcatgggttcaaggccctggccctgcccagcctctgtcttgggagctcagccccagggttcggtcgtcagcagtttcccaagaacaagatgtgatggcatctgctgctgaaaccctgatgaggaccaggccccctgcaccgctgtcagcctgaggaattaaagctttggtgctgggaagagcatta

SEQ ID NO: 428533 - DNA, 3668 bp, Homo sapiens
acagagggtgggggcaagaccggggttgtggggggtgcgtttggaaagcagggttaggactggaattctaaggtagcaggagggagagacacactcaggggctcagctgggttcctggagatcaacctttggggtctgagcccctctgagagtcgagctcctttcctgcgaggccccgtctaggaggggcctcaggaaaatcggggctgcccagctggttccgcaactccccccagttctgagggaggcttcaggggattacagacggtctcaagagggaggcccagccagtcccgcggcccctgacaccccatcaggccgctcaggcccagcagctccatggaggacgccggcgaggaccccaccacgtttgctgcccactctctgcccagtgacccccgtctcttggccactgtgaccaacgcatacctgggcacacgagtgtttcacgacacgctgcacgtgagcggcgtgtacaatggggctggcggggacacgcaccgggccatgctgcccagccccctcaacgtccggctggaggcccctgcagggatgggggagcagctgaccgagaccttcgccctggacaccaacacaggctcctttcttcacaccctggagggcccccgcttccgggcctcccagtgcatctatgcgcatcgcacgctgccccacgtgctggctttccgagtgtccatcgcccgcctggccccggggagcgggcccatcacgctgctcctgcggtcagccttctccccagaaagcccagacctggacctgcatcagggtcctgacttccagggagcccggtacctgtatggccacaccctcacccctgagcagcccggggggccacagcaagaggtacacatgctgtggacaccagcacccccagacctgacccttggggaaggtgaggaggctaggacgtgggacttcctgacagcagtgggcggcagccaggctgaggctcaggcctgcctcactgaggccctgcagctgcaggccaggggagctctgtatacggctcacgcacaggcctgggcccagctctgggtagaatgtggcttggacgtggtggggcccctgcagctgcgccaggccctgcgtggctccctctactacctgctcagtgccctgccccagcccaaggccccaggatacatctgccatggcctcagtcctgggggcctctccaatgggagccgtgaggaatgctactggggccacgtcttctgggaccaggacctctggatgttcccgagtatcctgatgttccacccagaagccgccagggccatcctggagtaccgcatccgcacgctggacggggccctggagaacgcccagaacctgggctaccagggagccaagtttgcctgggagagtgcagactccggcctagaggtttgccctgaggacatttacggagtccaggaggtccacgtcaacggggccgtggtgttggccttcgagctgtactaccataccacccaggacctgcagctatttcgagaggctggtggctgggacgtggtcagggctgtggccgagttttggtgcagtcgtgttgagtggagccccagggaggaaaagtaccacctgaggggtgaggccatggtggggaggggctcggggaggaatggtggatgctcccagactcagcagatgattttcagacacctcacgtgtgccagccccacgctgaccaccggcgtggagggaaggcctctgagactctgcactgagcaccatcttggacttgtgtgtccaggagtcatgtcccccgacgagtaccactcaggggtcaacaactctgtgtacaccaacgtcctggtccagaacagcctgcgctttgctgctgccctggcccaggacctgggtcttcccatccccagccagtggctggcggtggctgacaagatcaaggtaccctttgacgtggagcagaacttccacccggagttcgatgggtatgagcctgtcagcggcacctccctgtaggagaggtggtgaagcaggcagacgtcgtgctcctgggatacccagtccccttctccctgagtcctgatgttcgcaggaaaaatctggagatttacgaggctgtgacgtccccccagggccccgccatgacctggagcatgtttgctgtgggctggatggagctgaaggacgcagtgcgggcccggggcctcctggacaggagctttgccaacatggctgaacccttcaaggtgtggacggagaatgcagacgggtcaggcgctgtgaacttcctgacaggcatggggggcttcctgcaggcggtggtcttcgggtgcacggggttcagggtcacccgagcgggtgtgacctttgaccctgtgtgtctgtcggggatctccagagtgagcgtctccggcatcttctaccaggggaacaagctcaacttctctttttccgaggactccgtgaccgtggaggtcacagctcgagcagggccctgggctcctcacctggaggctgagctgtggccatcccagtcccggctctccctgttgccaggacacaaggtctcctttccccgctcggctggccggatacaaatgtcacccccgaagctgcctggaagttccagctccgagttccctgggaggactttttcagatgttagggacccgctccagagccccctctgggtcaccctgggttcctccagccccaccgagtcactcactgtggaccctgcctctgaataatcaggaacggtggcttcagagacgtctcttgggccttccctctggccacgtctgcacccacccctcctgggcaccctcctagcctgccatccctcacctgcagccaggctctcagggaaggtccatgctgcttggcctgagttcaaggctttctgcctgtagcctggactcccgtggacccccgtgggcaggtggcttccccgtggcatctccacaccgcctctgcctgcccctgtggactgatgctatcgcgcaccgtcccacgaccccaccccgagctcctgaagccggggtctgagcctgcatcacctctggcctctcatcccccactctcctgagagcagtggtcacagcggccggccgctctgctgagaaggcagagaggcaggctcaggcctcagcgtggacagcagggataaggggcacgaaggacggggactcggccccttcagaattcctcaggactctcaggtgcagctttgccaaaaaggaacttttcatgtcatgcagttgaggggacttagtctcaatcccaggctcctcttgactctgggcagctttaatcaggttgggcagcctctgctacagcgtggagtgggatggctctcttccctcagccacgccgcttgtgaggacagaggtgggggagtgggaagtgggaagtcaccagagaacaggagagggatttgagggcgcgaccccagcgctctccacggaccagccagagggactggagccaggtgtgcatgggttcaaggccctggccctgcccagcctctgtcttgggagctcagccccagggttcggtcgtcagcagtttcccaagaacaagatgtgatggcatctgctgctgaaaccctgatgaggaccaggccccctgcaccgctgtcagcctgaggaattaaagctttggtgctgggaagagcatta

SEQ ID NO: 428534 - DNA, 3380 bp, Homo sapiens
acagagggtgggggcaagaccggggttgtggggggtgcgtttggaaagcagggttaggactggaattctaaggtagcaggagggagagacacactcaggggctcagctgggttcctggagatcaacctttggggtctgagcccctctgagagtcgagctcctttcctgcgaggccccgtctaggaggggcctcaggaaaatcggggctgcccagctggttccgcaactccccccagttctgagggaggcttcaggggattacagacggtctcaagagggaggcccagccagtcccgcggcccctgacaccccatcaggccgctcaggcccagcagctccatggaggacgccggcgaggaccccaccacgtttgctgcccactctctgcccagtgacccccgtctcttggccactgtgaccaacgcatacctgggcacacgagtgtttcacgacacgctgcacgtgagcggcgtgtacaatggggctggcggggacacgcaccgggccatgctgcccagccccctcaacgtccggctggaggcccctgcagggatgggggagcagctgaccgagaccttcgccctggacaccaacacaggctcctttcttcacaccctggagggcccccgcttccgggcctcccagtgcatctatgcgcatcgcacgctgccccacgtgctggctttccgagtgtccatcgcccgcctggccccggggagcgggcccatcacgctgctcctgcggtcagccttctccccagaaagcccagacctggacctgcatcagggtcctgacttccagggagcccggtacctgtatggccacaccctcacccctgagcagcccggggggccacagcaagaggtacacatgctgtggacaccagcacccccagacctgacccttggggaaggtgaggaggctaggacgtgggacttcctgacagcagtgggcggcagccaggctgaggctcaggcctgcctcactgaggccctgcagctgcaggccaggggagctctgtatacggctcacgcacaggcctgggcccagctctgggtagaatgtggcttggacgtggtggggcccctgcagctgcgccaggccctgcgtggctccctctactacctgctcagtgccctgccccagcccaaggccccaggatacatctgccatggcctcagtcctgggggcctctccaatgggagccgtgaggaatgctactggggccacgtcttctgggaccaggacctctggatgttcccgagtatcctgatgttccacccagaagccgccagggccatcctggagtaccgcatccgcacgctggacggggccctggagaacgcccagaacctgggctaccagggagccaagtttgcctgggagagtgcagactccggcctagaggtttgccctgaggacatttacggagtccaggaggtccacgtcaacggggccgtggtgttggccttcgagctgtactaccataccacccaggacctgcagctatttcgagaggctggtggctgggacgtggtcagggctgtggccgagttttggtgcagtcgtgttgagtggagccccagggaggaaaagtaccacctgaggggagtcatgtcccccgacgagtaccactcaggggtcaacaactctgtgtacaccaacgtcctggtccagaacagcctgcgctttgctgctgccctggcccaggacctgggtcttcccatccccagccagtggctggcggtggctgacaagatcaaggtaccctttgacgtggagcagaacttccacccggagttcgatgggtatgagcctggagaggtggtgaagcaggcagacgtcgtgctcctgggatacccagtccccttctccctgagtcctgatgttcgcaggaaaaatctggagatttacgaggctgtgacgtccccccagggccccgccatgacctggagcatgtttgctgtgggctggatggagctgaaggacgcagtgcgggcccggggcctcctggacaggagctttgccaacatggctgaacccttcaaggtgtggacggagaatgcagacgggtcaggcgctgtgaacttcctgacagagtgagcgtctccggcatcttctaccaggggaacaagctcaacttctctttttccgaggactccgtgaccgtggaggtcacagctcgagcagggccctgggctcctcacctggaggctgagctgtggccatcccagtcccggctctccctgttgccaggacacaaggtctcctttccccgctcggctggccggatacaaatgtcacccccgaagctgcctggaagttccagctccgagttccctgggaggactttttcagatgttagggacccgctccagagccccctctgggtcaccctgggttcctccagccccaccgagtcactcactgtggaccctgcctctgaataatcaggaacggtggcttcagagacgtctcttgggccttccctctggccacgtctgcacccacccctcctgggcaccctcctagcctgccatccctcacctgcagccaggctctcagggaaggtccatgctgcttggcctgagttcaaggctttctgcctgtagcctggactcccgtggacccccgtgggcaggtggcttccccgtggcatctccacaccgcctctgcctgcccctgtggactgatgctatcgcgcaccgtcccacgaccccaccccgagctcctgaagccggggtctgagcctgcatcacctctggcctctcatcccccactctcctgagagcagtggtcacagcggccggccgctctgctgagaaggcagagaggcaggctcaggcctcagcgtggacagcagggataaggggcacgaaggacggggactcggccccttcagaattcctcaggactctcaggtgcagctttgccaaaaaggaacttttcatgtcatgcagttgaggggacttagtctcaatcccaggctcctcttgactctgggcagctttaatcaggttgggcagcctctgctacagcgtggagtgggatggctctcttccctcagccacgccgcttgtgaggacagaggtgggggagtgggaagtgggaagtcaccagagaacaggagagggatttgagggcgcgaccccagcgctctccacggaccagccagagggactggagccaggtgtgcatgggttcaaggccctggccctgcccagcctctgtcttgggagctcagccccagggttcggtcgtcagcagtttcccaagaacaagatgtgatggcatctgctgctgaaaccctgatgaggaccaggccccctgcaccgctgtcagcctgaggaattaaagctttggtgctgggaagagcatta

SEQ ID NO: 428535 - DNA, 3429 bp, Homo sapiens
acagagggtgggggcaagaccggggttgtggggggtgcgtttggaaagcagggttaggactggaattctaaggtagcaggagggagagacacactcaggggctcagctgggttcctggagatcaacctttggggtctgagcccctctgagagtcgagctcctttcctgcgaggccccgtctaggaggggcctcaggaaaatcggggctgcccagctggttccgcaactccccccagttctgagggaggcttcaggggattacagacggtctcaagagggaggcccagccagtcccgcggcccctgacaccccatcaggccgctcaggcccagcagctccatggaggacgccggcgaggaccccaccacgtttgctgcccactctctgcccagtgacccccgtctcttggccactgtgaccaacgcatacctgggcacacgagtgtttcacgacacgctgcacgtgagcggcgtgtacaatggggctggcggggacacgcaccgggccatgctgcccagccccctcaacgtccggctggaggcccctgcagggatgggggagcagctgaccgagaccttcgccctggacaccaacacaggctcctttcttcacaccctggagggcccccgcttccgggcctcccagtgcatctatgcgcatcgcacgctgccccacgtgctggctttccgagtgtccatcgcccgcctggccccggggagcgggcccatcacgctgctcctgcggtcagccttctccccagaaagcccagacctggacctgcatcagggtcctgacttccagggagcccggtacctgtatggccacaccctcacccctgagcagcccggggggccacagcaagaggtacacatgctgtggacaccagcacccccagacctgacccttggggaaggtgaggaggctaggacgtgggacttcctgacagcagtgggcggcagccaggctgaggctcaggcctgcctcactgaggccctgcagctgcaggccaggggagctctgtatacggctcacgcacaggcctgggcccagctctgggtagaatgtggcttggacgtggtggggcccctgcagctgcgccaggccctgcgtggctccctctactacctgctcagtgccctgccccagcccaaggccccaggatacatctgccatggcctcagtcctgggggcctctccaatgggagccgtgaggaatgctactggggccacgtcttctgggaccaggacctctggatgttcccgagtatcctgatgttccacccagaagccgccagggccatcctggagtaccgcatccgcacgctggacggggccctggagaacgcccagaacctgggctaccagggagccaagtttgcctgggagagtgcagactccggcctagaggtttgccctgaggacatttacggagtccaggaggtccacgtcaacggggccgtggtgttggccttcgagctgtactaccataccacccaggacctgcagctatttcgagaggctggtggctgggacgtggtcagggctgtggccgagttttggtgcagtcgtgttgagtggagccccagggaggaaaagtaccacctgaggggagtcatgtcccccgacgagtaccactcaggggtcaacaactctgtgtacaccaacgtcctggtccagaacagcctgcgctttgctgctgccctggcccaggacctgggtcttcccatccccagccagtggctggcggtggctgacaagatcaaggtaccctttgacgtggagcagaacttccacccggagttcgatgggtatgagcctggagaggtggtgaagcaggcagacgtcgtgctcctgggatacccagtccccttctccctgagtcctgatgttcgcaggaaaaatctggagatttacgaggctgtgacgtccccccagggccccgccatgacctggagcatgtttgctgtgggctggatggagctgaaggacgcagtgcgggcccggggcctcctggacaggagctttgccaacatggctgaacccttcaaggtgtggacggagaatgcagacgggtcaggcgctgtgaacttcctgacaggcatggggggcttcctgcaggcggtggtcttcgggtgcacggggttcagagtgagcgtctccggcatcttctaccaggggaacaagctcaacttctctttttccgaggactccgtgaccgtggaggtcacagctcgagcagggccctgggctcctcacctggaggctgagctgtggccatcccagtcccggctctccctgttgccaggacacaaggtctcctttccccgctcggctggccggatacaaatgtcacccccgaagctgcctggaagttccagctccgagttccctgggaggactttttcagatgttagggacccgctccagagccccctctgggtcaccctgggttcctccagccccaccgagtcactcactgtggaccctgcctctgaataatcaggaacggtggcttcagagacgtctcttgggccttccctctggccacgtctgcacccacccctcctgggcaccctcctagcctgccatccctcacctgcagccaggctctcagggaaggtccatgctgcttggcctgagttcaaggctttctgcctgtagcctggactcccgtggacccccgtgggcaggtggcttccccgtggcatctccacaccgcctctgcctgcccctgtggactgatgctatcgcgcaccgtcccacgaccccaccccgagctcctgaagccggggtctgagcctgcatcacctctggcctctcatcccccactctcctgagagcagtggtcacagcggccggccgctctgctgagaaggcagagaggcaggctcaggcctcagcgtggacagcagggataaggggcacgaaggacggggactcggccccttcagaattcctcaggactctcaggtgcagctttgccaaaaaggaacttttcatgtcatgcagttgaggggacttagtctcaatcccaggctcctcttgactctgggcagctttaatcaggttgggcagcctctgctacagcgtggagtgggatggctctcttccctcagccacgccgcttgtgaggacagaggtgggggagtgggaagtgggaagtcaccagagaacaggagagggatttgagggcgcgaccccagcgctctccacggaccagccagagggactggagccaggtgtgcatgggttcaaggccctggccctgcccagcctctgtcttgggagctcagccccagggttcggtcgtcagcagtttcccaagaacaagatgtgatggcatctgctgctgaaaccctgatgaggaccaggccccctgcaccgctgtcagcctgaggaattaaagctttggtgctgggaagagcatta

SEQ ID NO: 428536 - DNA, 1946 bp, Homo sapiens
ggaaagctccagaagcagcaaggaagccaggcataagttgggagcgactgagccactccaggaggaggtgtgggcccacggcgtgttggaggtggagccacaggacctgtccataggttggatgctgtgtgggtgacagagagaaaccggggctcacggcctgggcagcgggacgggcggagtcgtcctcacctgtgctggggaccctgtgggagcagcaggcttccgagcacgtgctggaccccggcgtctccggctgcaccgagtggtcaggacattgaggccgggtcagggagcgtgagataccgggacgagcggggccccggggagcgggcccatcacgctgctcctgcggtcagccttctccccagaaagcccagacctggacctgcatcagggtcctgacttccagggagcccggtacctgtatggccacaccctcacccctgagcagcccggggggccacagcaagaggtacacatgctgtggacaccagcacccccagacctgacccttggggaagctgcgccaggccctgcgtggctccctctactacctgctcagtgccctgccccagcccaaggccccaggatacatctgccatggcctcagtcctgggggcctctccaatgggagccgtgaggaatgctactggggccacgtcttctgggaccaggacctctggatgttcccgagtatcctgatgttccacccagaagccgccagggccatcctggagtaccgcatccgcacgctggacggggccctggagaacgcccagaacctgggctaccagccccaggctgcctctctccctgcaggacacaaggtctcctttccccgctcggctggccggatacaaatgtcacccccgaagctgcctggaagttccagctccgagttccctgggaggactttttcagatgttagggacccgctccagagccccctctgggtcaccctgggttcctccagccccaccgagtcactcactgtggaccctgcctctgaataatcaggaacggtggcttcagagacgtctcttgggccttccctctggccacgtctgcacccacccctcctgggcaccctcctagcctgccatccctcacctgcagccaggctctcagggaaggtccatgctgcttggcctgagttcaaggctttctgcctgtagcctggactcccgtggacccccgtgggcaggtggcttccccgtggcatctccacaccgcctctgcctgcccctgtggactgatgctatcgcgcaccgtcccacgaccccaccccgagctcctgaagccggggtctgagcctgcatcacctctggcctctcatcccccactctcctgagagcagtggtcacagcggccggccgctctgctgagaaggcagagaggcaggctcaggcctcagcgtggacagcagggataaggggcacgaaggacggggactcggccccttcagaattcctcaggactctcaggtgcagctttgccaaaaaggaacttttcatgtcatgcagttgaggggacttagtctcaatcccaggctcctcttgactctgggcagctttaatcaggttgggcagcctctgctacagcgtggagtgggatggctctcttccctcagccacgccgcttgtgaggacagaggtgggggagtgggaagtgggaagtcaccagagaacaggagagggatttgagggcgcgaccccagcgctctccacggaccagccagagggactggagccaggtgtgcatgggttcaaggccctggccctgcccagcctctgtcttgggagctcagccccagggttcggtcgtcagcagtttcccaagaacaagatgtgatggcatctgctgctgaaaccctgatgaggaccaggccccctgcaccgctgtcagcctgaggaattaaagctttggtgctgggaagagcatta

SEQ ID NO: 428537 - DNA, 1127 bp, Homo sapiens
tcaatcccaggctcctcttgactctgggcagctttaatcaggttgggcagcttctgctacagcgtggaagttccagctccgagttccctgggaggactttttcagatgttagggacccgctccagagccccctctgggtcaccctgggttcctccagccccaccgagtcactcactgtggaccctgcctctgaataatcaggaacggtggcttcagagacgtctcttgggccttccctctggccacgtctgcacccacccctcctgggcaccctcctagcctgccatccctcacctgcagccaggctctcagggaaggtccatgctgcttggcctgagttcaaggctttctgcctgtagcctggactcccgtggacccccgtgggcaggtggcttccccgtggcatctccacaccgcctctgcctgcccctgtggactgatgctatcgcgcaccgtcccacgaccccaccccgagctcctgaagccggggtctgagcctgcatcacctctggcctctcatcccccactctcctgagagcagtggtcacagcggccggccgctctgctgagaaggcagagaggcaggctcaggcctcagcgtggacagcagggataaggggcacgaaggacggggactcggccccttcagaattcctcaggactctcaggtgcagctttgccaaaaaggaacttttcatgtcatgcagttgaggggacttagtctcaatcccaggctcctcttgactctgggcagctttaatcaggttgggcagcctctgctacagcgtggagtgggatggctctcttccctcagccacgccgcttgtgaggacagaggtgggggagtgggaagtgggaagtcaccagagaacaggagagggatttgagggcgcgaccccagcgctctccacggaccagccagagggactggagccaggtgtgcatgggttcaaggccctggccctgcccagcctctgtcttgggagctcagccccagggttcggtcgtcagcagtttcccaagaacaagatgtgatggcatctgctgctgaaaccctgatgaggaccaggccccctgcaccgctgtcagcctgaggaattaaagctttggtgctgggaagagcatta

SEQ ID NO: 428538 - DNA, 4000 bp, Homo sapiens
acagagggtgggggcaagaccggggttgtggggggtgcgtttggaaagcagggttaggactggaattctaaggtagcaggagggagagacacactcaggggctcagctgggttcctggagatcaacctttggggtctgagcccctctgagagtcgagctcctttcctgcgaggccccgtctaggaggggcctcaggaaaatcggggctgcccagctggttccgcaactccccccagttctgagggaggcttcaggggattacagacggtctcaagagggaggcccagccagtcccgcggcccctgacaccccatcaggccgctcaggcccagcagctccatggaggacgccggcgaggaccccaccacgtttgctgcccactctctgcccagtgacccccgtctcttggccactgtgaccaacgcatacctgggcacacgagtgtttcacgacacgctgcacgtgagcggcgtgtacaatggggctggcggggacacgcaccgggccatgctgcccagccccctcaacgtccggctggaggcccctgcagggatgggggagcagctgaccgagaccttcgccctggacaccaacacaggctcctttcttcacaccctggagggcccccgcttccgggcctcccagtgcatctatgcgcatcgcacgctgccccacgtgctggctttccgagtgtccatcgcccgcctggccccggggagcgggcccatcacgctgctcctgcggtcagccttctccccagaaagcccagacctggacctgcatcagggtcctgacttccagggagcccggtacctgtatggccacaccctcacccctgagcagcccggggggccacagcaagaggtacacatgctgtggacaccagcacccccagacctgacccttggggaaggtgaggaggctaggacgtgggacttcctgacagcagtgggcggcagccaggctgaggctcaggcctgcctcactgaggccctgcagctgcaggccaggggagctctgtatacggctcacgcacaggcctgggcccagctctgggtagaatgtggcttggacgtggtggggcccctgcagctgcgccaggccctgcgtggctccctctactacctgctcagtgccctgccccagcccaaggccccaggatacatctgccatggcctcagtcctgggggcctctccaatgggagccgtgaggaatgctactggggccacgtcttctgggaccaggacctctggatgttcccgagtatcctgatgttccacccagaagccgccagggccatcctggagtaccgcatccgcacgctggacggggccctggagaacgcccagaacctgggctaccagggagccaagtttgcctgggagagtgcagactccggcctagaggtttgccctgaggacatttacggagtccaggaggtccacgtcaacggggccgtggtgttggccttcgagctgtactaccataccacccaggacctgcagctatttcgagaggctggtggctgggacgtggtcagggctgtggccgagttttggtgcagtcgtgttgagtggagccccagggaggaaaagtaccacctgaggggtgaggccatggtggggaggggctcggggaggaatggtggatgctcccagactcagcagatgattttcagacacctcacgtgtgccagccccacgctgaccaccggcgtggagggaaggcctctgagactctgcactgagcaccatcttggacttgtgtgtccaggagtcatgtcccccgacgagtaccactcaggggtcaacaactctgtgtacaccaacgtcctggtccagaacagcctgcgctttgctgctgccctggcccaggacctgggtcttcccatccccagccagtggctggcggtggctgacaagatcaaggtaccctttgacgtggagcagaacttccacccggagttcgatgggtatgagcctggaaaaatctggagatttacgaggctgtgacgtccccccagggccccgccatgacctggagcatgtttgctgtgggctggatggagctgaaggacgcagtgcgggcccggggcctcctggacaggagctttgccaacatggctgaacccttcaaggtgtggacggagaatgcagacgggtcaggcgctgtgaacttcctgacaggcatggggggcttcctgcaggcggtggtcttcgggtgcacggggttcagggtcacccgagcgggtgtgacctttgaccctgtgtgtctgtcggggatctccagagtgagcgtctccggcatcttctaccaggggaacaagctcaacttctctttttccgaggactccgtgaccgtggaggtcacagctcgagcagggccctgggctcctcacctggaggctgagctgtggccatcccagtcccggctctccctgttgccaggacacaaggtctcctttccccgctcggctggccggatacaaatgtcacccccgaagctgcctggaagttccagctccgagttccctgggaggactttttcagatgttagggacccgctccagagccccctctgggtcaccctgggttcctccagccccaccgagtcactcactgtggaccctgcctctgaataatcaggaacggtggcttcagagacgtctcttgggccttccctctggccacgtctgcacccacccctcctgggcaccctcctagcctgccatccctcacctgcagccaggctctcagggaaggtccatgctgcttggcctgagttcaaggctttctgcctgtagcctggactcccgtggacccccgtgggcaggtggcttccccgtggcatctccacaccgcctctgcctgcccctgtggactgatgctatcgcgcaccgtcccacgaccccaccccgagctcctgaagccggggtctgagcctgcatcacctctggcctctcatcccccactctcctgagagcagtggtcacagcggccggccgctctgctgagaaggcagagaggcaggctcaggcctcagcgtggacagcagggataaggggcacgaaggacggggactcggccccttcagaattcctcaggactctcaggtgcagctttgccaaaaaggaacttttcatgtcatgcagttgaggggacttagtctcaatcccaggctcctcttgactctgggcagctttaatcaggttgggcagcctctgctacagcgtggagtgggatggctctcttccctcagccacgccgcttgtgaggacagaggtgggggagtgggaagtgggaagtcaccagagaacaggagagggatttgagggcgcgaccccagcgctctccacggaccagccagagggactggagccaggtgtgcatgggttcaaggccctggccctgcccagcctctgtcttgggagctcagccccagggttcggtcgtcagcagtttcccaagaacaagatgtgatggcatctgctgctgaaaccctgatgaggaccaggccccctgcaccgctgtcagcctgaggaattaaagctttggtgctgggaagagcattattcctctgaggagccgctgtgcttccttctgaagtgagggccgtgccccgggtcccatttctcctttcacttgagtcgggaagcacagcaactttaaggctcgcgcccagcaacatggctcccctcgcatctgcatctccctcctgctctggtgttgccgctgcaccctgtcctcggaggacagcagaggtttggacggagactcagggagggagggaaggaggcaaggacgcctgtggaaacatctttcaggcagctctagggtctgggggccaggatgcctgggtctcccaaggcctgtctgctgtctctgccaccctcagcggctgccagaagcagcgtgtgggggaggcatgtgctgcagcacacctgcggccgagaccagcactcagaggtcggctcccctgacaggaaccgtgtagggtgca

SEQ ID NO: 428539 - DNA, 1756 bp, Homo sapiens
acagagggtgggggcaagaccggggttgtggggggtgcgtttggaaagcagggttaggactggaattctaaggtagcaggagggagagacacactcaggggctcagctgggttcctggagatcaacctttggggtctgagcccctctgagagtcgagctcctttcctgcgaggccccgtctaggaggggcctcaggaaaatcggggctgcccagctggttccgcaactccccccagttctgagggaggcttcaggggattacagacggtctcaagagggaggcccagccagtcccgcggcccctgacaccccatcaggccgctcaggcccagcagctccatggaggacgccggcgaggaccccaccacgtttgctgcccactctctgcccagtgacccccgtctcttggccactgtgaccaacgcatacctgggcacacgagtgtttcacgacacgctgcacgtgagcggcgtgtacaatggggctggcggggacacgcaccgggccatgctgcccagccccctcaacgtccggctggaggcccctgcagggatgggggagcagctgaccgagaccttcgccctggacaccaacacaggctcctttcttcacaccctggagggcccccgcttccgggcctcccagtgcatctatgcgcatcgcacgctgccccacgtgctggctttccgagtgtccatcgcccgcctggccccggggagcgggcccatcacgctgctcctgcggtcagccttctccccagaaagcccagacctggacctgcatcagggtcctgacttccagggagcccggtacctgtatggccacaccctcacccctgagcagcccggggggccacagcaagaggtacacatgctgtggacaccagcacccccagacctgacccttggggaaggtgaggaggctaggacgtgggacttcctgacagcagtgggcggcagccaggctgaggctcaggcctgcctcactgaggccctgcagctgcaggccaggggagctctgtatacggctcacgcacaggcctgggcccagctctgggtagaatgtggcttggacgtggtggggcccctgcagctgcgccaggccctgcgtggctccctctactacctgctcagtgccctgccccagcccaaggccccaggatacatctgccatggcctcagtcctgggggcctctccaatgggagccgtgaggaatgctactggggccacgtcttctgggaccaggtgagcactgtacacccagcaccagccacacagcaggcgacacatggaggtccacggtctctgccctccctgggaccagggctatggttggggaagcacagggactgtggcaaaagggaagaggcctggaaggtgtgcaggagtttggtagaggagtgatctaggtgaggggaatggaaggtgcagagaccagagctgagagggcctgaggcactttccagagcgtggggaggggcctccaccaaggcgagaagggctgcaggtccagatcaccagcgtttgtagacagtagtgtggcgcttggagtttacctgagggccagtggagctccagggacctatcaggacggggacctgtggggactgggaaggcctgtggggctgcgtggagcccggtactggaggccgacgggggtgacggggacgctgagggcacagagcggaggggcatgatggctgctgggcgtggaggtgtcgagagtaactgtgcatgggaccggctccatcgttgt

SEQ ID NO: 428540 - DNA, 1976 bp, Homo sapiens
acagagggtgggggcaagaccggggttgtggggggtgcgtttggaaagcagggttaggactggaattctaaggtagcaggagggagagacacactcaggggctcagctgggttcctggagatcaacctttggggtctgagcccctctgagagtcgagctcctttcctgcgaggccccgtctaggaggggcctcaggaaaatcggggctgcccagctggttccgcaactccccccagttctgagggaggcttcaggggattacagacggtctcaagagggaggcccagccagtcccgcggcccctgacaccccatcaggccgctcaggcccagcagctccatggaggacgccggcgaggaccccaccacgtttgctgcccactctctgcccagtgacccccgtctcttggccactgtgaccaacgcatacctgggcacacgagtgtttcacgacacgctgcacgtgagcggcgtgtacaatggggctggcggggacacgcaccgggccatgctgcccagccccctcaacgtccggctggaggcccctgcagggatgggggagcagctgaccgagaccttcgccctggacaccaacacaggctcctttcttcacaccctggagggcccccgcttccgggcctcccagtgcatctatgcgcatcgcacgctgccccacgtgctggctttccgagtgtccatcgcccgcctggccccggggagcgggcccatcacgctgctcctgcggtcagccttctccccagaaagcccagacctggacctgcatcagggtcctgacttccagggagcccggtacctgtatggccacaccctcacccctgagcagcccggggggccacagcaagaggtacacatgctgtggacaccagcacccccagacctgacccttggggaaggtgaggaggctaggacgtgggacttcctgacagcagtgggcggcagccaggctgaggctcaggcctgcctcactgaggccctgcagctgcaggccaggggagctctgtatacggctcacgcacaggcctgggcccagctctgggtagaatgtggcttggacgtggtggggcccctgcagctgcgccaggccctgcgtggctccctctactacctgctcagtgccctgccccagcccaaggccccaggatacatctgccatggcctcagtcctgggggcctctccaatgggagccgtgaggaatgctactggggccacgtcttctgggaccaggacctctggatgttcccgagtatcctgatgttccacccagaagccgccagggccatcctggagtaccgcatccgcacgctggacggggccctggagaacgcccagaacctgggctaccagggagccaagtttgcctgggagagtgcagactccggcctagaggtttgccctgaggacatttacggagtccaggaggtccacgtcaacggggccgtggtgttggccttcgagctgtactaccataccacccaggacctgcagctatttcgagaggctggtggctgggacgtggtcagggctgtggccgagttttggtgcagtcgtgttgagtggagccccagggaggaaaagtaccacctgaggggagtcatgtcccccgacgagtaccactcaggggtcaacaactctgtgtacaccaacgtcctggtccagaacagcctgcgctttgctgctgccctggcccaggacctgggtcttcccatccccagccagtggctggcggtggctgacaagatcaaggtaccctttgacgtggagcagaacttccacccggagttcgatgggtatgagcctggagaggtggtgaagcaggcagacgtcgtgctcctgggatacccagtccccttctccctgagtcctgatgttcgcaggaaaaatctggagatttacgaggctgtgacgtccccccagggccccgccatgacctgggtgagcaccctggggctgtggag

SEQ ID NO: 428541 - DNA, 733 bp, Homo sapiens
ggaaagctccagaagcagcaaggaagccaggcataagttgggagcgactgagccactccaggaggaggtgtgggcccacggcgtgttggaggtggagccacaggacctgtccataggttggatgctgtgtgggtgacagagagaaaccggggctcacggcctgggcagcgggacgggcggagtcgtcctcacctgtgctggggaccctgtgggagcagcaggcttccgagcacgtgctggaccccggcgtctccggctgcaccgagtggtcaggacattgaggccgggtcagggagcgtgagataccgggacgagcgggcccagggctgagcccagcggcgtccgggtgggcggtggcgttgagatgggaattgggaattgcaccggtggtctcaggaggatggaaaacccaagcagcagctgcaccaggaccgaggcaaagggaccgcagtttaacagaaaacccaaaacgagagcgagaaaacggccaaacacccgtgcgaggaggaaacccaagctccgccgagcgcggcgggtctgtgccttcgcttcgcttccagcctctcgcttccttctgacccgaccccgagttctttctccggacggtgtcgagaacccgggcgccggctggggctggagtctcgctggcctcggagcgcccccgagccctcgggcgacagcgaggcgaggacccagggaacgccaggcccccggacgcgacccacgcggccgc

SEQ ID NO: 428542 - DNA, 1877 bp, Homo sapiens
acagagggtgggggcaagaccggggttgtggggggtgcgtttggaaagcagggttaggactggaattctaaggtagcaggagggagagacacactcaggggctcagctgggttcctggagatcaacctttggggtctgagcccctctgagagtcgagctcctttcctgcgaggccccgtctaggaggggcctcaggaaaatcggggctgcccagctggttccgcaactccccccagttctgagggaggcttcaggggattacagacggtctcaagagggaggcccagccagtcccgcggcccctgacaccccatcaggccgctcaggcccagcagctccatggaggacgccggcgaggaccccaccacgtttgctgcccactctctgcccagtgacccccgtctcttggccactgtgaccaacgcatacctgggcacacgagtgtttcacgacacgctgcacgtgagcggcgtgtacaatggggctggcggggacacgcaccgggccatgctgcccagccccctcaacgtccggctggaggcccctgcagggatgggggagcagctgaccgagaccttcgccctggacaccaacacaggctcctttcttcacaccctggagggcccccgcttccgggcctcccagtgcatctatgcgcatcgcacgctgccccacgtgctggctttccgagtgtccatcgcccgcctggccccggggagcgggcccatcacgctgctcctgcggtcagccttctccccagaaagcccagacctggacctgcatcagggtcctgacttccagggagcccggtacctgtatggccacaccctcacccctgagcagcccggggggccacagcaagaggtacacatgctgtggacaccagcacccccagacctgacccttggggaaggtgaggaggctaggacgtgggacttcctgacagcagtgggcggcagccaggctgaggctcaggcctgcctcactgaggccctgcagctgcaggccaggggagctctgtatacggctcacgcacaggcctgggcccagctctgggtagaatgtggcttggacgtggtggggcccctgcagctgcgccaggccctgcgtggctccctctactacctgctcagtgccctgccccagcccaaggccccaggatacatctgccatggcctcagtcctgggggcctctccaatgggagccgtgaggaatgctactggggccacgtcttctgggaccaggacctctggatgttcccgagtatcctgatgttccacccagaagccgccagggccatcctggagtaccgcatccgcacgctggacggggccctggagaacgcccagaacctgggctaccagggagccaagtttgcctgggagagtgcagactccggcctagaggtttgccctgaggacatttacggagtccaggaggtccacgtcaacggggccgtggtgttggccttcgagctgtactaccataccacccaggacctgcagctatttcgagaggctggtggctgggacgtggtcagggctgtggccgagttttggtgcagtcgtgttgagtggagccccagggaggaaaagtaccacctgaggggtgaggccatggtggggaggggctcggggaggaatggtggatgctcccagactcagcagatgattttcagacacctcacgtgtgccagccccacgctgaccaccggcgtggagggaaggcctctgagactctgcactgagcaccatcttggacttgtgtgtccaggagtcatgtcccccgacgagtaccactcaggggtcaacaactctgtgtacaccaacgtcctggtccagaacaggtcagacacaagatcccctcacctcacccc

SEQ ID NO: 428543 - DNA, 465 bp, Homo sapiens
ggaaagctccagaagcagcaaggaagccaggcataagttgggagcgactgagccactccaggaggaggtgtgggcccacggcgtgttggaggtggagccacaggacctgtccataggttggatgctgtgaggatggaaaacccaagcagcagctgcaccaggaccgaggcaaagggaccgcagtttaacagaaaacccaaaacgagagcgagaaaacggccaaacacccgtgcgaggaggaaacccaagctccgccgagcgcggcgggtctgtgccttcgcttcgcttccagcctctcgcttccttctgacccgaccccgagttctttctccggacggtgtcgagaacccgggcgccggctggggctggagtctcgctggcctcggagcgcccccgagccctcgggcgacagcgaggcgaggacccagggaacgccaggcccccggacgcgacccacgcggccgc

SEQ ID NO: 428544 - DNA, 600 bp, Homo sapiens
ccgtgaccgtggaggtcacagctcgagcagggccctgggctcctcacctggaggctgagctgtggccatcccagtcccggctctccctgttgccaggtagaacagcccccaacagcccaggtgcctgcgaccccaggctgcccctcacccccaggctgcctctctccctgcaggacacaaggtctcctttccccgctcggctggccggatacaaatgtcacccccgaagctgcctggaagttccagctccgagttccctgggaggactttttcagatgttagggacccgctccagagccccctctgggtcaccctgggttcctccagccccaccgagtcactcactgtggaccctgcctctgaataatcaggaacggtggcttcagagacgtctcttgggccttccctctggccacgtctgcacccacccctcctgggcaccctcctagcctgccatccctcacctgcagccaggctctcagggaaggtccatgctgcttggcctgagttcaaggctttctgcctgtagcctggactcccgtggacccccgtgggcaggtggcttccccgtggcatctccacaccgcctctgcctgcccc

SEQ ID NO: 428545 - DNA, 735 bp, Homo sapiens
cgagtggtcaggacattgaggccgggtcagggagcgtgagataccgggacgagcgggcccagggctgagcccagcggcgtccgggtgggcggtggcgttgagatgggaattgggaattgcaccggtggtctcaggaggatggaaaacccaagcagcagctgcaccaggaccgaggcaaagggaccgcagtttaacagaaaacccaaaacgagagcgagaaaacggccaaacacccgtgcgagtgagacgtccatgagccttcccggcaaaacgcccaataagggagaaggggcaggcgcggcgggggccggggttccctgaagtccccttcgtttccagaatccctaaagatcattccgccccccagggaggaaacccaagctccgccgagcgcggcgggtctgtgccttcgcttcgcttccagcctctcgcttccttctgacccgaccccgagttctttctccggacggtgtcgagaacccgggcgccggctggggctggagtctcgctggcctcggagcgcccccgagccctcgggcgacagcgaggcgaggacccaggtggaggcggccgggggcgcgggcggagggaggaggcgcgggagggaacccccggcccgcgggccccacccacagccgccccgggacgcagctcggggtccaggctcgagctttgctcactcagggcgcttcgtgcagggaacgccaggcccccggacgcgacccacgcggccgc

SEQ ID NO: 428546 - DNA, 336 bp, Homo sapiens
gctcctttcttcacaccctggagggcccccgcttccgggcctcccagtgcatctatgcgcatcgcacgctgccccacgtgctggctttccgagtgtccatcgcccgcctggccccggggagcgggcccatcacgctgctcctgcggtcagccttctccccagaaagcccagacctggacctgcatcagggtcctgacttccagggagcccggtaaggagggggctggatttgcagccagggagtccagggagggagctcatccctgaggcatggccacgctctcacaggtacctgtatggccacaccctcacccctgagcagcccggggggccaca

SEQ ID NO: 428547 - DNA, 347 bp, Homo sapiens
tgtgcagcagagggcagctgagaggctgggtggctgggcctgggagacacacagaggccaggccttagcgcggctcagccatgagcaacaggagtagcttttcccggctcacctggttcaggaagcagaggaaagctgtggtcagcaccagcgacaagaagatgcccaacggaatcttggaggagcaagagcagcaaagggtgatgctgctcagcaggtcaccctcagggcccaagaagtattttcccatccccgtggagcacctggaggaggagatccgtatcagatccgccgacgactgcaagcagtttcgggaggagttcaacgtgagtgtggggagggctctc

SEQ ID NO: 428548 - DNA, 472 bp, Homo sapiens
tcagttcttaccaaatcataggcacctgctctaggccagggtccatgggccctgagataccatggaaatgcaaaggcaagtctccgccttcatgcagcataggatctggctgatgagaccatcactttggccacaccactgttcaccccacatgaaagagcaccctggggaaagccagggtctgtgtctccttcattctctgccccatgcctggtgcaaggtctgaggcagagacggactatggacagcaggtagtttgctccacgtgttttcattaattcctgtgctcagtagggaaactgacatgagcatggtgcttgaatccatcacatttcatactaatgctacattttcttccagtcattgccatctggacacatacaaggaacttttgaactggcaaataaagaagaaaacagagaaaaaaacagatatcccaacatccttcccagtaagattttattttatgttt

SEQ ID NO: 428549 - DNA, 5335 bp, Homo sapiens
agccacagccggagctggagccgaggcggcggcgggacgcggccggccggacaaatttcctgctaggctgcggacagcgggcggcaggagccggcgcgagcggcttcaggaacccacggcctctgcgcgtccccgcgacccttcttcgcgcccggcgaagacagccgggcgccccggagggcggcgggcaggcgcccgggagatgcggagcctccgctgcagcgcgatctgcgcgaccagaccggcccccccgagactatagccttcactttccctcggtccaccatggagcccttgtgtccactcctgctggtgggttttagcttgccgctcgccagggctctcaggggcaacgagaccactgccgacagcaacgagacaaccacgacctcaggccctccggacccgggcgcctcccagccgctgctggcctggctgctactgccgctgctgctcctcctcctcgtgctccttctcgccgcctacttcttcaggttcaggaagcagaggaaagctgtggtcagcaccagcgacaagaagatgcccaacggaatcttggaggagcaagagcagcaaagggtgatgctgctcagcaggtcaccctcagggcccaagaagtattttcccatccccgtggagcacctggaggaggagatccgtatcagatccgccgacgactgcaagcagtttcgggaggagttcaactcattgccatctggacacatacaaggaacttttgaactggcaaataaagaagaaaacagagaaaaaaacagatatcccaacatccttcccaatgaccattctagggtgattctgagccaactggatggaattccctgttcagactacatcaatgcttcctacatagatggttacaaagagaagaataaattcatagcagctcaaggtcccaaacaggaaacggttaacgacttctggagaatggtctgggagcaaaagtctgcgaccatcgtcatgttaacaaacttgaaagaaaggaaagaggaaaagtgccatcagtactggcccgaccaaggctgctggacctatggaaacatccgggtgtgcgtggaggactgcgtggttttggtcgactacaccatccggaagttctgcatacagccacagctccccgacggctgcaaagcccccaggctggtctcacagctgcacttcaccagctggcccgacttcggagtgccttttacccccattgggatgctgaagttcctcaagaaagtaaagacgctcaaccccgtgcacgctgggcccatcgtggtccactgtagcgcgggcgtgggccggacgggcaccttcattgtgatcgatgccatgatggccatgatgcacgcggagcagaaggtggatgtgtttgaatttgtgtctcgaatccgtaatcagcgccctcagatggttcaaacggatatgcagtacacgttcatctaccaagccttactcgagtactacctctacggggacacagagctggacgtgtcctccctggagaagcacctgcagaccatgcacggcaccaccacccacttcgacaagatcgggctggaggaggagttcaggaaattgacaaatgtccggatcatgaaggagaacatgaggacgggcaacttgccggcaaacatgaagaaggccagggtcatccagatcatcccgtatgacttcaaccgagtgatcctttccatgaaaaggggtcaagaatacacagactacatcaacgcatccttcatagacggctaccgacagaaggactatttcatcgccacccaggggccactggcacacacggttgaggacttctggaggatgatctgggaatggaaatcccacactatcgtgatgctgacggaggtgcaggagagagagcaggataaatgctaccagtattggccaaccgagggctcagttactcatggagaaataacgattgagataaagaatgataccctttcagaagccatcagtatacgagactttctggtcactctcaatcagccccaggcccgccaggaggagcaggtccgagtagtgcgccagtttcacttccacggctggcctgagatcgggattcccgccgagggcaaaggcatgattgacctcatcgcagccgtgcagaagcagcagcagcagacaggcaaccaccccatcaccgtgcactgcagtgccggagctgggcgaacaggtacattcatagccctcagcaacattttggagcgagtaaaagccgagggacttttagatgtatttcaagctgtgaagagtttacgacttcagagaccacatatggtgcaaaccctggaacagtatgaattctgctacaaagtggtacaagattttattgatatattttctgattatgctaatttcaaatgaagattcctgccttaaaatattttttaatttaatggtcagtatattttgtaaaaatcatgttaatttatttcatagttgacattaatatcttccctaatttctttgtatatattttgttatgccttaaaggccacctgctatacagttgttaaatcttaaatatgctttttaaaaattggaataatgtattaaggtcaaataatatcccataaaatatatatttctgctaatattagtaaatatcttaatttttcattagattcatatcatttaatttcacatattcaacacctttaaatgttgtaatcttaatatgcgaagtgtgcctctgcaagatactaacacaaagctcatgttaagaaaacagttgaggactcggaagtcagttgaaaatgcactttcctaacagtgaattcacaaccctgaacagcagcatttttggaaggcaaactgttcgtgatggtacaatgtaaatggggacttctgtaaagttctcagtttcggtccatgtggtttatctttacattttaaagatcaaagaagtctttacaacctgaatccaggtctaaaacacactagagtagctggtgactataaataatattttaaaatgctgtgtctacaccatcaagactgtgtctacactatcttggctgaacgagaagagatgtaaatgctgggtggtcccgttgacccacggcgttgggtacaacaaaaccagccatcggagttacaccccaaagcaccatttgctgtccagctgcctgtcgtttggcccagaccaccctcagaaaaaaaccagctgcctctcccattctcccctcccgttctgccacagcggcctgggctggtccagtgctatgcctggaggctcaacacaaaacttcccatccaaacattcagatgaactgagcgtcttacacacgcagtacagaggagcacacattaggatagaaacagtagaataaccacgggcaattaaactttaaattttctgagcagcattttggtatttaaacatttcttgtaaaaagctgagacagtttgtaagaaaagaatccttaaaatctagatttataccattttttaaagtcccacctttcaatgtttaataaaacaaaaagagaaatccttaatctaaaagctaaattatttttgaatggaaatactactgagaccattgacactggataacagtaatgatcccattaccagataagattgactgacggggaaaaaaaaaaaaaagaatggggtgtgaatgtaccaacactgaatcttacagcagttatctttctatggccattaggtacctagcagatgtgcacaatataaacaaaaagatatctggcctaccttactactaaaagcatttaacacgtgcatttttggtacttttttttttgttttctaaaagctacataaaggccttatttgacattttcactgataactgatcgcaccctcatgttgcagtgttcgtcccctattcattaacagtgtgtgcaaatgcaaccccaggacacattattgttctgatagatgctcacagggaatcaagcttctcgcccactccacggctctgagccccatccaagggcaagacttggtgcccagctggaaggacgaaagcacactttgtgaccgccatcctcaccagctgcatgcctgggctgcacactgctgaacgtgctcctctctccttctctgtacaatgattcagcatctcggcggaagaggaaaatggagctttttgaggctcgccaggtcccttttgttttcaccattaaaattccaaacccaaagcctttgtttgactgaaggagaagagagggaagtaagcttctgttcagcacctgaaccctagaaaaagagccagtttgctacgatgaaggtgacatttctctggtcatttatttgagagttcgaagtcaaagtcgaggggcaccggctttggttcatgtctaggagccctctgtcagaatccttgaagccctttaatggtctaactggcatctcttgtatcaagaagtacctttaaggtagaccttttcagggtgccctcaggaaagggccctgctcatgtttttttcctgtccccttagaccaaccccaggtgtccactgcaggggttctgcctgttcccaaactttttccattccaggaacaaaggagaagccactttccccaggacgcaggactctcccctccactgtccgggacagcgttcgccctttagcggggaggtcattacagcctcatggcctctaccaaggccccagatcacaggatctcctgggccttggagcacctcacgctgggggaatcaatccctgagggactcagaatcttctccgtgcaacctggaaagttcatctcttgtttccttcagtcaaagaaagtccattgtacataacaaaacagcccccaaacagcccagtgccgacaccattgttcctttcacactttcctttgttgcatgcagttgggttcaaatgccaaatagtgattagaagacgaccattctgatctgtgtgtgatctggtcactatgtgactgcctttacggtttctctccatgtgctatatgaatgaagaatgcataccagtgttttaaaaggtatttttatgtgtttttaaacacttttttaaatgagcctgacacctgtgtttcagcatttggagacatccccatgttattcttttaagtgtataattactgatacttttttgtttgtttgtttaactaagttgtgtttaacttatgtgcagtctttataatgtatgtatgttattacagtttcaactatcatattttctttgattacatttataatttgatcttgctctgattataatgccagtgaatgttgctgaactctttgtatatgcaaattgcaagatttaaaccattctgatgcaaggataaacctttactttgactacca

SEQ ID NO: 428550 - DNA, 4879 bp, Homo sapiens
tgtgcagcagagggcagctgagaggctgggtggctgggcctgggagacacacagaggccaggccttagcgcggctcagccatgagcaacaggagtagcttttcccggctcacctggttcaggaagcagaggaaagctgtggtcagcaccagcgacaagaagatgcccaacggaatcttggaggagcaagagcagcaaagggtgatgctgctcagcaggtcaccctcagggcccaagaagtattttcccatccccgtggagcacctggaggaggagatccgtatcagatccgccgacgactgcaagcagtttcgggaggagttcaactcattgccatctggacacatacaaggaacttttgaactggcaaataaagaagaaaacagagaaaaaaacagatatcccaacatccttcccaggttacaaagagaagaataaattcatagcagctcaaggtcccaaacaggaaacggttaacgacttctggagaatggtctgggagcaaaagtctgcgaccatcgtcatgttaacaaacttgaaagaaaggaaagaggaaaagtgccatcagtactggcccgaccaaggctgctggacctatggaaacatccgggtgtgcgtggaggactgcgtggttttggtcgactacaccatccggaagttctgcatacagccacagctccccgacggctgcaaagcccccaggctggtctcacagctgcacttcaccagctggcccgacttcggagtgccttttacccccattgggatgctgaagttcctcaagaaagtaaagacgctcaaccccgtgcacgctgggcccatcgtggtccactgtagcgcgggcgtgggccggacgggcaccttcattgtgatcgatgccatgatggccatgatgcacgcggagcagaaggtggatgtgtttgaatttgtgtctcgaatccgtaatcagcgccctcagatggttcaaacggatatgcagtacacgttcatctaccaagccttactcgagtactacctctacggggacacagagctggacgtgtcctccctggagaagcacctgcagaccatgcacggcaccaccacccacttcgacaagatcgggctggaggaggagttcaggaaattgacaaatgtccggatcatgaaggagaacatgaggacgggcaacttgccggcaaacatgaagaaggccagggtcatccagatcatcccgtatgacttcaaccgagtgatcctttccatgaaaaggggtcaagaatacacagactacatcaacgcatccttcatagacggctaccgacagaaggactatttcatcgccacccaggggccactggcacacacggttgaggacttctggaggatgatctgggaatggaaatcccacactatcgtgatgctgacggaggtgcaggagagagagcaggataaatgctaccagtattggccaaccgagggctcagttactcatggagaaataacgattgagataaagaatgataccctttcagaagccatcagtatacgagactttctggtcactctcaatcagccccaggcccgccaggaggagcaggtccgagtagtgcgccagtttcacttccacggctggcctgagatcgggattcccgccgagggcaaaggcatgattgacctcatcgcagccgtgcagaagcagcagcagcagacaggcaaccaccccatcaccgtgcactgcagtgccggagctgggcgaacaggtacattcatagccctcagcaacattttggagcgagtaaaagccgagggacttttagatgtatttcaagctgtgaagagtttacgacttcagagaccacatatggtgcaaaccctggaacagtatgaattctgctacaaagtggtacaagattttattgatatattttctgattatgctaatttcaaatgaagattcctgccttaaaatattttttaatttaatggtcagtatattttgtaaaaatcatgttaatttatttcatagttgacattaatatcttccctaatttctttgtatatattttgttatgccttaaaggccacctgctatacagttgttaaatcttaaatatgctttttaaaaattggaataatgtattaaggtcaaataatatcccataaaatatatatttctgctaatattagtaaatatcttaatttttcattagattcatatcatttaatttcacatattcaacacctttaaatgttgtaatcttaatatgcgaagtgtgcctctgcaagatactaacacaaagctcatgttaagaaaacagttgaggactcggaagtcagttgaaaatgcactttcctaacagtgaattcacaaccctgaacagcagcatttttggaaggcaaactgttcgtgatggtacaatgtaaatggggacttctgtaaagttctcagtttcggtccatgtggtttatctttacattttaaagatcaaagaagtctttacaacctgaatccaggtctaaaacacactagagtagctggtgactataaataatattttaaaatgctgtgtctacaccatcaagactgtgtctacactatcttggctgaacgagaagagatgtaaatgctgggtggtcccgttgacccacggcgttgggtacaacaaaaccagccatcggagttacaccccaaagcaccatttgctgtccagctgcctgtcgtttggcccagaccaccctcagaaaaaaaccagctgcctctcccattctcccctcccgttctgccacagcggcctgggctggtccagtgctatgcctggaggctcaacacaaaacttcccatccaaacattcagatgaactgagcgtcttacacacgcagtacagaggagcacacattaggatagaaacagtagaataaccacgggcaattaaactttaaattttctgagcagcattttggtatttaaacatttcttgtaaaaagctgagacagtttgtaagaaaagaatccttaaaatctagatttataccattttttaaagtcccacctttcaatgtttaataaaacaaaaagagaaatccttaatctaaaagctaaattatttttgaatggaaatactactgagaccattgacactggataacagtaatgatcccattaccagataagattgactgacggggaaaaaaaaaaaaaagaatggggtgtgaatgtaccaacactgaatcttacagcagttatctttctatggccattaggtacctagcagatgtgcacaatataaacaaaaagatatctggcctaccttactactaaaagcatttaacacgtgcatttttggtacttttttttttgttttctaaaagctacataaaggccttatttgacattttcactgataactgatcgcaccctcatgttgcagtgttcgtcccctattcattaacagtgtgtgcaaatgcaaccccaggacacattattgttctgatagatgctcacagggaatcaagcttctcgcccactccacggctctgagccccatccaagggcaagacttggtgcccagctggaaggacgaaagcacactttgtgaccgccatcctcaccagctgcatgcctgggctgcacactgctgaacgtgctcctctctccttctctgtacaatgattcagcatctcggcggaagaggaaaatggagctttttgaggctcgccaggtcccttttgttttcaccattaaaattccaaacccaaagcctttgtttgactgaaggagaagagagggaagtaagcttctgttcagcacctgaaccctagaaaaagagccagtttgctacgatgaaggtgacatttctctggtcatttatttgagagttcgaagtcaaagtcgaggggcaccggctttggttcatgtctaggagccctctgtcagaatccttgaagccctttaatggtctaactggcatctcttgtatcaagaagtacctttaaggtagaccttttcagggtgccctcaggaaagggccctgctcatgtttttttcctgtccccttagaccaaccccaggtgtccactgcaggggttctgcctgttcccaaactttttccattccaggaacaaaggagaagccactttccccaggacgcaggactctcccctccactgtccgggacagcgttcgccctttagcggggaggtcattacagcctcatggcctctaccaaggccccagatcacaggatctcctgggccttggagcacctcacgctgggggaatcaatccctgagggactcagaatcttctccgtgcaacctggaaagttcatctcttgtttccttcagtcaaagaaagtccattgtacataacaaaacagcccccaaacagcccagtgccgacaccattgttcctttcacactttcctttgttgcatgcagttgggttcaaatgccaaatagtgattagaagacgaccattctgatctgtgtgtgatctggtcactatgtgactgcctttacggtttctctccatgtgctatatgaatgaagaatgcataccagtgttttaaaaggtatttttatgtgtttttaaacacttttttaaatgagcctgacacctgtgtttcagcatttggagacatccccatgttattcttttaagtgtataattactgatacttttttgtttgtttgtttaactaagttgtgtttaacttatgtgcagtctttataatgtatgtatgttattacagtttcaactatcatattttctttgattacatttataatttgatcttgctctgattataatgccagtgaatgttgctgaactctttgtatatgcaaattgcaagatttaaaccattctgatgcaaggataaacctttactttgactacca

SEQ ID NO: 428551 - DNA, 4908 bp, Homo sapiens
tgggcccagtgcagggttcataaaatacagcccttgcactgccaggggcctggcacattctgctattcttgctatgtaatgacccagcagcccccatcctggatgctgaaatcctacccttgtcgtcatgccacagctgagacagtcagtgttcaccaaagcaggtgcattctctctcaggacactagtgttctccatgggaacgctgaggaagaacatctctgccatccctggtgtcgctgtgaagctgcttttgcccttcccaggagctgacactgcagatgaagagacagcactgtgatttctggaagagacagcactgtgattcctggtcctaatatcttggctttgtttgggttttttttccagatgaccattctagggtgattctgagccaactggatggaattccctgttcagactacatcaatgcttcctacatagatggttacaaagagaagaataaattcatagcagctcaaggtcccaaacaggaaacggttaacgacttctggagaatggtctgggagcaaaagtctgcgaccatcgtcatgttaacaaacttgaaagaaaggaaagaggaaaagtgccatcagtactggcccgaccaaggctgctggacctatggaaacatccgggtgtgcgtggaggactgcgtggttttggtcgactacaccatccggaagttctgcatacagccacagctccccgacggctgcaaagcccccaggctggtctcacagctgcacttcaccagctggcccgacttcggagtgccttttacccccattgggatgctgaagttcctcaagaaagtaaagacgctcaaccccgtgcacgctgggcccatcgtggtccactgtagcgcgggcgtgggccggacgggcaccttcattgtgatcgatgccatgatggccatgatgcacgcggagcagaaggtggatgtgtttgaatttgtgtctcgaatccgtaatcagcgccctcagatggttcaaacggatatgcagtacacgttcatctaccaagccttactcgagtactacctctacggggacacagagctggacgtgtcctccctggagaagcacctgcagaccatgcacggcaccaccacccacttcgacaagatcgggctggaggaggagttcaggaaattgacaaatgtccggatcatgaaggagaacatgaggacgggcaacttgccggcaaacatgaagaaggccagggtcatccagatcatcccgtatgacttcaaccgagtgatcctttccatgaaaaggggtcaagaatacacagactacatcaacgcatccttcatagacggctaccgacagaaggactatttcatcgccacccaggggccactggcacacacggttgaggacttctggaggatgatctgggaatggaaatcccacactatcgtgatgctgacggaggtgcaggagagagagcaggataaatgctaccagtattggccaaccgagggctcagttactcatggagaaataacgattgagataaagaatgataccctttcagaagccatcagtatacgagactttctggtcactctcaatcagccccaggcccgccaggaggagcaggtccgagtagtgcgccagtttcacttccacggctggcctgagatcgggattcccgccgagggcaaaggcatgattgacctcatcgcagccgtgcagaagcagcagcagcagacaggcaaccaccccatcaccgtgcactgcagtgccggagctgggcgaacaggtacattcatagccctcagcaacattttggagcgagtaaaagccgagggacttttagatgtatttcaagctgtgaagagtttacgacttcagagaccacatatggtgcaaaccctggaacagtatgaattctgctacaaagtggtacaagattttattgatatattttctgattatgctaatttcaaatgaagattcctgccttaaaatattttttaatttaatggtcagtatattttgtaaaaatcatgttaatttatttcatagttgacattaatatcttccctaatttctttgtatatattttgttatgccttaaaggccacctgctatacagttgttaaatcttaaatatgctttttaaaaattggaataatgtattaaggtcaaataatatcccataaaatatatatttctgctaatattagtaaatatcttaatttttcattagattcatatcatttaatttcacatattcaacacctttaaatgttgtaatcttaatatgcgaagtgtgcctctgcaagatactaacacaaagctcatgttaagaaaacagttgaggactcggaagtcagttgaaaatgcactttcctaacagtgaattcacaaccctgaacagcagcatttttggaaggcaaactgttcgtgatggtacaatgtaaatggggacttctgtaaagttctcagtttcggtccatgtggtttatctttacattttaaagatcaaagaagtctttacaacctgaatccaggtctaaaacacactagagtagctggtgactataaataatattttaaaatgctgtgtctacaccatcaagactgtgtctacactatcttggctgaacgagaagagatgtaaatgctgggtggtcccgttgacccacggcgttgggtacaacaaaaccagccatcggagttacaccccaaagcaccatttgctgtccagctgcctgtcgtttggcccagaccaccctcagaaaaaaaccagctgcctctcccattctcccctcccgttctgccacagcggcctgggctggtccagtgctatgcctggaggctcaacacaaaacttcccatccaaacattcagatgaactgagcgtcttacacacgcagtacagaggagcacacattaggatagaaacagtagaataaccacgggcaattaaactttaaattttctgagcagcattttggtatttaaacatttcttgtaaaaagctgagacagtttgtaagaaaagaatccttaaaatctagatttataccattttttaaagtcccacctttcaatgtttaataaaacaaaaagagaaatccttaatctaaaagctaaattatttttgaatggaaatactactgagaccattgacactggataacagtaatgatcccattaccagataagattgactgacggggaaaaaaaaaaaaaagaatggggtgtgaatgtaccaacactgaatcttacagcagttatctttctatggccattaggtacctagcagatgtgcacaatataaacaaaaagatatctggcctaccttactactaaaagcatttaacacgtgcatttttggtacttttttttttgttttctaaaagctacataaaggccttatttgacattttcactgataactgatcgcaccctcatgttgcagtgttcgtcccctattcattaacagtgtgtgcaaatgcaaccccaggacacattattgttctgatagatgctcacagggaatcaagcttctcgcccactccacggctctgagccccatccaagggcaagacttggtgcccagctggaaggacgaaagcacactttgtgaccgccatcctcaccagctgcatgcctgggctgcacactgctgaacgtgctcctctctccttctctgtacaatgattcagcatctcggcggaagaggaaaatggagctttttgaggctcgccaggtcccttttgttttcaccattaaaattccaaacccaaagcctttgtttgactgaaggagaagagagggaagtaagcttctgttcagcacctgaaccctagaaaaagagccagtttgctacgatgaaggtgacatttctctggtcatttatttgagagttcgaagtcaaagtcgaggggcaccggctttggttcatgtctaggagccctctgtcagaatccttgaagccctttaatggtctaactggcatctcttgtatcaagaagtacctttaaggtagaccttttcagggtgccctcaggaaagggccctgctcatgtttttttcctgtccccttagaccaaccccaggtgtccactgcaggggttctgcctgttcccaaactttttccattccaggaacaaaggagaagccactttccccaggacgcaggactctcccctccactgtccgggacagcgttcgccctttagcggggaggtcattacagcctcatggcctctaccaaggccccagatcacaggatctcctgggccttggagcacctcacgctgggggaatcaatccctgagggactcagaatcttctccgtgcaacctggaaagttcatctcttgtttccttcagtcaaagaaagtccattgtacataacaaaacagcccccaaacagcccagtgccgacaccattgttcctttcacactttcctttgttgcatgcagttgggttcaaatgccaaatagtgattagaagacgaccattctgatctgtgtgtgatctggtcactatgtgactgcctttacggtttctctccatgtgctatatgaatgaagaatgcataccagtgttttaaaaggtatttttatgtgtttttaaacacttttttaaatgagcctgacacctgtgtttcagcatttggagacatccccatgttattcttttaagtgtataattactgatacttttttgtttgtttgtttaactaagttgtgtttaacttatgtgcagtctttataatgtatgtatgttattacagtttcaactatcatattttctttgattacatttataatttgatcttgctctgattataatgccagtgaatgttgctgaactctttgtatatgcaaattgcaagatttaaaccattctgatgcaaggataaacctttactttgactacca

SEQ ID NO: 428552 - DNA, 4535 bp, Homo sapiens
agaagggagtgaacagctgtccaggggccaacggccagggtgccggggctgggaccccaaagggacttcccttcatgccttttgacttcgaaattgtcctctacacacaggtcccaaacaggaaacggttaacgacttctggagaatggtctgggagcaaaagtctgcgaccatcgtcatgttaacaaacttgaaagaaaggaaagaggaaaagtgccatcagtactggcccgaccaaggctgctggacctatggaaacatccgggtgtgcgtggaggactgcgtggttttggtcgactacaccatccggaagttctgcatacagccacagctccccgacggctgcaaagcccccaggctggtctcacagctgcacttcaccagctggcccgacttcggagtgccttttacccccattgggatgctgaagttcctcaagaaagtaaagacgctcaaccccgtgcacgctgggcccatcgtggtccactgtagcgcgggcgtgggccggacgggcaccttcattgtgatcgatgccatgatggccatgatgcacgcggagcagaaggtggatgtgtttgaatttgtgtctcgaatccgtaatcagcgccctcagatggttcaaacggatatgcagtacacgttcatctaccaagccttactcgagtactacctctacggggacacagagctggacgtgtcctccctggagaagcacctgcagaccatgcacggcaccaccacccacttcgacaagatcgggctggaggaggagttcaggaaattgacaaatgtccggatcatgaaggagaacatgaggacgggcaacttgccggcaaacatgaagaaggccagggtcatccagatcatcccgtatgacttcaaccgagtgatcctttccatgaaaaggggtcaagaatacacagactacatcaacgcatccttcatagacggctaccgacagaaggactatttcatcgccacccaggggccactggcacacacggttgaggacttctggaggatgatctgggaatggaaatcccacactatcgtgatgctgacggaggtgcaggagagagagcaggataaatgctaccagtattggccaaccgagggctcagttactcatggagaaataacgattgagataaagaatgataccctttcagaagccatcagtatacgagactttctggtcactctcaatcagccccaggcccgccaggaggagcaggtccgagtagtgcgccagtttcacttccacggctggcctgagatcgggattcccgccgagggcaaaggcatgattgacctcatcgcagccgtgcagaagcagcagcagcagacaggcaaccaccccatcaccgtgcactgcagtgccggagctgggcgaacaggtacattcatagccctcagcaacattttggagcgagtaaaagccgagggacttttagatgtatttcaagctgtgaagagtttacgacttcagagaccacatatggtgcaaaccctggaacagtatgaattctgctacaaagtggtacaagattttattgatatattttctgattatgctaatttcaaatgaagattcctgccttaaaatattttttaatttaatggtcagtatattttgtaaaaatcatgttaatttatttcatagttgacattaatatcttccctaatttctttgtatatattttgttatgccttaaaggccacctgctatacagttgttaaatcttaaatatgctttttaaaaattggaataatgtattaaggtcaaataatatcccataaaatatatatttctgctaatattagtaaatatcttaatttttcattagattcatatcatttaatttcacatattcaacacctttaaatgttgtaatcttaatatgcgaagtgtgcctctgcaagatactaacacaaagctcatgttaagaaaacagttgaggactcggaagtcagttgaaaatgcactttcctaacagtgaattcacaaccctgaacagcagcatttttggaaggcaaactgttcgtgatggtacaatgtaaatggggacttctgtaaagttctcagtttcggtccatgtggtttatctttacattttaaagatcaaagaagtctttacaacctgaatccaggtctaaaacacactagagtagctggtgactataaataatattttaaaatgctgtgtctacaccatcaagactgtgtctacactatcttggctgaacgagaagagatgtaaatgctgggtggtcccgttgacccacggcgttgggtacaacaaaaccagccatcggagttacaccccaaagcaccatttgctgtccagctgcctgtcgtttggcccagaccaccctcagaaaaaaaccagctgcctctcccattctcccctcccgttctgccacagcggcctgggctggtccagtgctatgcctggaggctcaacacaaaacttcccatccaaacattcagatgaactgagcgtcttacacacgcagtacagaggagcacacattaggatagaaacagtagaataaccacgggcaattaaactttaaattttctgagcagcattttggtatttaaacatttcttgtaaaaagctgagacagtttgtaagaaaagaatccttaaaatctagatttataccattttttaaagtcccacctttcaatgtttaataaaacaaaaagagaaatccttaatctaaaagctaaattatttttgaatggaaatactactgagaccattgacactggataacagtaatgatcccattaccagataagattgactgacggggaaaaaaaaaaaaaagaatggggtgtgaatgtaccaacactgaatcttacagcagttatctttctatggccattaggtacctagcagatgtgcacaatataaacaaaaagatatctggcctaccttactactaaaagcatttaacacgtgcatttttggtacttttttttttgttttctaaaagctacataaaggccttatttgacattttcactgataactgatcgcaccctcatgttgcagtgttcgtcccctattcattaacagtgtgtgcaaatgcaaccccaggacacattattgttctgatagatgctcacagggaatcaagcttctcgcccactccacggctctgagccccatccaagggcaagacttggtgcccagctggaaggacgaaagcacactttgtgaccgccatcctcaccagctgcatgcctgggctgcacactgctgaacgtgctcctctctccttctctgtacaatgattcagcatctcggcggaagaggaaaatggagctttttgaggctcgccaggtcccttttgttttcaccattaaaattccaaacccaaagcctttgtttgactgaaggagaagagagggaagtaagcttctgttcagcacctgaaccctagaaaaagagccagtttgctacgatgaaggtgacatttctctggtcatttatttgagagttcgaagtcaaagtcgaggggcaccggctttggttcatgtctaggagccctctgtcagaatccttgaagccctttaatggtctaactggcatctcttgtatcaagaagtacctttaaggtagaccttttcagggtgccctcaggaaagggccctgctcatgtttttttcctgtccccttagaccaaccccaggtgtccactgcaggggttctgcctgttcccaaactttttccattccaggaacaaaggagaagccactttccccaggacgcaggactctcccctccactgtccgggacagcgttcgccctttagcggggaggtcattacagcctcatggcctctaccaaggccccagatcacaggatctcctgggccttggagcacctcacgctgggggaatcaatccctgagggactcagaatcttctccgtgcaacctggaaagttcatctcttgtttccttcagtcaaagaaagtccattgtacataacaaaacagcccccaaacagcccagtgccgacaccattgttcctttcacactttcctttgttgcatgcagttgggttcaaatgccaaatagtgattagaagacgaccattctgatctgtgtgtgatctggtcactatgtgactgcctttacggtttctctccatgtgctatatgaatgaagaatgcataccagtgttttaaaaggtatttttatgtgtttttaaacacttttttaaatgagcctgacacctgtgtttcagcatttggagacatccccatgttattcttttaagtgtataattactgatacttttttgtttgtttgtttaactaagttgtgtttaacttatgtgcagtctttataatgtatgtatgttattacagtttcaactatcatattttctttgattacatttataatttgatcttgctctgattataatgccagtgaatgttgctgaactctttgtatatgcaaattgcaagatttaaaccattctgatgcaaggataaacctttactttgactacca

SEQ ID NO: 428553 - DNA, 5036 bp, Homo sapiens
tgtgcagcagagggcagctgagaggctgggtggctgggcctgggagacacacagaggccaggccttagcgcggctcagccatgagcaacaggagtagcttttcccggctcacctggtgggtatcactgtgccgagcgctgttggctctcggggaacctagaagtgtggaaacctaacgcatcctgtgtctctaaggttcaggaagcagaggaaagctgtggtcagcaccagcgacaagaagatgcccaacggaatcttggaggagcaagagcagcaaagggtgatgctgctcagcaggtcaccctcagggcccaagaagtattttcccatccccgtggagcacctggaggaggagatccgtatcagatccgccgacgactgcaagcagtttcgggaggagttcaactcattgccatctggacacatacaaggaacttttgaactggcaaataaagaagaaaacagagaaaaaaacagatatcccaacatccttcccaatgaccattctagggtgattctgagccaactggatggaattccctgttcagactacatcaatgcttcctacatagatggttacaaagagaagaataaattcatagcagctcaaggtcccaaacaggaaacggttaacgacttctggagaatggtctgggagcaaaagtctgcgaccatcgtcatgttaacaaacttgaaagaaaggaaagaggaaaagtgccatcagtactggcccgaccaaggctgctggacctatggaaacatccgggtgtgcgtggaggactgcgtggttttggtcgactacaccatccggaagttctgcatacagccacagctccccgacggctgcaaagcccccaggctggtctcacagctgcacttcaccagctggcccgacttcggagtgccttttacccccattgggatgctgaagttcctcaagaaagtaaagacgctcaaccccgtgcacgctgggcccatcgtggtccactgtagcgcgggcgtgggccggacgggcaccttcattgtgatcgatgccatgatggccatgatgcacgcggagcagaaggtggatgtgtttgaatttgtgtctcgaatccgtaatcagcgccctcagatggttcaaacggatatgcagtacacgttcatctaccaagccttactcgagtactacctctacggggacacagagctggacgtgtcctccctggagaagcacctgcagaccatgcacggcaccaccacccacttcgacaagatcgggctggaggaggagttcaggaaattgacaaatgtccggatcatgaaggagaacatgaggacgggcaacttgccggcaaacatgaagaaggccagggtcatccagatcatcccgtatgacttcaaccgagtgatcctttccatgaaaaggggtcaagaatacacagactacatcaacgcatccttcatagacggctaccgacagaaggactatttcatcgccacccaggggccactggcacacacggttgaggacttctggaggatgatctgggaatggaaatcccacactatcgtgatgctgacggaggtgcaggagagagagcaggataaatgctaccagtattggccaaccgagggctcagttactcatggagaaataacgattgagataaagaatgataccctttcagaagccatcagtatacgagactttctggtcactctcaatcagccccaggcccgccaggaggagcaggtccgagtagtgcgccagtttcacttccacggctggcctgagatcgggattcccgccgagggcaaaggcatgattgacctcatcgcagccgtgcagaagcagcagcagcagacaggcaaccaccccatcaccgtgcactgcagtgccggagctgggcgaacaggtacattcatagccctcagcaacattttggagcgagtaaaagccgagggacttttagatgtatttcaagctgtgaagagtttacgacttcagagaccacatatggtgcaaaccctggaacagtatgaattctgctacaaagtggtacaagattttattgatatattttctgattatgctaatttcaaatgaagattcctgccttaaaatattttttaatttaatggtcagtatattttgtaaaaatcatgttaatttatttcatagttgacattaatatcttccctaatttctttgtatatattttgttatgccttaaaggccacctgctatacagttgttaaatcttaaatatgctttttaaaaattggaataatgtattaaggtcaaataatatcccataaaatatatatttctgctaatattagtaaatatcttaatttttcattagattcatatcatttaatttcacatattcaacacctttaaatgttgtaatcttaatatgcgaagtgtgcctctgcaagatactaacacaaagctcatgttaagaaaacagttgaggactcggaagtcagttgaaaatgcactttcctaacagtgaattcacaaccctgaacagcagcatttttggaaggcaaactgttcgtgatggtacaatgtaaatggggacttctgtaaagttctcagtttcggtccatgtggtttatctttacattttaaagatcaaagaagtctttacaacctgaatccaggtctaaaacacactagagtagctggtgactataaataatattttaaaatgctgtgtctacaccatcaagactgtgtctacactatcttggctgaacgagaagagatgtaaatgctgggtggtcccgttgacccacggcgttgggtacaacaaaaccagccatcggagttacaccccaaagcaccatttgctgtccagctgcctgtcgtttggcccagaccaccctcagaaaaaaaccagctgcctctcccattctcccctcccgttctgccacagcggcctgggctggtccagtgctatgcctggaggctcaacacaaaacttcccatccaaacattcagatgaactgagcgtcttacacacgcagtacagaggagcacacattaggatagaaacagtagaataaccacgggcaattaaactttaaattttctgagcagcattttggtatttaaacatttcttgtaaaaagctgagacagtttgtaagaaaagaatccttaaaatctagatttataccattttttaaagtcccacctttcaatgtttaataaaacaaaaagagaaatccttaatctaaaagctaaattatttttgaatggaaatactactgagaccattgacactggataacagtaatgatcccattaccagataagattgactgacggggaaaaaaaaaaaaaagaatggggtgtgaatgtaccaacactgaatcttacagcagttatctttctatggccattaggtacctagcagatgtgcacaatataaacaaaaagatatctggcctaccttactactaaaagcatttaacacgtgcatttttggtacttttttttttgttttctaaaagctacataaaggccttatttgacattttcactgataactgatcgcaccctcatgttgcagtgttcgtcccctattcattaacagtgtgtgcaaatgcaaccccaggacacattattgttctgatagatgctcacagggaatcaagcttctcgcccactccacggctctgagccccatccaagggcaagacttggtgcccagctggaaggacgaaagcacactttgtgaccgccatcctcaccagctgcatgcctgggctgcacactgctgaacgtgctcctctctccttctctgtacaatgattcagcatctcggcggaagaggaaaatggagctttttgaggctcgccaggtcccttttgttttcaccattaaaattccaaacccaaagcctttgtttgactgaaggagaagagagggaagtaagcttctgttcagcacctgaaccctagaaaaagagccagtttgctacgatgaaggtgacatttctctggtcatttatttgagagttcgaagtcaaagtcgaggggcaccggctttggttcatgtctaggagccctctgtcagaatccttgaagccctttaatggtctaactggcatctcttgtatcaagaagtacctttaaggtagaccttttcagggtgccctcaggaaagggccctgctcatgtttttttcctgtccccttagaccaaccccaggtgtccactgcaggggttctgcctgttcccaaactttttccattccaggaacaaaggagaagccactttccccaggacgcaggactctcccctccactgtccgggacagcgttcgccctttagcggggaggtcattacagcctcatggcctctaccaaggccccagatcacaggatctcctgggccttggagcacctcacgctgggggaatcaatccctgagggactcagaatcttctccgtgcaacctggaaagttcatctcttgtttccttcagtcaaagaaagtccattgtacataacaaaacagcccccaaacagcccagtgccgacaccattgttcctttcacactttcctttgttgcatgcagttgggttcaaatgccaaatagtgattagaagacgaccattctgatctgtgtgtgatctggtcactatgtgactgcctttacggtttctctccatgtgctatatgaatgaagaatgcataccagtgttttaaaaggtatttttatgtgtttttaaacacttttttaaatgagcctgacacctgtgtttcagcatttggagacatccccatgttattcttttaagtgtataattactgatacttttttgtttgtttgtttaactaagttgtgtttaacttatgtgcagtctttataatgtatgtatgttattacagtttcaactatcatattttctttgattacatttataatttgatcttgctctgattataatgccagtgaatgttgctgaactctttgtatatgcaaattgcaagatttaaaccattctgatgcaaggataaacctttactttgactacca

SEQ ID NO: 428554 - DNA, 5389 bp, Homo sapiens
agccacagccggagctggagccgaggcggcggcgggacgcggccggccggacaaatttcctgctaggctgcggacagcgggcggcaggagccggcgcgagcggcttcaggaacccacggcctctgcgcgtccccgcgacccttcttcgcgcccggcgaagacagccgggcgccccggagggcggcgggcaggcgcccgggagatgcggagcctccgctgcagcgcgatctgcgcgaccagaccggcccccccgagactatagccttcactttccctcggtccaccatggagcccttgtgtccactcctgctggtgggttttagcttgccgctcgccagggctctcaggggcaacgagaccactgccgacagcaacgagacaaccacgacctcaggccctccggacccgggcgcctcccagccgctgctggcctggctgctactgccgctgctgctcctcctcctcgtgctccttctcgccgcctacttcttcaggttcaggaagcagaggaaagctgtggtcagcaccagcgacaagaagatgcccaacggaatcttggaggagcaagagcagcaaagggtgatgctgctcagcaggtcaccctcagggcccaagaagtattttcccatccccgtggagcacctggaggaggagatccgtatcagatccgccgacgactgcaagcagtttcgggaggagttcaactcattgccatctggacacatacaaggaacttttgaactggcaaataaagaagaaaacagagaaaaaaacagatatcccaacatccttcccaatgaccattctagggtgattctgagccaactggatggaattccctgttcagactacatcaatgcttcctacatagatggttacaaagagaagaataaattcatagcagctcaaggtcccaaacaggaaacggttaacgacttctggagaatggtctgggagcaaaagtctgcgaccatcgtcatgttaacaaacttgaaagaaaggaaagaggaaaagtgccatcagtactggcccgaccaaggctgctggacctatggaaacatccgggtgtgcgtggaggactgcgtggttttggtcgactacaccatccggaagttctgcatacagccacagctccccgacggctgcaaagcccccaggctggtctcacagctgcacttcaccagctggcccgacttcggagtgccttttacccccattgggatgctgaagttcctcaagaaagtaaagacgctcaaccccgtgcacgctgggcccatcgtggtccactgtagcgcgggcgtgggccggacgggcaccttcattgtgatcgatgccatgatggccatgatgcacgcggagcagaaggtggatgtgtttgaatttgtgtctcgaatccgtaatcagcgccctcagatggttcaaacggatatgcagtacacgttcatctaccaagccttactcgagtactacctctacggggacacagagctggacgtgtcctccctggagaagcacctgcagaccatgcacggcaccaccacccacttcgacaagatcgggctggaggaggagttcaggaaattgacaaatgtccggatcatgaaggagaacatgaggacgggcaacttgccggcaaacatgaagaaggccagggtcatccagatcatcccgtatgacttcaaccgagtgatcctttccatgaaaaggggtcaagaatacacagactacatcaacgcatccttcatagacggctaccgacagaaggactatttcatcgccacccaggggccactggcacacacggttgaggacttctggaggatgatctgggaatggaaatcccacactatcgtgatgctgacggaggtgcaggagagagagcaggataaatgctaccagtattggccaaccgagggctcagttactcatggagaaataacgattgagataaagaatgataccctttcagaagccatcagtatacgagactttctggtcactctcaatcagccccaggcccgccaggaggagcaggtccgagtagtgcgccagtttcacttccacggctggcctgagatcgggattcccgccgagggcaaaggcatgattgacctcatcgcagccgtgcagaagcagcagcagcagacaggcaaccaccccatcaccgtgcactgcagtgccggagctgggcgaacaggtacattcatagccctcagcaacattttggagcgagtaaaagccgagggacttttagatgtatttcaagctgtgaagagtttacgacttcagagaccacatatggtgcaaaccctggaacagtatgaattctgctacaaagtggtacaagattttattgatatattttctgattatgctaatttcaaatgaagattcctgccttaaaatattttttaatttaatggtcagtatattttgtaaaaatcatgttaatttatttcatagttgacattaatatcttccctaatttctttgtatatattttgttatgccttaaaggccacctgctatacagttgttaaatcttaaatatgctttttaaaaattggaataatgtattaaggtcaaataatatcccataaaatatatatttctgctaatattagtaaatatcttaatttttcattagattcatatcatttaatttcacatattcaacacctttaaatgttgtaatcttaatatgcgaagtgtgcctctgcaagatactaacacaaagctcatgttaagaaaacagttgaggactcggaagtcagttgaaaatgcactttcctaacagtgaattcacaaccctgaacagcagcatttttggaaggcaaactgttcgtgatggtacaatgtaaatggggacttctgtaaagttctcagtttcggtccatgtggtttatctttacattttaaagatcaaagaagtctttacaacctgaatccaggtctaaaacacactagagtagctggtgactataaataatattttaaaatgctgtgtctacaccatcaagactgtgtctacactatcttggctgaacgagaagagatgtaaatgctgggtggtcccgttgacccacggcgttgggtacaacaaaaccagccatcggagttacaccccaaagcaccatttgctgtccagctgcctgtcgtttggcccagaccaccctcagaaaaaaaccagctgcctctcccattctcccctcccgttctgccacagcggcctgggctggtccagtgctatgcctggaggctcaacacaaaacttcccatccaaacattcagatgaactgagcgtcttacacacgcagtacagaggagcacacattaggatagaaacagtagaataaccacgggcaattaaactttaaattttctgagcagcattttggtatttaaacatttcttgtaaaaagctgagacagtttgtaagaaaagaatccttaaaatctagatttataccattttttaaagtcccacctttcaatgtttaataaaacaaaaagagaaatccttaatctaaaagctaaattatttttgaatggaaatactactgagaccattgacactggataacagtaatgatcccattaccagataagattgactgacggggaaaaaaaaaaaaaagaatggggtgtgaatgtaccaacactgaatcttacagcagttatctttctatggccattaggtacctagcagatgtgcacaatataaacaaaaagatatctggcctaccttactactaaaagcatttaacacgtgcatttttggtacttttttttttgttttctaaaagctacataaaggccttatttgacattttcactgataactgatcgcaccctcatgttgcagtgttcgtcccctattcattaacagtgtgtgcaaatgcaaccccaggacacattattgttctgatagatgctcacagggaatcaagcttctcgcccactccacggctctgagccccatccaagggcaagacttggtgcccagctggaaggacgaaagcacactttgtgaccgccatcctcaccagctgcatgcctgggctgcacactgctgaacgtgctcctctctccttctctgtacaatgattcagcatctcggcggaagaggaaaatggagctttttgaggctcgccaggtcccttttgttttcaccattaaaattccaaacccaaagcctttgtttgactgaaggagaagagagggaagtaagcttctgttcagcacctgaaccctagaaaaagagccagtttgctacgatgaaggtgacatttctctggtcatttatttgagagttcgaagtcaaagtcgaggggcaccggctttggttcatgtctaggagccctctgtcagaatccttgaagccctttaatggtctaactggcatctcttgtatcaagaagtacctttaaggtagaccttttcagggtgccctcaggaaagggccctgctcatgtttttttcctgtccccttagaccaaccccaggtgtccactgcaggggttctgcctgttcccaaactttttccattccaggaacaaaggagaagccactttccccaggacgcaggactctcccctccactgtccgggacagcgttcgccctttagcggggaggtcattacagcctcatggcctctaccaaggccccagatcacaggatctcctgggccttggagcacctcacgctgggggaatcaatccctgagggactcagaatcttctccgtgcaacctggaaagttcatctcttgtttccttcagtcaaagaaagtccattgtacataacaaaacagcccccaaacagcccagtgccgacaccattgttcctttcacactttcctttgttgcatgcagttgggttcaaatgccaaatagtgattagaagacgaccattctgatctgtgtgtgatctggtcactatgtgactgcctttacggtttctctccatgtgctatatgaatgaagaatgcataccagtgttttaaaaggtatttttatgtgtttttaaacacttttttaaatgagcctgacacctgtgtttcagcatttggagacatccccatgttattcttttaagtgtataattactgatacttttttgtttgtttgtttaactaagttgtgtttaacttatgtgcagtctttataatgtatgtatgttattacagtttcaactatcatattttctttgattacatttataatttgatcttgctctgattataatgccagtgaatgttgctgaactctttgtatatgcaaattgcaagatttaaaccattctgatgcaaggataaacctttactttgactaccagcctgtgtttttgtctttaaatctcttaatttcattcctctgcaaaaaaaaaaa

SEQ ID NO: 428555 - DNA, 2618 bp, Homo sapiens
tctcagttcctactggagagccttcaaggaaaagtgccatcagtactggcccgaccaaggctgctggacctatggaaacatccgggtgtgcgtggaggactgcgtggttttggaaggcaaactgttcgtgatggtacaatgtaaatggggacttctgtaaagttctcagtttcggtccatgtggtttatctttacattttaaagatcaaagaagtctttacaacctgaatccaggtctaaaacacactagagtagctggtgactataaataatattttaaaatgctgtgtctacaccatcaagactgtgtctacactatcttggctgaacgagaagagatgtaaatgctgggtggtcccgttgacccacggcgttgggtacaacaaaaccagccatcggagttacaccccaaagcaccatttgctgtccagctgcctgtcgtttggcccagaccaccctcagaaaaaaaccagctgcctctcccattctcccctcccgttctgccacagcggcctgggctggtccagtgctatgcctggaggctcaacacaaaacttcccatccaaacattcagatgaactgagcgtcttacacacgcagtacagaggagcacacattaggatagaaacagtagaataaccacgggcaattaaactttaaattttctgagcagcattttggtatttaaacatttcttgtaaaaagctgagacagtttgtaagaaaagaatccttaaaatctagatttataccattttttaaagtcccacctttcaatgtttaataaaacaaaaagagaaatccttaatctaaaagctaaattatttttgaatggaaatactactgagaccattgacactggataacagtaatgatcccattaccagataagattgactgacggggaaaaaaaaaaaaaagaatggggtgtgaatgtaccaacactgaatcttacagcagttatctttctatggccattaggtacctagcagatgtgcacaatataaacaaaaagatatctggcctaccttactactaaaagcatttaacacgtgcatttttggtacttttttttttgttttctaaaagctacataaaggccttatttgacattttcactgataactgatcgcaccctcatgttgcagtgttcgtcccctattcattaacagtgtgtgcaaatgcaaccccaggacacattattgttctgatagatgctcacagggaatcaagcttctcgcccactccacggctctgagccccatccaagggcaagacttggtgcccagctggaaggacgaaagcacactttgtgaccgccatcctcaccagctgcatgcctgggctgcacactgctgaacgtgctcctctctccttctctgtacaatgattcagcatctcggcggaagaggaaaatggagctttttgaggctcgccaggtcccttttgttttcaccattaaaattccaaacccaaagcctttgtttgactgaaggagaagagagggaagtaagcttctgttcagcacctgaaccctagaaaaagagccagtttgctacgatgaaggtgacatttctctggtcatttatttgagagttcgaagtcaaagtcgaggggcaccggctttggttcatgtctaggagccctctgtcagaatccttgaagccctttaatggtctaactggcatctcttgtatcaagaagtacctttaaggtagaccttttcagggtgccctcaggaaagggccctgctcatgtttttttcctgtccccttagaccaaccccaggtgtccactgcaggggttctgcctgttcccaaactttttccattccaggaacaaaggagaagccactttccccaggacgcaggactctcccctccactgtccgggacagcgttcgccctttagcggggaggtcattacagcctcatggcctctaccaaggccccagatcacaggatctcctgggccttggagcacctcacgctgggggaatcaatccctgagggactcagaatcttctccgtgcaacctggaaagttcatctcttgtttccttcagtcaaagaaagtccattgtacataacaaaacagcccccaaacagcccagtgccgacaccattgttcctttcacactttcctttgttgcatgcagttgggttcaaatgccaaatagtgattagaagacgaccattctgatctgtgtgtgatctggtcactatgtgactgcctttacggtttctctccatgtgctatatgaatgaagaatgcataccagtgttttaaaaggtatttttatgtgtttttaaacacttttttaaatgagcctgacacctgtgtttcagcatttggagacatccccatgttattcttttaagtgtataattactgatacttttttgtttgtttgtttaactaagttgtgtttaacttatgtgcagtctttataatgtatgtatgttattacagtttcaactatcatattttctttgattacatttataatttgatcttgctctgattataatgccagtgaatgttgctgaactctttgtatatgcaaattgcaagatttaaaccattctgatgcaaggataaacctttactttgactacca

SEQ ID NO: 428556 - DNA, 2641 bp, Homo sapiens
agccacagccggagctggagccgaggcggcggcgggacgcggccggccggacaaatttcctgctaggctgcggacagcgggcggcaggagccggcgcgagcggcttcaggaacccacggcctctgcgcgtccccgcgacccttcttcgcgcccggcgaagacagccgggcgccccggagggcggcgggcaggcgcccgggagatgcggagcctccgctgcagcgcgatctgcgcgaccagaccggcccccccgagactatagccttcactttccctcggtccaccatggagcccttgtgtccactcctgctggtgggttttagcttgccgctcgccagggctctcaggggcaacgagaccactgccgacagcaacgagacaaccacgacctcaggccctccggacccgggcgcctcccagccgctgctggcctggctgctactgccgctgctgctcctcctcctcgtgctccttctcgccgcctacttcttcaggttcaggaagcagaggaaagctgtggtcagcaccagcgacaagaagatgcccaacggaatcttggaggagcaagagcagcaaagggtgatgctgctcagcaggtcaccctcagggcccaagaagtattttcccatccccgtggagcacctggaggaggagatccgtatcagatccgccgacgactgcaagcagtttcgggaggagttcaactcattgccatctggacacatacaaggaacttttgaactggcaaataaagaagaaaacagagaaaaaaacagatatcccaacatccttcccaatgaccattctagggtgattctgagccaactggatggaattccctgttcagactacatcaatgcttcctacatagatggttacaaagagaagaataaattcatagcagctcaaggtcccaaacaggaaacggttaacgacttctggagaatggtctgggagcaaaagtctgcgaccatcgtcatgttaacaaacttgaaagaaaggaaagaggaaaagtgccatcagtactggcccgaccaaggctgctggacctatggaaacatccgggtgtgcgtggaggactgcgtggttttggtcgactacaccatccggaagttctgcatacagccacagctccccgacggctgcaaagcccccaggctggtctcacagctgcacttcaccagctggcccgacttcggagtgccttttacccccattgggatgctgaagttcctcaagaaagtaaagacgctcaaccccgtgcacgctgggcccatcgtggtccactgtagcgcgggcgtgggccggacgggcaccttcattgtgatcgatgccatgatggccatgatgcacgcggagcagaaggtggatgtgtttgaatttgtgtctcgaatccgtaatcagcgccctcagatggttcaaacggatatgcagtacacgttcatctaccaagccttactcgagtactacctctacggggacacagagctggacgtgtcctccctggagaagcacctgcagaccatgcacggcaccaccacccacttcgacaagatcgggctggaggaggagttcaggaaattgacaaatgtccggatcatgaaggagaacatgaggacgggcaacttgccggcaaacatgaagaaggccagggtcatccagatcatcccgtatgacttcaaccgagtgatcctttccatgaaaaggggtcaagaatacacagactacatcaacgcatccttcatagacggctaccgacagaaggactatttcatcgccacccaggggccactggcacacacggttgaggacttctggaggatgatctgggaatggaaatcccacactatcgtgatgctgacggaggtgcaggagagagagcaggataaatgctaccagtattggccaaccgagggctcagttactcatggagaaataacgattgagataaagaatgataccctttcagaagccatcagtatacgagactttctggtcactctcaatcagccccaggcccgccaggaggagcaggtccgagtagtgcgccagtttcacttccacggctggcctgagatcgggattcccgccgagggcaaaggcatgattgacctcatcgcagccgtgcagaagcagcagcagcagacaggcaaccaccccatcaccgtgcactgcagtgccggagctgggcgaacaggtacattcatagccctcagcaacattttggagcgagtaaaagccgagggacttttagatgtatttcaagctgtgaagagtttacgacttcagagaccacatatggtgcaaaccctggaacagtatgaattctgctacaaagtggtacaagattttattgatatattttctgattatgctaatttcaaatgaagattcctgccttaaaatattttttaatttaatggtcagtatattttgtaaaaatcatgttaatttatttcatagttgacattaatatcttccctaatttctttgtatatattttgttatgccttaaaggccacctgctatacagttgttaaatcttaaatatgctttttaaaaattggaataatgtattaaggtcaaataatatcccataaaatatatatttctgctaatattagtaaatatcttaattttt

SEQ ID NO: 428557 - DNA, 1866 bp, Homo sapiens
agccacagccggagctggagccgaggcggcggcgggacgcggccggccggacaaatttcctgctaggctgcggacagcgggcggcaggagccggcgcgagcggcttcaggaacccacggcctctgcgcgtccccgcgacccttcttcgcgcccggcgaagacagccgggcgccccggagggcggcgggcaggcgcccgggagatgcggagcctccgctgcagcgcgatctgcgcgaccagaccggcccccccgagactatagccttcactttccctcggtccaccatggagcccttgtgtccactcctgctggtgggttttagcttgccgctcgccagggctctcaggggcaacgagaccactgccgacagcaacgagacaaccacgacctcaggccctccggacccgggcgcctcccagccgctgctggcctggctgctactgccgctgctgctcctcctcctcgtgctccttctcgccgcctacttcttcaggttcaggaagcagaggaaagctgtggtcagcaccagcgacaagaagatgcccaacggaatcttggaggagcaagagcagcaaagggtgatgctgctcagcaggtcaccctcagggcccaagaagtattttcccatccccgtggagcacctggaggaggagatccgtatcagatccgccgacgactgcaagcagtttcgggaggagttcaactcattgccatctggacacatacaaggaacttttgaactggcaaataaagaagaaaacagagaaaaaaacagatatcccaacatccttcccaatgaccattctagggtgattctgagccaactggatggaattccctgttcagactacatcaatgcttcctacatagatggttacaaagagaagaataaattcatagcagctcaaggtcccaaacaggaaacggttaacgacttctggagaatggtctgggagcaaaagtctgcgaccatcgtcatgttaacaaacttgaaagaaaggaaagaggaaaagtgccatcagtactggcccgaccaaggctgctggacctatggaaacatccgggtgtgcgtggaggactgcgtggttttggtcgactacaccatccggaagttctgcatacagccacagctccccgacggctgcaaagcccccaggctggtctcacagctgcacttcaccagctggcccgacttcggagtgccttttacccccattgggatgctgaagttcctcaagaaagtaaagacgctcaaccccgtgcacgctgggcccatcgtggtccactgtagcgcgggcgtgggccggacgggcaccttcattgtgatcgatgccatgatggccatgatgcacgcggagcagaaggtggatgtgtttgaatttgtgtctcgaatccgtaatcagcgccctcagatggttcaaacggatgtgagtcatgccttcctcttgccctgatctagcttcccaaagcaaacccgatgccttcgccacacaggtgtgcagggccctggctctgatgggcacgtggcaaccagcctgggcctggcctggcttcgctccccatagccttccctgcccacgcgtgggacctcagggactccctcgtcctcatctttccctcgtatcctcatgtgagatggggcaatcctactcccccaaacggtgcatgtacacagtgcgtggcgtgctcaccaatgtgaggctctgctgctaccgttctccttactcaagggcataaatggtcgttatccgtggccggtactctgactcttgcctcacacctccttgtgttggcaaaaagagaaaaagaagaaagccgccctctttggtctgccaagctccacgtgggccaagactgcagggcag

SEQ ID NO: 428558 - DNA, 912 bp, Homo sapiens
agccacagccggagctggagccgaggcggcggcgggacgcggccggccggacaaatttcctgctaggctgcggacagcgggcggcaggagccggcgcgagcggcttcaggaacccacggcctctgcgcgtccccgcgacccttcttcgcgcccggcgaagacagccgggcgccccggagggcggcgggcaggcgcccgggagatgcggagcctccgctgcagcgcgatctgcgcgaccagaccggcccccccgagactatagccttcactttccctcggtccaccatggagcccttgtgtccactcctgctggtgggttttagcttgccgctcgccagggctctcaggggcaacgagaccactgccgacagcaacgagacaaccacgacctcaggccctccggacccgggcgcctcccagccgctgctggcctggctgctactgccgctgctgctcctcctcctcgtgctccttctcgccgcctacttcttcaggttcaggaagcagaggaaagctgtggtcagcaccagcgacaagaagatgcccaacggaatcttggaggagcaagagcagcaaagggtgatgctgctcagcaggtcaccctcagggcccaagaagtattttcccatccccgtggagcacctggaggaggagatccgtatcagatccgccgacgactgcaagcagtttcgggaggagttcaactcattgccatctggacacatacaaggaacttttgaactggcaaataaagaagaaaacagagaaaaaaacagatatcccaacatccttcccaatgaccattctagggtgattctgagccaactggatggaattccctgttcagactacatcaatgcttcctacatagatctacaaagagaagaataattcatagcagcaccacctgcg

SEQ ID NO: 428559 - DNA, 115 bp, Homo sapiens
ggggaatacaaactctgtttaagtaatgattttgaaaaaaatctctctgcaccagtgaatgccatgaacagtttcattttcagtaagcgcttgcagccagttgtctagttgtcag

SEQ ID NO: 428560 - DNA, 679 bp, Homo sapiens
gtttcaatgtgaaagccacagacatttaactcagcccattaaatacactaagttgaaatgttaatacactaactgacacattctacgtagaaaaacagctttatttggaattctgcatgtgcctaaaaactaaattacgatgtgcataaaggtatatggtattttaatgaatagtcacacttatttatgtcttgtttttgagtatttctcctgattaatcaaatatatttttgggaatatcattttaatgtgtccttgtttgtcttttcaggaacagtatgaattctgctacaaagtggtacaagattttattgatatattttctgattatgctaatttcaaatgaagattcctgccttaaaatattttttaatttaatggtcagtatattttgtaaaaatcatgttaatttatttcatagttgacattaatatcttccctaatttctttgtatatattttgttatgccttaaaggccacctgctatacagttgttaaatcttaaatatgctttttaaaaattggaataatgtattaaggtcaaataatatcccataaaatatatatttctgctaatattagtaaatatcttaatttttcattagattcatatcatttaatttcacatattcaacacctttaaatgttgtaatcttaatatgcgaagtgtgcctctgca

SEQ ID NO: 428561 - DNA, 2262 bp, Homo sapiens
tgtgcagcagagggcagctgagaggctgggtggctgggcctgggagacacacagaggccaggccttagcgcggctcagccatgagcaacaggagtagcttttcccggctcacctggttcaggaagcagaggaaagctgtggtcagcaccagcgacaagaagatgcccaacggaatcttggaggagcaagagcagcaaagggtgatgctgctcagcaggtcaccctcagggcccaagaagtattttcccatccccgtggagcacctggaggaggagatccgtatcagatccgccgacgactgcaagcagtttcgggaggagttcaactcattgccatctggacacatacaaggaacttttgaactggcaaataaagaagaaaacagagaaaaaaacagatatcccaacatccttcccaatgaccattctagggtgattctgagccaactggatggaattccctgttcagactacatcaatgcttcctacatagatggttacaaagagaagaataaattcatagcagctcaaggtcccaaacaggaaacggttaacgacttctggagaatggtctgggagcaaaagtctgcgaccatcgtcatgttaacaaacttgaaagaaaggaaagaggaaaagtgccatcagtactggcccgaccaaggctgctggacctatggaaacatccgggtgtgcgtggaggactgcgtggttttggtcgactacaccatccggaagttctgcatacagccacagctccccgacggctgcaaagcccccaggctggtctcacagctgcacttcaccagctggcccgacttcggagtgccttttacccccattgggatgctgaagttcctcaagaaagtaaagacgctcaaccccgtgcacgctgggcccatcgtggtccactgtagcgcgggcgtgggccggacgggcaccttcattgtgatcgatgccatgatggccatgatgcacgcggagcagaaggtggatgtgtttgaatttgtgtctcgaatccgtaatcagcgccctcagatggttcaaacggatatgcagtacacgttcatctaccaagccttactcgagtactacctctacggggacacagagctggacgtgtcctccctggagaagcacctgcagaccatgcacggcaccaccacccacttcgacaagatcgggctggaggaggagttcaggaaattgacaaatgtccggatcatgaaggagaacatgaggacgggcaacttgccggcaaacatgaagaaggccagggtcatccagatcatcccgtatgacttcaaccgagtgatcctttccatgaaaaggggtcaagaatacacagactacatcaacgcatccttcatagacggctaccgacagaaggactatttcatcgccacccaggggccactggcacacacggttgaggacttctggaggatgatctgggaatggaaatcccacactatcgtgatgctgacggaggtgcaggagagagagcaggataaatgctaccagtattggccaaccgagggctcagttactcatggagaaataacgattgagataaagaatgataccctttcagaagccatcagtatacgagactttctggtcactctcaatcagccccaggcccgccaggaggagcaggtccgagtagtgcgccagtttcacttccacggctggcctgagatcgggattcccgccgagggcaaaggcatgattgacctcatcgcagccgtgcagaagcagcagcagcagacaggcaaccaccccatcaccgtgcactgcagtgccggagctgggcgaacaggtacattcatagccctcagcaacattttggagcgagtaaaagccgagggacttttagatgtatttcaagctgtgaagagtttacgacttcagagaccacatatggtgcaaaccctggaacagtatgaattctgctacaaagtggtacaagattttattgatatattttctgattatgctaatttcaaatgaagattcctgccttaaaatattttttaatttaatggtcagtatattttgtaaaaatcatgttaatttatttcatagttgacattaatatcttccctaatttctttgtatatattttgttatgccttaaaggccacctgctatacagttgttaaatcttaaatatgctttttaaaaattggaataatgtattaaggtcaaataatatcccataaaatatatatttctgctaatattagtaaatatcttaattttt

SEQ ID NO: 428562 - DNA, 4956 bp, Homo sapiens
tgtgcagcagagggcagctgagaggctgggtggctgggcctgggagacacacagaggccaggccttagcgcggctcagccatgagcaacaggagtagcttttcccggctcacctggttcaggaagcagaggaaagctgtggtcagcaccagcgacaagaagatgcccaacggaatcttggaggagcaagagcagcaaagggtgatgctgctcagcaggtcaccctcagggcccaagaagtattttcccatccccgtggagcacctggaggaggagatccgtatcagatccgccgacgactgcaagcagtttcgggaggagttcaactcattgccatctggacacatacaaggaacttttgaactggcaaataaagaagaaaacagagaaaaaaacagatatcccaacatccttcccaatgaccattctagggtgattctgagccaactggatggaattccctgttcagactacatcaatgcttcctacatagatggttacaaagagaagaataaattcatagcagctcaaggtcccaaacaggaaacggttaacgacttctggagaatggtctgggagcaaaagtctgcgaccatcgtcatgttaacaaacttgaaagaaaggaaagaggaaaagtgccatcagtactggcccgaccaaggctgctggacctatggaaacatccgggtgtgcgtggaggactgcgtggttttggtcgactacaccatccggaagttctgcatacagccacagctccccgacggctgcaaagcccccaggctggtctcacagctgcacttcaccagctggcccgacttcggagtgccttttacccccattgggatgctgaagttcctcaagaaagtaaagacgctcaaccccgtgcacgctgggcccatcgtggtccactgtagcgcgggcgtgggccggacgggcaccttcattgtgatcgatgccatgatggccatgatgcacgcggagcagaaggtggatgtgtttgaatttgtgtctcgaatccgtaatcagcgccctcagatggttcaaacggatatgcagtacacgttcatctaccaagccttactcgagtactacctctacggggacacagagctggacgtgtcctccctggagaagcacctgcagaccatgcacggcaccaccacccacttcgacaagatcgggctggaggaggagttcaggaaattgacaaatgtccggatcatgaaggagaacatgaggacgggcaacttgccggcaaacatgaagaaggccagggtcatccagatcatcccgtatgacttcaaccgagtgatcctttccatgaaaaggggtcaagaatacacagactacatcaacgcatccttcatagacggctaccgacagaaggactatttcatcgccacccaggggccactggcacacacggttgaggacttctggaggatgatctgggaatggaaatcccacactatcgtgatgctgacggaggtgcaggagagagagcaggataaatgctaccagtattggccaaccgagggctcagttactcatggagaaataacgattgagataaagaatgataccctttcagaagccatcagtatacgagactttctggtcactctcaatcagccccaggcccgccaggaggagcaggtccgagtagtgcgccagtttcacttccacggctggcctgagatcgggattcccgccgagggcaaaggcatgattgacctcatcgcagccgtgcagaagcagcagcagcagacaggcaaccaccccatcaccgtgcactgcagtgccggagctgggcgaacaggtacattcatagccctcagcaacattttggagcgagtaaaagccgagggacttttagatgtatttcaagctgtgaagagtttacgacttcagagaccacatatggtgcaaaccctggaacagtatgaattctgctacaaagtggtacaagattttattgatatattttctgattatgctaatttcaaatgaagattcctgccttaaaatattttttaatttaatggtcagtatattttgtaaaaatcatgttaatttatttcatagttgacattaatatcttccctaatttctttgtatatattttgttatgccttaaaggccacctgctatacagttgttaaatcttaaatatgctttttaaaaattggaataatgtattaaggtcaaataatatcccataaaatatatatttctgctaatattagtaaatatcttaatttttcattagattcatatcatttaatttcacatattcaacacctttaaatgttgtaatcttaatatgcgaagtgtgcctctgcaagatactaacacaaagctcatgttaagaaaacagttgaggactcggaagtcagttgaaaatgcactttcctaacagtgaattcacaaccctgaacagcagcatttttggaaggcaaactgttcgtgatggtacaatgtaaatggggacttctgtaaagttctcagtttcggtccatgtggtttatctttacattttaaagatcaaagaagtctttacaacctgaatccaggtctaaaacacactagagtagctggtgactataaataatattttaaaatgctgtgtctacaccatcaagactgtgtctacactatcttggctgaacgagaagagatgtaaatgctgggtggtcccgttgacccacggcgttgggtacaacaaaaccagccatcggagttacaccccaaagcaccatttgctgtccagctgcctgtcgtttggcccagaccaccctcagaaaaaaaccagctgcctctcccattctcccctcccgttctgccacagcggcctgggctggtccagtgctatgcctggaggctcaacacaaaacttcccatccaaacattcagatgaactgagcgtcttacacacgcagtacagaggagcacacattaggatagaaacagtagaataaccacgggcaattaaactttaaattttctgagcagcattttggtatttaaacatttcttgtaaaaagctgagacagtttgtaagaaaagaatccttaaaatctagatttataccattttttaaagtcccacctttcaatgtttaataaaacaaaaagagaaatccttaatctaaaagctaaattatttttgaatggaaatactactgagaccattgacactggataacagtaatgatcccattaccagataagattgactgacggggaaaaaaaaaaaaaagaatggggtgtgaatgtaccaacactgaatcttacagcagttatctttctatggccattaggtacctagcagatgtgcacaatataaacaaaaagatatctggcctaccttactactaaaagcatttaacacgtgcatttttggtacttttttttttgttttctaaaagctacataaaggccttatttgacattttcactgataactgatcgcaccctcatgttgcagtgttcgtcccctattcattaacagtgtgtgcaaatgcaaccccaggacacattattgttctgatagatgctcacagggaatcaagcttctcgcccactccacggctctgagccccatccaagggcaagacttggtgcccagctggaaggacgaaagcacactttgtgaccgccatcctcaccagctgcatgcctgggctgcacactgctgaacgtgctcctctctccttctctgtacaatgattcagcatctcggcggaagaggaaaatggagctttttgaggctcgccaggtcccttttgttttcaccattaaaattccaaacccaaagcctttgtttgactgaaggagaagagagggaagtaagcttctgttcagcacctgaaccctagaaaaagagccagtttgctacgatgaaggtgacatttctctggtcatttatttgagagttcgaagtcaaagtcgaggggcaccggctttggttcatgtctaggagccctctgtcagaatccttgaagccctttaatggtctaactggcatctcttgtatcaagaagtacctttaaggtagaccttttcagggtgccctcaggaaagggccctgctcatgtttttttcctgtccccttagaccaaccccaggtgtccactgcaggggttctgcctgttcccaaactttttccattccaggaacaaaggagaagccactttccccaggacgcaggactctcccctccactgtccgggacagcgttcgccctttagcggggaggtcattacagcctcatggcctctaccaaggccccagatcacaggatctcctgggccttggagcacctcacgctgggggaatcaatccctgagggactcagaatcttctccgtgcaacctggaaagttcatctcttgtttccttcagtcaaagaaagtccattgtacataacaaaacagcccccaaacagcccagtgccgacaccattgttcctttcacactttcctttgttgcatgcagttgggttcaaatgccaaatagtgattagaagacgaccattctgatctgtgtgtgatctggtcactatgtgactgcctttacggtttctctccatgtgctatatgaatgaagaatgcataccagtgttttaaaaggtatttttatgtgtttttaaacacttttttaaatgagcctgacacctgtgtttcagcatttggagacatccccatgttattcttttaagtgtataattactgatacttttttgtttgtttgtttaactaagttgtgtttaacttatgtgcagtctttataatgtatgtatgttattacagtttcaactatcatattttctttgattacatttataatttgatcttgctctgattataatgccagtgaatgttgctgaactctttgtatatgcaaattgcaagatttaaaccattctgatgcaaggataaacctttactttgactacca

SEQ ID NO: 428563 - DNA, 5511 bp, Homo sapiens
agccacagccggagctggagccgaggcggcggcgggacgcggccggccggacaaatttcctgctaggctgcggacagcgggcggcaggagccggcgcgagcggcttcaggaacccacggcctctgcgcgtccccgcgacccttcttcgcgcccggcgaagacagccgggcgccccggagggcggcgggcaggcgcccgggagatgcggagcctccgctgcagcgcgatctgcgcgaccagaccggcccccccgagtaagcgcttgcagccagttgtctagttgtcagaagccgagctcatcagcgggctcctggtgtcggcgttctgctgctggaaggtcagggagttccctggaccccacggaagaagctgtctccatgaaggacagggaccgtgccgtgaaccttttattctcccactgacatgctctgagcctgtccctgcctctctgcaggtccaccatggagcccttgtgtccactcctgctggtgggttttagcttgccgctcgccagggctctcaggggcaacgagaccactgccgacagcaacgagacaaccacgacctcaggccctccggacccgggcgcctcccagccgctgctggcctggctgctactgccgctgctgctcctcctcctcgtgctccttctcgccgcctacttcttcaggttcaggaagcagaggaaagctgtggtcagcaccagcgacaagaagatgcccaacggaatcttggaggagcaagagcagcaaagggtgatgctgctcagcaggtcaccctcagggcccaagaagtattttcccatccccgtggagcacctggaggaggagatccgtatcagatccgccgacgactgcaagcagtttcgggaggagttcaactcattgccatctggacacatacaaggaacttttgaactggcaaataaagaagaaaacagagaaaaaaacagatatcccaacatccttcccaatgaccattctagggtgattctgagccaactggatggaattccctgttcagactacatcaatgcttcctacatagatggttacaaagagaagaataaattcatagcagctcaaggtcccaaacaggaaacggttaacgacttctggagaatggtctgggagcaaaagtctgcgaccatcgtcatgttaacaaacttgaaagaaaggaaagaggaaaagtgccatcagtactggcccgaccaaggctgctggacctatggaaacatccgggtgtgcgtggaggactgcgtggttttggtcgactacaccatccggaagttctgcatacagccacagctccccgacggctgcaaagcccccaggctggtctcacagctgcacttcaccagctggcccgacttcggagtgccttttacccccattgggatgctgaagttcctcaagaaagtaaagacgctcaaccccgtgcacgctgggcccatcgtggtccactgtagcgcgggcgtgggccggacgggcaccttcattgtgatcgatgccatgatggccatgatgcacgcggagcagaaggtggatgtgtttgaatttgtgtctcgaatccgtaatcagcgccctcagatggttcaaacggatatgcagtacacgttcatctaccaagccttactcgagtactacctctacggggacacagagctggacgtgtcctccctggagaagcacctgcagaccatgcacggcaccaccacccacttcgacaagatcgggctggaggaggagttcaggaaattgacaaatgtccggatcatgaaggagaacatgaggacgggcaacttgccggcaaacatgaagaaggccagggtcatccagatcatcccgtatgacttcaaccgagtgatcctttccatgaaaaggggtcaagaatacacagactacatcaacgcatccttcatagacggctaccgacagaaggactatttcatcgccacccaggggccactggcacacacggttgaggacttctggaggatgatctgggaatggaaatcccacactatcgtgatgctgacggaggtgcaggagagagagcaggataaatgctaccagtattggccaaccgagggctcagttactcatggagaaataacgattgagataaagaatgataccctttcagaagccatcagtatacgagactttctggtcactctcaatcagccccaggcccgccaggaggagcaggtccgagtagtgcgccagtttcacttccacggctggcctgagatcgggattcccgccgagggcaaaggcatgattgacctcatcgcagccgtgcagaagcagcagcagcagacaggcaaccaccccatcaccgtgcactgcagtgccggagctgggcgaacaggtacattcatagccctcagcaacattttggagcgagtaaaagccgagggacttttagatgtatttcaagctgtgaagagtttacgacttcagagaccacatatggtgcaaaccctggaacagtatgaattctgctacaaagtggtacaagattttattgatatattttctgattatgctaatttcaaatgaagattcctgccttaaaatattttttaatttaatggtcagtatattttgtaaaaatcatgttaatttatttcatagttgacattaatatcttccctaatttctttgtatatattttgttatgccttaaaggccacctgctatacagttgttaaatcttaaatatgctttttaaaaattggaataatgtattaaggtcaaataatatcccataaaatatatatttctgctaatattagtaaatatcttaatttttcattagattcatatcatttaatttcacatattcaacacctttaaatgttgtaatcttaatatgcgaagtgtgcctctgcaagatactaacacaaagctcatgttaagaaaacagttgaggactcggaagtcagttgaaaatgcactttcctaacagtgaattcacaaccctgaacagcagcatttttggaaggcaaactgttcgtgatggtacaatgtaaatggggacttctgtaaagttctcagtttcggtccatgtggtttatctttacattttaaagatcaaagaagtctttacaacctgaatccaggtctaaaacacactagagtagctggtgactataaataatattttaaaatgctgtgtctacaccatcaagactgtgtctacactatcttggctgaacgagaagagatgtaaatgctgggtggtcccgttgacccacggcgttgggtacaacaaaaccagccatcggagttacaccccaaagcaccatttgctgtccagctgcctgtcgtttggcccagaccaccctcagaaaaaaaccagctgcctctcccattctcccctcccgttctgccacagcggcctgggctggtccagtgctatgcctggaggctcaacacaaaacttcccatccaaacattcagatgaactgagcgtcttacacacgcagtacagaggagcacacattaggatagaaacagtagaataaccacgggcaattaaactttaaattttctgagcagcattttggtatttaaacatttcttgtaaaaagctgagacagtttgtaagaaaagaatccttaaaatctagatttataccattttttaaagtcccacctttcaatgtttaataaaacaaaaagagaaatccttaatctaaaagctaaattatttttgaatggaaatactactgagaccattgacactggataacagtaatgatcccattaccagataagattgactgacggggaaaaaaaaaaaaaagaatggggtgtgaatgtaccaacactgaatcttacagcagttatctttctatggccattaggtacctagcagatgtgcacaatataaacaaaaagatatctggcctaccttactactaaaagcatttaacacgtgcatttttggtacttttttttttgttttctaaaagctacataaaggccttatttgacattttcactgataactgatcgcaccctcatgttgcagtgttcgtcccctattcattaacagtgtgtgcaaatgcaaccccaggacacattattgttctgatagatgctcacagggaatcaagcttctcgcccactccacggctctgagccccatccaagggcaagacttggtgcccagctggaaggacgaaagcacactttgtgaccgccatcctcaccagctgcatgcctgggctgcacactgctgaacgtgctcctctctccttctctgtacaatgattcagcatctcggcggaagaggaaaatggagctttttgaggctcgccaggtcccttttgttttcaccattaaaattccaaacccaaagcctttgtttgactgaaggagaagagagggaagtaagcttctgttcagcacctgaaccctagaaaaagagccagtttgctacgatgaaggtgacatttctctggtcatttatttgagagttcgaagtcaaagtcgaggggcaccggctttggttcatgtctaggagccctctgtcagaatccttgaagccctttaatggtctaactggcatctcttgtatcaagaagtacctttaaggtagaccttttcagggtgccctcaggaaagggccctgctcatgtttttttcctgtccccttagaccaaccccaggtgtccactgcaggggttctgcctgttcccaaactttttccattccaggaacaaaggagaagccactttccccaggacgcaggactctcccctccactgtccgggacagcgttcgccctttagcggggaggtcattacagcctcatggcctctaccaaggccccagatcacaggatctcctgggccttggagcacctcacgctgggggaatcaatccctgagggactcagaatcttctccgtgcaacctggaaagttcatctcttgtttccttcagtcaaagaaagtccattgtacataacaaaacagcccccaaacagcccagtgccgacaccattgttcctttcacactttcctttgttgcatgcagttgggttcaaatgccaaatagtgattagaagacgaccattctgatctgtgtgtgatctggtcactatgtgactgcctttacggtttctctccatgtgctatatgaatgaagaatgcataccagtgttttaaaaggtatttttatgtgtttttaaacacttttttaaatgagcctgacacctgtgtttcagcatttggagacatccccatgttattcttttaagtgtataattactgatacttttttgtttgtttgtttaactaagttgtgtttaacttatgtgcagtctttataatgtatgtatgttattacagtttcaactatcatattttctttgattacatttataatttgatcttgctctgattataatgccagtgaatgttgctgaactctttgtatatgcaaattgcaagatttaaaccattctgatgcaaggataaacctttactttgactacca

SEQ ID NO: 428564 - DNA, 5157 bp, Homo sapiens
gcctccctaaagggaatttgcccctcaggccaaagaattcggcacaatggattctccaaggccaggatggtttcccagcgtcttcccaggaagacaagaggtccaccatggagcccttgtgtccactcctgctggtgggttttagcttgccgctcgccagggctctcaggggcaacgagaccactgccgacagcaacgagacaaccacgacctcaggccctccggacccgggcgcctcccagccgctgctggcctggctgctactgccgctgctgctcctcctcctcgtgctccttctcgccgcctacttcttcaggttcaggaagcagaggaaagctgtggtcagcaccagcgacaagaagatgcccaacggaatcttggaggagcaagagcagcaaagggtgatgctgctcagcaggtcaccctcagggcccaagaagtattttcccatccccgtggagcacctggaggaggagatccgtatcagatccgccgacgactgcaagcagtttcgggaggagttcaactcattgccatctggacacatacaaggaacttttgaactggcaaataaagaagaaaacagagaaaaaaacagatatcccaacatccttcccaatgaccattctagggtgattctgagccaactggatggaattccctgttcagactacatcaatgcttcctacatagatggttacaaagagaagaataaattcatagcagctcaaggtcccaaacaggaaacggttaacgacttctggagaatggtctgggagcaaaagtctgcgaccatcgtcatgttaacaaacttgaaagaaaggaaagaggaaaagtgccatcagtactggcccgaccaaggctgctggacctatggaaacatccgggtgtgcgtggaggactgcgtggttttggtcgactacaccatccggaagttctgcatacagccacagctccccgacggctgcaaagcccccaggctggtctcacagctgcacttcaccagctggcccgacttcggagtgccttttacccccattgggatgctgaagttcctcaagaaagtaaagacgctcaaccccgtgcacgctgggcccatcgtggtccactgtagcgcgggcgtgggccggacgggcaccttcattgtgatcgatgccatgatggccatgatgcacgcggagcagaaggtggatgtgtttgaatttgtgtctcgaatccgtaatcagcgccctcagatggttcaaacggatatgcagtacacgttcatctaccaagccttactcgagtactacctctacggggacacagagctggacgtgtcctccctggagaagcacctgcagaccatgcacggcaccaccacccacttcgacaagatcgggctggaggaggagttcaggaaattgacaaatgtccggatcatgaaggagaacatgaggacgggcaacttgccggcaaacatgaagaaggccagggtcatccagatcatcccgtatgacttcaaccgagtgatcctttccatgaaaaggggtcaagaatacacagactacatcaacgcatccttcatagacggctaccgacagaaggactatttcatcgccacccaggggccactggcacacacggttgaggacttctggaggatgatctgggaatggaaatcccacactatcgtgatgctgacggaggtgcaggagagagagcaggataaatgctaccagtattggccaaccgagggctcagttactcatggagaaataacgattgagataaagaatgataccctttcagaagccatcagtatacgagactttctggtcactctcaatcagccccaggcccgccaggaggagcaggtccgagtagtgcgccagtttcacttccacggctggcctgagatcgggattcccgccgagggcaaaggcatgattgacctcatcgcagccgtgcagaagcagcagcagcagacaggcaaccaccccatcaccgtgcactgcagtgccggagctgggcgaacaggtacattcatagccctcagcaacattttggagcgagtaaaagccgagggacttttagatgtatttcaagctgtgaagagtttacgacttcagagaccacatatggtgcaaaccctggaacagtatgaattctgctacaaagtggtacaagattttattgatatattttctgattatgctaatttcaaatgaagattcctgccttaaaatattttttaatttaatggtcagtatattttgtaaaaatcatgttaatttatttcatagttgacattaatatcttccctaatttctttgtatatattttgttatgccttaaaggccacctgctatacagttgttaaatcttaaatatgctttttaaaaattggaataatgtattaaggtcaaataatatcccataaaatatatatttctgctaatattagtaaatatcttaatttttcattagattcatatcatttaatttcacatattcaacacctttaaatgttgtaatcttaatatgcgaagtgtgcctctgcaagatactaacacaaagctcatgttaagaaaacagttgaggactcggaagtcagttgaaaatgcactttcctaacagtgaattcacaaccctgaacagcagcatttttggaaggcaaactgttcgtgatggtacaatgtaaatggggacttctgtaaagttctcagtttcggtccatgtggtttatctttacattttaaagatcaaagaagtctttacaacctgaatccaggtctaaaacacactagagtagctggtgactataaataatattttaaaatgctgtgtctacaccatcaagactgtgtctacactatcttggctgaacgagaagagatgtaaatgctgggtggtcccgttgacccacggcgttgggtacaacaaaaccagccatcggagttacaccccaaagcaccatttgctgtccagctgcctgtcgtttggcccagaccaccctcagaaaaaaaccagctgcctctcccattctcccctcccgttctgccacagcggcctgggctggtccagtgctatgcctggaggctcaacacaaaacttcccatccaaacattcagatgaactgagcgtcttacacacgcagtacagaggagcacacattaggatagaaacagtagaataaccacgggcaattaaactttaaattttctgagcagcattttggtatttaaacatttcttgtaaaaagctgagacagtttgtaagaaaagaatccttaaaatctagatttataccattttttaaagtcccacctttcaatgtttaataaaacaaaaagagaaatccttaatctaaaagctaaattatttttgaatggaaatactactgagaccattgacactggataacagtaatgatcccattaccagataagattgactgacggggaaaaaaaaaaaaaagaatggggtgtgaatgtaccaacactgaatcttacagcagttatctttctatggccattaggtacctagcagatgtgcacaatataaacaaaaagatatctggcctaccttactactaaaagcatttaacacgtgcatttttggtacttttttttttgttttctaaaagctacataaaggccttatttgacattttcactgataactgatcgcaccctcatgttgcagtgttcgtcccctattcattaacagtgtgtgcaaatgcaaccccaggacacattattgttctgatagatgctcacagggaatcaagcttctcgcccactccacggctctgagccccatccaagggcaagacttggtgcccagctggaaggacgaaagcacactttgtgaccgccatcctcaccagctgcatgcctgggctgcacactgctgaacgtgctcctctctccttctctgtacaatgattcagcatctcggcggaagaggaaaatggagctttttgaggctcgccaggtcccttttgttttcaccattaaaattccaaacccaaagcctttgtttgactgaaggagaagagagggaagtaagcttctgttcagcacctgaaccctagaaaaagagccagtttgctacgatgaaggtgacatttctctggtcatttatttgagagttcgaagtcaaagtcgaggggcaccggctttggttcatgtctaggagccctctgtcagaatccttgaagccctttaatggtctaactggcatctcttgtatcaagaagtacctttaaggtagaccttttcagggtgccctcaggaaagggccctgctcatgtttttttcctgtccccttagaccaaccccaggtgtccactgcaggggttctgcctgttcccaaactttttccattccaggaacaaaggagaagccactttccccaggacgcaggactctcccctccactgtccgggacagcgttcgccctttagcggggaggtcattacagcctcatggcctctaccaaggccccagatcacaggatctcctgggccttggagcacctcacgctgggggaatcaatccctgagggactcagaatcttctccgtgcaacctggaaagttcatctcttgtttccttcagtcaaagaaagtccattgtacataacaaaacagcccccaaacagcccagtgccgacaccattgttcctttcacactttcctttgttgcatgcagttgggttcaaatgccaaatagtgattagaagacgaccattctgatctgtgtgtgatctggtcactatgtgactgcctttacggtttctctccatgtgctatatgaatgaagaatgcataccagtgttttaaaaggtatttttatgtgtttttaaacacttttttaaatgagcctgacacctgtgtttcagcatttggagacatccccatgttattcttttaagtgtataattactgatacttttttgtttgtttgtttaactaagttgtgtttaacttatgtgcagtctttataatgtatgtatgttattacagtttcaactatcatattttctttgattacatttataatttgatcttgctctgattataatgccagtgaatgttgctgaactctttgtatatgcaaattgcaagatttaaaccattctgatgcaaggataaacctttactttgactacca

SEQ ID NO: 428565 - DNA, 4990 bp, Homo sapiens
tcagttcttaccaaatcataggcacctgctctaggccagggtccatgggccctgagataccatggaaatgcaaaggcaagtctccgccttcatgcagcataggatctggctgatgagaccatcactttggccacaccactgttcaccccacatgaaagagcaccctggggaaagccagggtctgtgtctccttcattctctgccccatgcctggtgcaaggtctgaggcagagacggactatggacagcaggtagtttgctccacgtgttttcattaattcctgtgctcagtagggaaactgacatgagcatggtgcttgaatccatcacatttcatactaatgctacattttcttccagtcattgccatctggacacatacaaggaacttttgaactggcaaataaagaagaaaacagagaaaaaaacagatatcccaacatccttcccaatgaccattctagggtgattctgagccaactggatggaattccctgttcagactacatcaatgcttcctacatagatggttacaaagagaagaataaattcatagcagctcaaggtcccaaacaggaaacggttaacgacttctggagaatggtctgggagcaaaagtctgcgaccatcgtcatgttaacaaacttgaaagaaaggaaagaggaaaagtgccatcagtactggcccgaccaaggctgctggacctatggaaacatccgggtgtgcgtggaggactgcgtggttttggtcgactacaccatccggaagttctgcatacagccacagctccccgacggctgcaaagcccccaggctggtctcacagctgcacttcaccagctggcccgacttcggagtgccttttacccccattgggatgctgaagttcctcaagaaagtaaagacgctcaaccccgtgcacgctgggcccatcgtggtccactgtagcgcgggcgtgggccggacgggcaccttcattgtgatcgatgccatgatggccatgatgcacgcggagcagaaggtggatgtgtttgaatttgtgtctcgaatccgtaatcagcgccctcagatggttcaaacggatatgcagtacacgttcatctaccaagccttactcgagtactacctctacggggacacagagctggacgtgtcctccctggagaagcacctgcagaccatgcacggcaccaccacccacttcgacaagatcgggctggaggaggagttcaggaaattgacaaatgtccggatcatgaaggagaacatgaggacgggcaacttgccggcaaacatgaagaaggccagggtcatccagatcatcccgtatgacttcaaccgagtgatcctttccatgaaaaggggtcaagaatacacagactacatcaacgcatccttcatagacggctaccgacagaaggactatttcatcgccacccaggggccactggcacacacggttgaggacttctggaggatgatctgggaatggaaatcccacactatcgtgatgctgacggaggtgcaggagagagagcaggataaatgctaccagtattggccaaccgagggctcagttactcatggagaaataacgattgagataaagaatgataccctttcagaagccatcagtatacgagactttctggtcactctcaatcagccccaggcccgccaggaggagcaggtccgagtagtgcgccagtttcacttccacggctggcctgagatcgggattcccgccgagggcaaaggcatgattgacctcatcgcagccgtgcagaagcagcagcagcagacaggcaaccaccccatcaccgtgcactgcagtgccggagctgggcgaacaggtacattcatagccctcagcaacattttggagcgagtaaaagccgagggacttttagatgtatttcaagctgtgaagagtttacgacttcagagaccacatatggtgcaaaccctggaacagtatgaattctgctacaaagtggtacaagattttattgatatattttctgattatgctaatttcaaatgaagattcctgccttaaaatattttttaatttaatggtcagtatattttgtaaaaatcatgttaatttatttcatagttgacattaatatcttccctaatttctttgtatatattttgttatgccttaaaggccacctgctatacagttgttaaatcttaaatatgctttttaaaaattggaataatgtattaaggtcaaataatatcccataaaatatatatttctgctaatattagtaaatatcttaatttttcattagattcatatcatttaatttcacatattcaacacctttaaatgttgtaatcttaatatgcgaagtgtgcctctgcaagatactaacacaaagctcatgttaagaaaacagttgaggactcggaagtcagttgaaaatgcactttcctaacagtgaattcacaaccctgaacagcagcatttttggaaggcaaactgttcgtgatggtacaatgtaaatggggacttctgtaaagttctcagtttcggtccatgtggtttatctttacattttaaagatcaaagaagtctttacaacctgaatccaggtctaaaacacactagagtagctggtgactataaataatattttaaaatgctgtgtctacaccatcaagactgtgtctacactatcttggctgaacgagaagagatgtaaatgctgggtggtcccgttgacccacggcgttgggtacaacaaaaccagccatcggagttacaccccaaagcaccatttgctgtccagctgcctgtcgtttggcccagaccaccctcagaaaaaaaccagctgcctctcccattctcccctcccgttctgccacagcggcctgggctggtccagtgctatgcctggaggctcaacacaaaacttcccatccaaacattcagatgaactgagcgtcttacacacgcagtacagaggagcacacattaggatagaaacagtagaataaccacgggcaattaaactttaaattttctgagcagcattttggtatttaaacatttcttgtaaaaagctgagacagtttgtaagaaaagaatccttaaaatctagatttataccattttttaaagtcccacctttcaatgtttaataaaacaaaaagagaaatccttaatctaaaagctaaattatttttgaatggaaatactactgagaccattgacactggataacagtaatgatcccattaccagataagattgactgacggggaaaaaaaaaaaaaagaatggggtgtgaatgtaccaacactgaatcttacagcagttatctttctatggccattaggtacctagcagatgtgcacaatataaacaaaaagatatctggcctaccttactactaaaagcatttaacacgtgcatttttggtacttttttttttgttttctaaaagctacataaaggccttatttgacattttcactgataactgatcgcaccctcatgttgcagtgttcgtcccctattcattaacagtgtgtgcaaatgcaaccccaggacacattattgttctgatagatgctcacagggaatcaagcttctcgcccactccacggctctgagccccatccaagggcaagacttggtgcccagctggaaggacgaaagcacactttgtgaccgccatcctcaccagctgcatgcctgggctgcacactgctgaacgtgctcctctctccttctctgtacaatgattcagcatctcggcggaagaggaaaatggagctttttgaggctcgccaggtcccttttgttttcaccattaaaattccaaacccaaagcctttgtttgactgaaggagaagagagggaagtaagcttctgttcagcacctgaaccctagaaaaagagccagtttgctacgatgaaggtgacatttctctggtcatttatttgagagttcgaagtcaaagtcgaggggcaccggctttggttcatgtctaggagccctctgtcagaatccttgaagccctttaatggtctaactggcatctcttgtatcaagaagtacctttaaggtagaccttttcagggtgccctcaggaaagggccctgctcatgtttttttcctgtccccttagaccaaccccaggtgtccactgcaggggttctgcctgttcccaaactttttccattccaggaacaaaggagaagccactttccccaggacgcaggactctcccctccactgtccgggacagcgttcgccctttagcggggaggtcattacagcctcatggcctctaccaaggccccagatcacaggatctcctgggccttggagcacctcacgctgggggaatcaatccctgagggactcagaatcttctccgtgcaacctggaaagttcatctcttgtttccttcagtcaaagaaagtccattgtacataacaaaacagcccccaaacagcccagtgccgacaccattgttcctttcacactttcctttgttgcatgcagttgggttcaaatgccaaatagtgattagaagacgaccattctgatctgtgtgtgatctggtcactatgtgactgcctttacggtttctctccatgtgctatatgaatgaagaatgcataccagtgttttaaaaggtatttttatgtgtttttaaacacttttttaaatgagcctgacacctgtgtttcagcatttggagacatccccatgttattcttttaagtgtataattactgatacttttttgtttgtttgtttaactaagttgtgtttaacttatgtgcagtctttataatgtatgtatgttattacagtttcaactatcatattttctttgattacatttataatttgatcttgctctgattataatgccagtgaatgttgctgaactctttgtatatgcaaattgcaagatttaaaccattctgatgcaaggataaacctttactttgactacca

SEQ ID NO: 428566 - DNA, 5281 bp, Homo sapiens
agccacagccggagctggagccgaggcggcggcgggacgcggccggccggacaaatttcctgctaggctgcggacagcgggcggcaggagccggcgcgagcggcttcaggaacccacggcctctgcgcgtccccgcgacccttcttcgcgcccggcgaagacagccgggcgccccggagggcggcgggcaggcgcccgggagatgcggagcctccgctgcagcgcgatctgcgcgaccagaccggcccccccgagactatagccttcactttccctcggtccaccatggagcccttgtgtccactcctgctggtgggttttagcttgccgctcgccagggctctcaggggcaacgagaccactgccgacagcaacgagacaaccacgacctcaggccctccggacccgggcgcctcccagccgctgctggcctggctgctactgccgctgctgctcctcctcctcgtgctccttctcgccgcctacttcttcaggttcaggaagcagaggaaagctgtggtcagcaccagcgacaagaagatgcccaacggaatcttggaggagcaagagcagcaaagggtgatgctgctcagcaggtcaccctcagggcccaagaagtattttcccatccccgtggagcacctggaggaggagatccgtatcagatccgccgacgactgcaagcagtttcgggaggagttcaactcattgccatctggacacatacaaggaacttttgaactggcaaataaagaagaaaacagagaaaaaaacagatatcccaacatccttcccaatgaccattctagggtgattctgagccaactggatggaattccctgttcagactacatcaatgcttcctacatagatggttacaaagagaagaataaattcatagcagctcaaggtcccaaacaggaaacggttaacgacttctggagaatggtctgggagcaaaagtctgcgaccatcgtcatgttaacaaacttgaaagaaaggaaagaggaaaagtgccatcagtactggcccgaccaaggctgctggacctatggaaacatccgggtgtgcgtggaggactgcgtggttttggtcgactacaccatccggaagttctgcatacagccacagctccccgacggctgcaaagcccccaggctggtctcacagctgcacttcaccagctggcccgacttcggagtgccttttacccccattgggatgctgaagttcctcaagaaagtaaagacgctcaaccccgtgcacgctgggcccatcgtggtccactgtagcgcgggcgtgggccggacgggcaccttcattgtgatcgatgccatgatggccatgatgcacgcggagcagaaggtggatgtgtttgaatttgtgtctcgaatccgtaatcagcgccctcagatggttcaaacggatatgcagtacacgttcatctaccaagccttactcgagtactacctctacggggacacagagctggacgtgtcctccctggagaagcacctgcagaccatgcacggcaccaccacccacttcgacaagatcgggctggaggaggagttcaggaaattgacaaatgtccggatcatgaaggagaacatgaggacgggcaacttgccggcaaacatgaagaaggccagggtcatccagatcatcccgtatgacttcaaccgagtgatcctttccatgaaaaggggtcaagaatacacagactacatcaacgcatccttcatagacggctaccgacagaaggactatttcatcgccacccaggggccactggcacacacggttgaggacttctggaggatgatctgggaatggaaatcccacactatcgtgatgctgacggaggtgcaggagagagagcaggataaatgctaccagtattggccaaccgagggctcagttactcatggagaaataacgattgagataaagaatgataccctttcagaagccatcagtatacgagactttctggtcactctcaatcagccccaggcccgccaggaggagcaggtccgagtagtgcgccagtttcacttccacggctggcctgagatcgggattcccgccgagggcaaaggcatgattgacctcatcgcagccgtgcagaagcagcagcagcagacaggcaaccaccccatcaccgtgcactgcagtgccggagctgggcgaacaggtacattcatagccctcagcaacattttggagcgagtaaaagccgagggacttttagatgtatttcaagctgtgaagagtttacgacttcagagaccacatatggtgcaaaccctggaacagtatgaattctgctacaaagtggtacaagattttattgatatattttctgattatgctaatttcaaatgaagattcctgccttaaaatattttttaatttaatggtcagtatattttgtaaaaatcatgttaatttatttcatagttgacattaatatcttccctaatttctttgtatatattttgttatgccttaaaggccacctgctatacagttgttaaatcttaaatatgctttttaaaaattggaataatgtattaaggtcaaataatatcccataaaatatatatttctgctaatattagtaaatatcttaatttttcattagattcatatcatttaatttcacatattcaacacctttaaatgttgtaatcttaatatgcgaagtgtgcctctgcaagatactaacacaaagctcatgttaagaaaacagttgaggactcggaagtcagttgaaaatgcactttcctaacagtgaattcacaaccctgaacagcagcatttttggaaggcaaactgttcgtgatggtacaatgtaaatggggacttctgtaaagttctcagtttcggtccatgtggtttatctttacattttaaagatcaaagaagtctttacaacctgaatccaggtctaaaacacactagagtagctggtgactataaataatattttaaaatgctgtgtctacaccatcaagactgtgtctacactatcttggctgaacgagaagagatgtaaatgctgggtggtcccgttgacccacggcgttgggtacaacaaaaccagccatcggagttacaccccaaagcaccatttgctgtccagctgcctgtcgtttggcccagaccaccctcagaaaaaaaccagctgcctctcccattctcccctcccgttctgccacagcggcctgggctggtccagtgctatgcctggaggctcaacacaaaacttcccatccaaacattcagatgaactgagcgtcttacacacgcagtacagaggagcacacattaggatagaaacagtagaataaccacgggcaattaaactttaaattttctgagcagcattttggtatttaaacatttcttgtaaaaagctgagacagtttgtaagaaaagaatccttaaaatctagatttataccattttttaaagtcccacctttcaatgtttaataaaacaaaaagagaaatccttaatctaaaagctaaattatttttgaatggaaatactactgagaccattgacactggataacagtaatgatcccattaccagataagattgactgacggggaaaaaaaaaaaaaagaatggggtgtgaatgtaccaacactgaatcttacagcagttatctttctatggccattaggtacctagcagatgtgcacaatataaacaaaaagatatctggcctaccttactactaaaagcatttaacacgtgcatttttggtacttttttttttgttttctaaaagctacataaaggccttatttgacattttcactgataactgatcgcaccctcatgttgcagtgttcgtcccctattcattaacagtgtgtgcaaatgcaaccccaggacacattattgttctgatagatgctcacagggaatcaagcttctcgcccactccacggctctgagccccatccaagggcaagacttggtgcccagctggaaggacgaaagcacactttgtgaccgccatcctcaccagctgcatgcctgggctgcacactgctgaacgtgctcctctctccttctctgtacaatgattcagcatctcggcggaagaggaaaatggagctttttgaggctcgccaggtcccttttgttttcaccattaaaattccaaacccaaagcctttgtttgactgaaggagaagagagggaagtaagcttctgttcagcacctgaaccctagaaaaagagccagtttgctacgatgaaggtgacatttctctggtcatttatttgagagttcgaagtcaaagtcgaggggcaccggctttggttcatgtctaggagccctctgtcagaatccttgaagccctttaatggtctaactggcatctcttgtatcaagaagtacctttaaggtagaccttttcagggtgccctcaggaaagggccctgctcatgtttttttcctgtccccttagaccaaccccaggtgtccactgcaggggttctgcctgttcccaaactttttccattccaggaacaaaggagaagccactttccccaggacgcaggactctcccctccactgtccgggacagcgttcgccctttagcggggaggtcattacagcctcatggcctctaccaaggccccagatcacaggatctcctgggccttggagcacctcacgctgggggaatcaatccctgagggactcagaatcttctccgtgcaacctggaaagttcatctcttgtttccttcagtcaaagaaagtccattgtacataacaaaacagcccccaaacagcccagtgccgacaccattgttcctttcacactttcctttgttgcatgcagttgggttcaaatgccaaatagtgattagaagacgaccattctgatctgtgtgtgatctggtcactatgtgactgcctttacggtttctctccatgtgctatatgaatgaagaatgcataccagtgttttgtttcagcatttggagacatccccatgttattcttttaagtgtataattactgatacttttttgtttgtttgtttaactaagttgtgtttaacttatgtgcagtctttataatgtatgtatgttattacagtttcaactatcatattttctttgattacatttataatttgatcttgctctgattataatgccagtgaatgttgctgaactctttgtatatgcaaattgcaagatttaaaccattctgatgcaaggataaacctttactttgactacca

SEQ ID NO: 428567 - DNA, 3131 bp, Homo sapiens
  misc_feature (3021)..(3021): n is a, c, g, or t
  misc_feature (3051)..(3051): n is a, c, g, or t
  misc_feature (3071)..(3071): n is a, c, g, or t
  misc_feature (3088)..(3088): n is a, c, g, or t
  misc_feature (3123)..(3123): n is a, c, g, or t
  misc_feature (3131)..(3131): n is a, c, g, or t
agccacagccggagctggagccgaggcggcggcgggacgcggccggccggacaaatttcctgctaggctgcggacagcgggcggcaggagccggcgcgagcggcttcaggaacccacggcctctgcgcgtccccgcgacccttcttcgcgcccggcgaagacagccgggcgccccggagggcggcgggcaggcgcccgggagatgcggagcctccgctgcagcgcgatctgcgcgaccagaccggcccccccgagactatagccttcactttccctcggtccaccatggagcccttgtgtccactcctgctggtgggttttagcttgccgctcgccagggctctcaggggcaacgagaccactgccgacagcaacgagacaaccacgacctcaggccctccggacccgggcgcctcccagccgctgctggcctggctgctactgccgctgctgctcctcctcctcgtgctccttctcgccgcctacttcttcaggttcaggaagcagaggaaagctgtggtcagcaccagcgacaagaagatgcccaacggaatcttggaggagcaagagcagcaaagggtgatgctgctcagcaggtcaccctcagggcccaagaagtattttcccatccccgtggagcacctggaggaggagatccgtatcagatccgccgacgactgcaagcagtttcgggaggagttcaactcattgccatctggacacatacaaggaacttttgaactggcaaataaagaagaaaacagagaaaaaaacagatatcccaacatccttcccaatgaccattctagggtgattctgagccaactggatggaattccctgttcagactacatcaatgcttcctacatagatggttacaaagagaagaataaattcatagcagctcaaggtcccaaacaggaaacggttaacgacttctggagaatggtctgggagcaaaagtctgcgaccatcgtcatgttaacaaacttgaaagaaaggaaagaggaaaagtgccatcagtactggcccgaccaaggctgctggacctatggaaacatccgggtgtgcgtggaggactgcgtggttttggtcgactacaccatccggaagttctgcatacagccacagctccccgacggctgcaaagcccccaggctggtctcacagctgcacttcaccagctggcccgacttcggagtgccttttacccccattgggatgctgaagttcctcaagaaagtaaagacgctcaaccccgtgcacgctgggcccatcgtggtccactgtagcgcgggcgtgggccggacgggcaccttcattgtgatcgatgccatgatggccatgatgcacgcggagcagaaggtggatgtgtttgaatttgtgtctcgaatccgtaatcagcgccctcagatggttcaaacggatatgcagtacacgttcatctaccaagccttactcgagtactacctctacggggacacagagctggacgtgtcctccctggagaagcacctgcagaccatgcacggcaccaccacccacttcgacaagatcgggctggaggaggagttcaggaaattgacaaatgtccggatcatgaaggagaacatgaggacgggcaacttgccggcaaacatgaagaaggccagggtcatccagatcatcccgtatgacttcaaccgagtgatcctttccatgaaaaggggtcaagaatacacagactacatcaacgcatccttcatagacggctaccgacagaaggactatttcatcgccacccaggggccactggcacacacggttgaggacttctggaggatgatctgggaatggaaatcccacactatcgtgatgctgacggaggtgcaggagagagagcaggataaatgctaccagtattggccaaccgagggctcagttactcatggagaaataacgattgagataaagaatgataccctttcagaagccatcagtatacgagactttctggtcactctcaatcagccccaggcccgccaggaggagcaggtccgagtagtgcgccagtttcacttccacggctggcctgagatcgggattcccgccgagggcaaaggcatgattgacctcatcgcagccgtgcagaagcagcagcagcagacaggcaaccaccccatcaccgtgcactgcagtgccggagctgggcgaacaggtacattcatagccctcagcaacattttggagcgagtaaaagccgagggacttttagatgtatttcaagctgtgaagagtttacgacttcagagaccacatatggtgcaaaccctggaacagtatgaattctgctacaaagtggtacaagattttattgatatattttctgattatgctaatttcaaatgaagattcctgccttaaaatattttttaatttaatggtcagtatattttgtaaaaatcatgttaatttatttcatagttgacattaatatcttccctaatttctttgtatatattttgttatgccttaaaggccacctgctatacagttgttaaatcttaaatatgctttttaaaaattggaataatgtattaaggtcaaataatatcccataaaatatatatttctgctaatattagtaaatatcttaatttttcattagattcatatcatttaatttcacatattcaacacctttaaatgttgtaatcttaatatgcgaagtgtgcctctgcaagatactaacacaaagctcatgttaagaaaacagttgaggactcggaagtcagttgaaaatgcactttcctaacagtgaattcacaaccctgaacagcagcatttttggaaggcaaactgttcgtgatggtacaatgtaaatggggacttctgtaaagttctcagtttcggtccatgtggtttatctttacattttaaagatcaaagaagtctttacaacctgaatccaggtctaaaacacactagagtagctggtgactataaataatattttaaaatgctgtgtctacaccatcaaanaacggttgtctacccctaatctttgggtgnaaccaaaaaaaaaaattttnaatgcctgggggtggtnccccgttgaaacccccgggggtttggggtttcaanaaaaaccn

SEQ ID NO: 428568 - DNA, 265 bp, Homo sapiens
tacttcgggaggagtgtgactcacgacgcagcatctttctctttccccaaagcgcgggcgtgggccggacgggcaccttcattgtgatcgatgccatgatggccatgatgcacgcggagcagaaggtggatgtgtttgaatttgtgtctcgaatccgtaatcagcgccctcagatggttcaaacggatgtgagtcatgccttcctcttgccctgatctagcttcccaaagcaaacccgatgccttcgccacacaggtgtgcaggg

SEQ ID NO: 428569 - DNA, 6763 bp, Homo sapiens
  misc_feature (4398)..(4398): n is a, c, g, or t
gctagccttgcgcggcgcgggagagcgcagtggcgccggcgggaaagggctgcggacctgcggcgccgcgttgtgcgttcgacgacgcggcaccggcttcgacgccctctgcccgctccagaagcagtaagaagacatgttggataacaagaagaggtgtagagtttgcatatatcaactgtggccttaatgagcatgttgacagcatcgatgctagacagacagtctttttactgctggattgtgcaagatatttaaccctattttgtttgaattatgacttaaatgtcaaacatcttaactaagaaaagggaaacattttagttttggaagtcagaatgccaaggagaaggaaaaatcttgggggaaatccttttcggaagactgcaaaccctaaggaagttgtcgtatccagtgttgctagtcgtgaggagccaaccactactctaccttccatgggtgagacaaaagttgatcaggaagaactcttcaccagtatctcagagatattttctgatctggatcctgatgtagtgtatttgatgctttctgaatgtgatttcaaagttgaaaatgctatggattgtctattagaattatctgccactgataccaagatagaagaatcatcttcacaaagtttcgttgcttctgagaaccaagtaggtgcagcagaaagtaaaataatggaaaaacgtcctgaagaagagagtgaagattcaaaaatggattcatttttggacatgcagctaactgaagacctggattccttaatacagaatgcttttgagaaattgaactcttctcctgatgaccaagtatactcatttttgccttcacaagatgttaatagttttaatgactcaagtgagtttataaatcctgattcaagtaatatgactcccattttttctacacaaaatatgaatttgaacggtgaaaatttagagaattctggttctactttaagtttaaacccattaccttcacattcagttttgaacgagtccaagtgttttataaaggataacacattggctttgggaaagtaactacccggaagattctcttctcagtagttctttaaatgtagcaagtgactccatcgcaggttgtagcagtctcaatcaaaaacagaaagaacttttagaatctgagtgcgttgaggctcaattctctgaagctcctgtagatttggatgccagtgaacctcaggcttgtttaaaccttccagggcttgatttaccaggtacaggtggggatcagaaatctactcgggtctctgatgtgtttctaccttccgaagggttcaacttcaagccacacaaacatcctgaactgccaactaaggggaaggatgtgagttactgcccggtacttgctcctctcccattgctgttgcctcctccgccacctccaccgatgtggaatccaatgattcctgcttttgacctcttccaaggaaaccatggctttgtagctcctgttgtaaccacagctgcacactggagatctgtcaactacacatttccaccctcagttatttctcacacttccccaacaaaagtatggagaaataaagatggaacaagtgcttatcaagtacaagaaaccccagtttctcaggttgtaagaaagaagacatcttacgttggactagttcttgttcttctcagaggtcttccgggatctggaaaatcttttttggcaaggactttgcaagaggataatccaagtggagtcattcttagtactgatgattatttttatataaatggacagtaccagtttgatgtaaagtacttaggagaagcacatgaatggaaccagaatcgtgcaaaagaagcatttgagaagaagatatctcctataattatagataatacaaacctacaggcatgggaaatgaaaccatatgttgctttgtctcagaaacacaaatataaagtcctttttcgggaaccagacacatggtggaagtttaaaccaaaggaacttgcaaggcgtaacattcatggggtaagcaaagaaaaaataacaagaatgttggaacattatcaacgttttgtttcagtgccaataattatgagttcttcggttccagagaaaattgaacgtattgagttgtgtgcatattcttgtgaggatagaagcactagcccaagagacgatgaagatattatctctgaaaaagaagaaaatattttatctttatctttgaagcatctagagttcactgaagagaagaatcttgatgtaaccaaagaaacaatgttacctgagaatgttgcatatctctctaatgcagatttaaacaaaagaagaaaagaaataagtgatatgaatcctagcattcaaagtgctttaattctggaaactccacacatgtatttttctgactctgaaagcaaactacaggcaacagacaaaagtgaaaacgagcaaatagaaatggtggctgtaaaagggtatagtaaaactgacacagatagttctatggagagagtatcacctagtacttgctgtagtgaaaataatcaagaagactgtgatcttgcaaatagtggaccacttcaaaatgaaaaatcctcacctggtgaaatagtggaagaaagagcaacagtaacgaaaaaagcctttgggaaacaaaaaagcaaatcgactttggaaaagttcccaagacatgagctatcaaattttgttggtgactggccagttgataagactattggtcagaggacaaaaaggaacagaaaaactgaaaaaacttcatccgtacaaagcgacaaaaagtataattaccctcagtcacacaaattagttaacagtgtatctgtgaatacagattgtgtccagcaacgaggatctccacatgaaagtgtagaggatggcagaaagtcacagtgtgatgatgcttcagagccactcaatagctataaatatgatgcttataaaaatattgacaaaaactcattcaacattatgggtgactggccttcatctgattctttagctcagagggaacacagatcaagaatgccaaagactggtttaagtgagcccaacctagaaattggaacaaatgacaaaatgaatgaaatatccttatctacagcacatgaggcctgttggggcacaagctctcaaaaactaaagacattgggtagctccaatctaggaagttctgaaatgctgctcagtgaaatgacctgtgagagtcagacttgtctaagtaaaaagagtcatgggcaacacacatcgttgcctcttacttttaccaatagtgcaccaactgtttctggagtagtagaaccacaaacgttagctgaatgtcaagagcaaatgcctaagagagaccctggaaaagaagtaggcatgtgcacccagactgaaccacaggattttgctcttttatggaaaatagaaaagaataaaattagcatttcagattctatcaaagtattaacaggaagattagatggatttaagccgaaagttttcaatattaacacaaaatcagacgttcaagaagcaattccatatagagtaatgtatgataaaagcacgtttgttgaagaaagtgagcttaccagtgcagatgaatctgaaaatcttaacattctttgtaaactgtttggatccttttcattagaagccctgaaagacttatatgagaggtgcaataaagatattatttgggccacaagccttttgttggattctgaaactaagttatgtgaggatacagagtttgagaatttccaaaaatcgtgtgatggatcacaaattgggcctttttctctggggttgaatttgaaagaaattattagccaaagaggaactttagagaattctaattctcctgtgccagagtttagccatgggattggtattagtaacgctgactcacagtctacttgtgatgcagaaagaggaaactcagagcaggcggaaatgagagctgtcactcctgaaaaccatgaatcgatgacaagtatatttcccagtgctgctgtgggtctaaagaataataatgacatacttcctaacagccaggaagaacttttatatagcagtaagcagtcctttccaggtattctaaaagctactactcctaaagatatgagtgaaacagaaaaaaacctagtagtcacagagactggagacaacatacattctccttcacatttctctgatatttttaactttgtatctagtacttcaaatcttgaattaaatgaagaaatttattttactgattctcttgaaataaagagaaatgaaaattttccaaaggattatgtgaaattttcagatgaagaagaatttatgaatgaagatgagaaggaaatgaaggaaattctaatggcaggaagtagtttatcagctggagttagnggggaagataaaaccgagatattgaatcccactccagcgatggccaaatctctgaccatagactgtctggaattggcattaccccctgaactggcttttcaacttaatgaattatttggtcctgttggtattgattcagggtctctaacagttgaagattgtgtggttcatatagatctgaatctggcgaaagtgattcatgagaaatggaaagaatctgtaatggagcgacaaagacaagaagaggtgtcttgtggcaagtttatgcaagatccttccttggttggacatactgggcttgataatcctgaacaaaaatcatctcagagaacaggcaaaaaattactgaagactttaacagcatctgaaatgctacctttattggatcattggaatactcaaactaaaaaagtatcactcagagaaataatgtcagaagaaattgccttacaggaaaaacataatttgaaaagggagacccttatgtttgaaaaagattgtgccactaaactaaaggagaagcagctctttaagatatttccagccattaaccaaaattttctggtggacattttcaaggaccacaactattcattagaacacacagtgcaatttcttaactgtgttcttgaaggggaccctgtaaaaacagttgtagcccaagagtttgttcaccaaaatgagaatgtcacatctcatactggccagaagtctaaagagaaaaaggactttgagtacccagactatgatgactacagagcagaggctttccttcaccaacagaagaggatggagtgctacagcaaggccaaagaagcttatcggatagggaaaaaaaatgtcgccaccttttatgcccagcagggtactcttcatgagcagaagatgaaagaagccaatcaccttgctgccatagagatctttgagaaagtcaatgcttcgctgctgccacagaatgttttagacctccatgggctgcatgtggatgaagctctagaacatttgatgagagttttagagaagaagactgaagaatttaagcagaacggtgggaagccctatttgtctgtgattacggggagaggaaaccacagccagggaggagttgctcgcatcaaaccagctgtcattaagtacctcataagccatagcttcaggttctctgaaattaaaccagggtgcttgaaagtcatgctaaagtaaaataaacatccttgaattagaagtatgaaggtttgtaggttaaaattacttttatttgcagtaattcagtcaattctaccctaaagatgtgttttattataaataatattcaattatgaaacaaaaaaattatgatgtttttcaaaatgcaagtgaggtttgattttttactgaatcaaatgcaaatgttacctgttaaagatattacagagaaattttattgattacaaaatatgtaagaaaattatcagctacagttttaaagtttaaaatgctctgattgtttctcagaaaaggttacctttgtattaattgttgtatgacatttagtaatgtcctaaaagtcttttgtgagaggtatttaaagtgctttgagacctgattcatgccccccaaagggtggtattaaaagaggaaaaaggacatagtagtggtagtaaagaaaaaaaggagatctaacaaaaacacttgaatattttttattttcaaaactaaacacataaaatgcttttattttgccatatcctacaggaaggaagacatgcttttgccctttcttctgctttgtatatgaccttgatcttttaccttttgttctgttcttctgtgtgcattttatggaaagaaagttgggtctgagattatattgtaattttatactttctatagacagaaaggttttcagagaaaaagaaatggttaaatatcttccagatgttgctgccttatcgaaatgcttctagaactgtctgtataagtcgtatttcagacagtactaaatacttatattttatttttgaggcatgtaattttaaaactgcagtaggttaaaattctattaaacaaatatagaaaatattttgtttataattggcctggtgtggtggcccacgcctgtaatcccagcactttgggaggccgaggtaggtggatcgcctgaggtcagaagttcaagaccagcctggccaacatggtgaatccccgtctctattaaaaatacaaaaattagctgggtgtggtggcgtgtgcctgtaatcccagctacttgggaggctgaggcaggagaaccgcttaaacctgggaggtggaggttgcagtgacccgagatcgagatcacaccactgcactcagcctgggtgacagagcaagactccgtctccaa

SEQ ID NO: 428570 - DNA, 6420 bp, Homo sapiens
  misc_feature (4055)..(4055): n is a, c, g, or t
gctagccttgcgcggcgcgggagagcgcagtggcgccggcgggaaagggctgcggacctgcggcgccgcgttgtgcgttcgacgacgcggcaccggcttcgacgccctctgcccgctccagaagcagtaagaagacatgttggataacaagaagaggtgtagagtttgcatatatcaactgtggccttaatgagcatgttgacagcatcgatgctagacagacattgaaaatgctatggattgtctattagaattatctgccactgataccaagatagaagaatcatcttcacaaagtttcgttgcttctgagaaccaagtaggtgcagcagaaagtaaaataatggaaaaacgtcctgaagaagagagtgaagattcaaaaatggattcatttttggacatgcagctaactgaagacctggattccttaatacagaatgcttttgagaaattgaactcttctcctgatgaccaagtatactcatttttgccttcacaagatgttaatagttttaatgactcaagtgagtttataaatcctgattcaagtaatatgactcccattttttctacacaaaatatgaatttgaacggtgaaaatttagagaattctggttctactttaagtttaaacccattaccttcacattcagttttgaacgagtccaagtgttttataaaggataacacattggctttgggaaagtaactacccggaagattctcttctcagtagttctttaaatgtagcaagtgactccatcgcaggttgtagcagtctcaatcaaaaacagaaagaacttttagaatctgagtgcgttgaggctcaattctctgaagctcctgtagatttggatgccagtgaacctcaggcttgtttaaaccttccagggcttgatttaccaggtacaggtggggatcagaaatctactcgggtctctgatgtgtttctaccttccgaagggttcaacttcaagccacacaaacatcctgaactgccaactaaggggaaggatgtgagttactgcccggtacttgctcctctcccattgctgttgcctcctccgccacctccaccgatgtggaatccaatgattcctgcttttgacctcttccaaggaaaccatggctttgtagctcctgttgtaaccacagctgcacactggagatctgtcaactacacatttccaccctcagttatttctcacacttccccaacaaaagtatggagaaataaagatggaacaagtgcttatcaagtacaagaaaccccagtttctcaggttgtaagaaagaagacatcttacgttggactagttcttgttcttctcagaggtcttccgggatctggaaaatcttttttggcaaggactttgcaagaggataatccaagtggagtcattcttagtactgatgattatttttatataaatggacagtaccagtttgatgtaaagtacttaggagaagcacatgaatggaaccagaatcgtgcaaaagaagcatttgagaagaagatatctcctataattatagataatacaaacctacaggcatgggaaatgaaaccatatgttgctttgtctcagaaacacaaatataaagtcctttttcgggaaccagacacatggtggaagtttaaaccaaaggaacttgcaaggcgtaacattcatggggtaagcaaagaaaaaataacaagaatgttggaacattatcaacgttttgtttcagtgccaataattatgagttcttcggttccagagaaaattgaacgtattgagttgtgtgcatattcttgtgaggatagaagcactagcccaagagacgatgaagatattatctctgaaaaagaagaaaatattttatctttatctttgaagcatctagagttcactgaagagaagaatcttgatgtaaccaaagaaacaatgttacctgagaatgttgcatatctctctaatgcagatttaaacaaaagaagaaaagaaataagtgatatgaatcctagcattcaaagtgctttaattctggaaactccacacatgtatttttctgactctgaaagcaaactacaggcaacagacaaaagtgaaaacgagcaaatagaaatggtggctgtaaaagggtatagtaaaactgacacagatagttctatggagagagtatcacctagtacttgctgtagtgaaaataatcaagaagactgtgatcttgcaaatagtggaccacttcaaaatgaaaaatcctcacctggtgaaatagtggaagaaagagcaacagtaacgaaaaaagcctttgggaaacaaaaaagcaaatcgactttggaaaagttcccaagacatgagctatcaaattttgttggtgactggccagttgataagactattggtcagaggacaaaaaggaacagaaaaactgaaaaaacttcatccgtacaaagcgacaaaaagtataattaccctcagtcacacaaattagttaacagtgtatctgtgaatacagattgtgtccagcaacgaggatctccacatgaaagtgtagaggatggcagaaagtcacagtgtgatgatgcttcagagccactcaatagctataaatatgatgcttataaaaatattgacaaaaactcattcaacattatgggtgactggccttcatctgattctttagctcagagggaacacagatcaagaatgccaaagactggtttaagtgagcccaacctagaaattggaacaaatgacaaaatgaatgaaatatccttatctacagcacatgaggcctgttggggcacaagctctcaaaaactaaagacattgggtagctccaatctaggaagttctgaaatgctgctcagtgaaatgacctgtgagagtcagacttgtctaagtaaaaagagtcatgggcaacacacatcgttgcctcttacttttaccaatagtgcaccaactgtttctggagtagtagaaccacaaacgttagctgaatgtcaagagcaaatgcctaagagagaccctggaaaagaagtaggcatgtgcacccagactgaaccacaggattttgctcttttatggaaaatagaaaagaataaaattagcatttcagattctatcaaagtattaacaggaagattagatggatttaagccgaaagttttcaatattaacacaaaatcagacgttcaagaagcaattccatatagagtaatgtatgataaaagcacgtttgttgaagaaagtgagcttaccagtgcagatgaatctgaaaatcttaacattctttgtaaactgtttggatccttttcattagaagccctgaaagacttatatgagaggtgcaataaagatattatttgggccacaagccttttgttggattctgaaactaagttatgtgaggatacagagtttgagaatttccaaaaatcgtgtgatggatcacaaattgggcctttttctctggggttgaatttgaaagaaattattagccaaagaggaactttagagaattctaattctcctgtgccagagtttagccatgggattggtattagtaacgctgactcacagtctacttgtgatgcagaaagaggaaactcagagcaggcggaaatgagagctgtcactcctgaaaaccatgaatcgatgacaagtatatttcccagtgctgctgtgggtctaaagaataataatgacatacttcctaacagccaggaagaacttttatatagcagtaagcagtcctttccaggtattctaaaagctactactcctaaagatatgagtgaaacagaaaaaaacctagtagtcacagagactggagacaacatacattctccttcacatttctctgatatttttaactttgtatctagtacttcaaatcttgaattaaatgaagaaatttattttactgattctcttgaaataaagagaaatgaaaattttccaaaggattatgtgaaattttcagatgaagaagaatttatgaatgaagatgagaaggaaatgaaggaaattctaatggcaggaagtagtttatcagctggagttagnggggaagataaaaccgagatattgaatcccactccagcgatggccaaatctctgaccatagactgtctggaattggcattaccccctgaactggcttttcaacttaatgaattatttggtcctgttggtattgattcagggtctctaacagttgaagattgtgtggttcatatagatctgaatctggcgaaagtgattcatgagaaatggaaagaatctgtaatggagcgacaaagacaagaagaggtgtcttgtggcaagtttatgcaagatccttccttggttggacatactgggcttgataatcctgaacaaaaatcatctcagagaacaggcaaaaaattactgaagactttaacagcatctgaaatgctacctttattggatcattggaatactcaaactaaaaaagtatcactcagagaaataatgtcagaagaaattgccttacaggaaaaacataatttgaaaagggagacccttatgtttgaaaaagattgtgccactaaactaaaggagaagcagctctttaagatatttccagccattaaccaaaattttctggtggacattttcaaggaccacaactattcattagaacacacagtgcaatttcttaactgtgttcttgaaggggaccctgtaaaaacagttgtagcccaagagtttgttcaccaaaatgagaatgtcacatctcatactggccagaagtctaaagagaaaaaggactttgagtacccagactatgatgactacagagcagaggctttccttcaccaacagaagaggatggagtgctacagcaaggccaaagaagcttatcggatagggaaaaaaaatgtcgccaccttttatgcccagcagggtactcttcatgagcagaagatgaaagaagccaatcaccttgctgccatagagatctttgagaaagtcaatgcttcgctgctgccacagaatgttttagacctccatgggctgcatgtggatgaagctctagaacatttgatgagagttttagagaagaagactgaagaatttaagcagaacggtgggaagccctatttgtctgtgattacggggagaggaaaccacagccagggaggagttgctcgcatcaaaccagctgtcattaagtacctcataagccatagcttcaggttctctgaaattaaaccagggtgcttgaaagtcatgctaaagtaaaataaacatccttgaattagaagtatgaaggtttgtaggttaaaattacttttatttgcagtaattcagtcaattctaccctaaagatgtgttttattataaataatattcaattatgaaacaaaaaaattatgatgtttttcaaaatgcaagtgaggtttgattttttactgaatcaaatgcaaatgttacctgttaaagatattacagagaaattttattgattacaaaatatgtaagaaaattatcagctacagttttaaagtttaaaatgctctgattgtttctcagaaaaggttacctttgtattaattgttgtatgacatttagtaatgtcctaaaagtcttttgtgagaggtatttaaagtgctttgagacctgattcatgccccccaaagggtggtattaaaagaggaaaaaggacatagtagtggtagtaaagaaaaaaaggagatctaacaaaaacacttgaatattttttattttcaaaactaaacacataaaatgcttttattttgccatatcctacaggaaggaagacatgcttttgccctttcttctgctttgtatatgaccttgatcttttaccttttgttctgttcttctgtgtgcattttatggaaagaaagttgggtctgagattatattgtaattttatactttctatagacagaaaggttttcagagaaaaagaaatggttaaatatcttccagatgttgctgccttatcgaaatgcttctagaactgtctgtataagtcgtatttcagacagtactaaatacttatattttatttttgaggcatgtaattttaaaactgcagtaggttaaaattctattaaacaaatatagaaaatattttgtttataattggcctggtgtggtggcccacgcctgtaatcccagcactttgggaggccgaggtaggtggatcgcctgaggtcagaagttcaagaccagcctggccaacatggtgaatccccgtctctattaaaaatacaaaaattagctgggtgtggtggcgtgtgcctgtaatcccagctacttgggaggctgaggcaggagaaccgcttaaacctgggaggtggaggttgcagtgacccgagatcgagatcacaccactgcactcagcctgggtgacagagcaagactccgtctccaa

SEQ ID NO: 428571 - DNA, 6814 bp, Homo sapiens
  misc_feature (4398)..(4398): n is a, c, g, or t
gctagccttgcgcggcgcgggagagcgcagtggcgccggcgggaaagggctgcggacctgcggcgccgcgttgtgcgttcgacgacgcggcaccggcttcgacgccctctgcccgctccagaagcagtaagaagacatgttggataacaagaagaggtgtagagtttgcatatatcaactgtggccttaatgagcatgttgacagcatcgatgctagacagacagtctttttactgctggattgtgcaagatatttaaccctattttgtttgaattatgacttaaatgtcaaacatcttaactaagaaaagggaaacattttagttttggaagtcagaatgccaaggagaaggaaaaatcttgggggaaatccttttcggaagactgcaaaccctaaggaagttgtcgtatccagtgttgctagtcgtgaggagccaaccactactctaccttccatgggtgagacaaaagttgatcaggaagaactcttcaccagtatctcagagatattttctgatctggatcctgatgtagtgtatttgatgctttctgaatgtgatttcaaagttgaaaatgctatggattgtctattagaattatctgccactgataccaagatagaagaatcatcttcacaaagtttcgttgcttctgagaaccaagtaggtgcagcagaaagtaaaataatggaaaaacgtcctgaagaagagagtgaagattcaaaaatggattcatttttggacatgcagctaactgaagacctggattccttaatacagaatgcttttgagaaattgaactcttctcctgatgaccaagtatactcatttttgccttcacaagatgttaatagttttaatgactcaagtgagtttataaatcctgattcaagtaatatgactcccattttttctacacaaaatatgaatttgaacggtgaaaatttagagaattctggttctactttaagtttaaacccattaccttcacattcagttttgaacgagtccaagtgttttataaaggataacacattggctttgggaaagtaactacccggaagattctcttctcagtagttctttaaatgtagcaagtgactccatcgcaggttgtagcagtctcaatcaaaaacagaaagaacttttagaatctgagtgcgttgaggctcaattctctgaagctcctgtagatttggatgccagtgaacctcaggcttgtttaaaccttccagggcttgatttaccaggtacaggtggggatcagaaatctactcgggtctctgatgtgtttctaccttccgaagggttcaacttcaagccacacaaacatcctgaactgccaactaaggggaaggatgtgagttactgcccggtacttgctcctctcccattgctgttgcctcctccgccacctccaccgatgtggaatccaatgattcctgcttttgacctcttccaaggaaaccatggctttgtagctcctgttgtaaccacagctgcacactggagatctgtcaactacacatttccaccctcagttatttctcacacttccccaacaaaagtatggagaaataaagatggaacaagtgcttatcaagtacaagaaaccccagtttctcaggttgtaagaaagaagacatcttacgttggactagttcttgttcttctcagaggtcttccgggatctggaaaatcttttttggcaaggactttgcaagaggataatccaagtggagtcattcttagtactgatgattatttttatataaatggacagtaccagtttgatgtaaagtacttaggagaagcacatgaatggaaccagaatcgtgcaaaagaagcatttgagaagaagatatctcctataattatagataatacaaacctacaggcatgggaaatgaaaccatatgttgctttgtctcagaaacacaaatataaagtcctttttcgggaaccagacacatggtggaagtttaaaccaaaggaacttgcaaggcgtaacattcatggggtaagcaaagaaaaaataacaagaatgttggaacattatcaacgttttgtttcagtgccaataattatgagttcttcggttccagagaaaattgaacgtattgagttgtgtgcatattcttgtgaggatagaagcactagcccaagagacgatgaagatattatctctgaaaaagaagaaaatattttatctttatctttgaagcatctagagttcactgaagagaagaatcttgatgtaaccaaagaaacaatgttacctgagaatgttgcatatctctctaatgcagatttaaacaaaagaagaaaagaaataagtgatatgaatcctagcattcaaagtgctttaattctggaaactccacacatgtatttttctgactctgaaagcaaactacaggcaacagacaaaagtgaaaacgagcaaatagaaatggtggctgtaaaagggtatagtaaaactgacacagatagttctatggagagagtatcacctagtacttgctgtagtgaaaataatcaagaagactgtgatcttgcaaatagtggaccacttcaaaatgaaaaatcctcacctggtgaaatagtggaagaaagagcaacagtaacgaaaaaagcctttgggaaacaaaaaagcaaatcgactttggaaaagttcccaagacatgagctatcaaattttgttggtgactggccagttgataagactattggtcagaggacaaaaaggaacagaaaaactgaaaaaacttcatccgtacaaagcgacaaaaagtataattaccctcagtcacacaaattagttaacagtgtatctgtgaatacagattgtgtccagcaacgaggatctccacatgaaagtgtagaggatggcagaaagtcacagtgtgatgatgcttcagagccactcaatagctataaatatgatgcttataaaaatattgacaaaaactcattcaacattatgggtgactggccttcatctgattctttagctcagagggaacacagatcaagaatgccaaagactggtttaagtgagcccaacctagaaattggaacaaatgacaaaatgaatgaaatatccttatctacagcacatgaggcctgttggggcacaagctctcaaaaactaaagacattgggtagctccaatctaggaagttctgaaatgctgctcagtgaaatgacctgtgagagtcagacttgtctaagtaaaaagagtcatgggcaacacacatcgttgcctcttacttttaccaatagtgcaccaactgtttctggagtagtagaaccacaaacgttagctgaatgtcaagagcaaatgcctaagagagaccctggaaaagaagtaggcatgtgcacccagactgaaccacaggattttgctcttttatggaaaatagaaaagaataaaattagcatttcagattctatcaaagtattaacaggaagattagatggatttaagccgaaagttttcaatattaacacaaaatcagacgttcaagaagcaattccatatagagtaatgtatgataaaagcacgtttgttgaagaaagtgagcttaccagtgcagatgaatctgaaaatcttaacattctttgtaaactgtttggatccttttcattagaagccctgaaagacttatatgagaggtgcaataaagatattatttgggccacaagccttttgttggattctgaaactaagttatgtgaggatacagagtttgagaatttccaaaaatcgtgtgatggatcacaaattgggcctttttctctggggttgaatttgaaagaaattattagccaaagaggaactttagagaattctaattctcctgtgccagagtttagccatgggattggtattagtaacgctgactcacagtctacttgtgatgcagaaagaggaaactcagagcaggcggaaatgagagctgtcactcctgaaaaccatgaatcgatgacaagtatatttcccagtgctgctgtgggtctaaagaataataatgacatacttcctaacagccaggaagaacttttatatagcagtaagcagtcctttccaggtattctaaaagctactactcctaaagatatgagtgaaacagaaaaaaacctagtagtcacagagactggagacaacatacattctccttcacatttctctgatatttttaactttgtatctagtacttcaaatcttgaattaaatgaagaaatttattttactgattctcttgaaataaagagaaatgaaaattttccaaaggattatgtgaaattttcagatgaagaagaatttatgaatgaagatgagaaggaaatgaaggaaattctaatggcaggaagtagtttatcagctggagttagnggggaagataaaaccgagatattgaatcccactccagcgatggccaaatctctgaccatagactgtctggaattggcattaccccctgaactggcttttcaacttaatgaattatttggtcctgttggtattgattcagggtctctaacagttgaagattgtgtggttcatatagatctgaatctggcgaaagtgattcatgagaaatggaaagaatctgtaatggagcgacaaagacaagaagaggtgtcttgtggcaagtttatgcaagatccttccttggttggacatactgggcttgataatcctgaacaaaaatcatctcagagaacaggcaaaaaattactgaagactttaacagcatctgaaatgctacctttattggatcattggaatactcaaactaaaaaagtatcactcagagaaataatgtcagaagaaattgccttacaggaaaaacataatttgaaaagggagacccttatgtttgaaaaagattgtgccactaaactaaaggagaagcagctctttaagatatttccagccattaaccaaaattttctggtggacattttcaaggaccacaactattcattagaacacacagtgcaatttcttaactgtgttcttgaaggggaccctgtaaaaacagttgtagcccaagagtttgttcaccaaaatgagaatgtcacatctcatactggccagaagtctaaagagaaaaagccaaagaaattaaaagagactgaagaaacaccaagtgaactgtctttccaggactttgagtacccagactatgatgactacagagcagaggctttccttcaccaacagaagaggatggagtgctacagcaaggccaaagaagcttatcggatagggaaaaaaaatgtcgccaccttttatgcccagcagggtactcttcatgagcagaagatgaaagaagccaatcaccttgctgccatagagatctttgagaaagtcaatgcttcgctgctgccacagaatgttttagacctccatgggctgcatgtggatgaagctctagaacatttgatgagagttttagagaagaagactgaagaatttaagcagaacggtgggaagccctatttgtctgtgattacggggagaggaaaccacagccagggaggagttgctcgcatcaaaccagctgtcattaagtacctcataagccatagcttcaggttctctgaaattaaaccagggtgcttgaaagtcatgctaaagtaaaataaacatccttgaattagaagtatgaaggtttgtaggttaaaattacttttatttgcagtaattcagtcaattctaccctaaagatgtgttttattataaataatattcaattatgaaacaaaaaaattatgatgtttttcaaaatgcaagtgaggtttgattttttactgaatcaaatgcaaatgttacctgttaaagatattacagagaaattttattgattacaaaatatgtaagaaaattatcagctacagttttaaagtttaaaatgctctgattgtttctcagaaaaggttacctttgtattaattgttgtatgacatttagtaatgtcctaaaagtcttttgtgagaggtatttaaagtgctttgagacctgattcatgccccccaaagggtggtattaaaagaggaaaaaggacatagtagtggtagtaaagaaaaaaaggagatctaacaaaaacacttgaatattttttattttcaaaactaaacacataaaatgcttttattttgccatatcctacaggaaggaagacatgcttttgccctttcttctgctttgtatatgaccttgatcttttaccttttgttctgttcttctgtgtgcattttatggaaagaaagttgggtctgagattatattgtaattttatactttctatagacagaaaggttttcagagaaaaagaaatggttaaatatcttccagatgttgctgccttatcgaaatgcttctagaactgtctgtataagtcgtatttcagacagtactaaatacttatattttatttttgaggcatgtaattttaaaactgcagtaggttaaaattctattaaacaaatatagaaaatattttgtttataattggcctggtgtggtggcccacgcctgtaatcccagcactttgggaggccgaggtaggtggatcgcctgaggtcagaagttcaagaccagcctggccaacatggtgaatccccgtctctattaaaaatacaaaaattagctgggtgtggtggcgtgtgcctgtaatcccagctacttgggaggctgaggcaggagaaccgcttaaacctgggaggtggaggttgcagtgacccgagatcgagatcacaccactgcactcagcctgggtgacagagcaagactccgtctccaa

SEQ ID NO: 428572 - DNA, 2306 bp, Homo sapiens
tgaattattggtcctgtggtatgattcagggtctctaacagttgaagattgtgtggttcatatagatctgaatctggcgaaagtgattcatgagaaatggaaagaatctgtaatggagcgacaaagacaagaagaggtgtcttgtggcaagtttatgcaagatccttccttggttggacatactgggcttgataatcctgaacaaaaatcatctcagagaacaggcaaaaaattactgaagactttaacagcatctgaaatgctacctttattggatcattggaatactcaaactaaaaaagtatcactcagagaaataatgtcagaagaaattgccttacaggaaaaacataatttgaaaagggagacccttatgtttgaaaaagattgtgccactaaactaaaggagaagcagctctttaagatatttccagccattaaccaaaattttctggtggacattttcaaggaccacaactattcattagaacacacagtgcaatttcttaactgtgttcttgaaggggaccctgtaaaaacagttgtagcccaagagtttgttcaccaaaatgagaatgtcacatctcatactggccagaagtctaaagagaaaaagccaaagaaattaaaagagactgaagaaacaccaagtgaactgtctttccaggactttgagtacccagactatgatgactacagagcagaggctttccttcaccaacagaagaggatggagtgctacagcaaggccaaagaagcttatcggatagggaaaaaaaatgtcgccaccttttatgcccagcagggtactcttcatgagcagaagatgaaagaagccaatcaccttgctgccatagagatctttgagaaagtcaatgcttcgctgctgccacagaatgttttagacctccatgggctgcatgtggatgaagctctagaacatttgatgagagttttagagaagaagactgaagaatttaagcagaacggtgggaagccctatttgtctgtgattacggggagaggaaaccacagccagggaggagttgctcgcatcaaaccagctgtcattaagtacctcataagccatagcttcaggttctctgaaattaaaccagggtgcttgaaagtcatgctaaagtaaaataaacatccttgaattagaagtatgaaggtttgtaggttaaaattacttttatttgcagtaattcagtcaattctaccctaaagatgtgttttattataaataatattcaattatgaaacaaaaaaattatgatgtttttcaaaatgcaagtgaggtttgattttttactgaatcaaatgcaaatgttacctgttaaagatattacagagaaattttattgattacaaaatatgtaagaaaattatcagctacagttttaaagtttaaaatgctctgattgtttctcagaaaaggttacctttgtattaattgttgtatgacatttagtaatgtcctaaaagtcttttgtgagaggtatttaaagtgctttgagacctgattcatgccccccaaagggtggtattaaaagaggaaaaaggacatagtagtggtagtaaagaaaaaaaggagatctaacaaaaacacttgaatattttttattttcaaaactaaacacataaaatgcttttattttgccatatcctacaggaaggaagacatgcttttgccctttcttctgctttgtatatgaccttgatcttttaccttttgttctgttcttctgtgtgcattttatggaaagaaagttgggtctgagattatattgtaattttatactttctatagacagaaaggttttcagagaaaaagaaatggttaaatatcttccagatgttgctgccttatcgaaatgcttctagaactgtctgtataagtcgtatttcagacagtactaaatacttatattttatttttgaggcatgtaattttaaaactgcagtaggttaaaattctattaaacaaatatagaaaatattttgtttataattggcctggtgtggtggcccacgcctgtaatcccagcactttgggaggccgaggtaggtggatcgcctgaggtcagaagttcaagaccagcctggccaacatggtgaatccccgtctctattaaaaatacaaaaattagctgggtgtggtggcgtgtgcctgtaatcccagctacttgggaggctgaggcaggagaaccgcttaaacctgggaggtggaggttgcagtgacccgagatcgagatcacaccactgcactcagcctgggtgacagagcaagactccgtctccaa

SEQ ID NO: 428573 - DNA, 295 bp, Homo sapiens
ctgcatgtggatgaagctctagaacatttgatgagagttttagagaagaagactgaaggtaggactgtggtaatcacaagttttcaatagaatatatgtctttgcttatattggtatagcttgcaaattcaggagagtctgaatatgcaggctgagaatatctgtgtaacatctgtaaatgtttatgttattcattcttcaagagaaccttcttgggaaaggatcctcattggtatgatgattaacattttcttcatttgtattcctgtgctgtatttattaacgggagggcatg

SEQ ID NO: 428574 - DNA, 316 bp, Homo sapiens
attgatttgagagcttaccatgtttgggaaattgcaggatctatggaggaaggccataacctggccttcaccactgaggagcttacagttgagcagtcagcggctccatccttggggaggtgagagagcgtaacattcacttgcttgattgttagtgtaagaggagccagcaaaggaggaaagagttttctctttcggagttgtcatcacctagggcaatcgtttctgatcagtcaaaggcccacacaggtttgagtcccagctgcagatgcaactcatggctgtgttagtgattctgtagcagctgatgaatgca

SEQ ID NO: 428575 - DNA, 953 bp, Homo sapiens
ggtaccggtcccgagttctttggatgcagctcctgcagcggtggtcggctgttgggtgtggagtttcccagcgcccctcgggtccgaccctttgagcgttctgctccggcgccagcctacctcgctcctcggcgccatgaccacaaccaccaccttcaagggagtcgaccccaacagcaggaatagctcccgagttttgcggcctccaggtggtggatccaatttttcattaggttttgatgaaccaacagaacaacctgtgaggaagaacaaaatggcctctaatatctttgggacacctgaagaaaatcaagcttcttgggccaagtcagcaggtgccaagtctagtggtggcagggaagacttggagtcatctggactgcagagaaggaactcctctgaagcaagctccggagacttcttagatctgaagggagaaggtgatattcatgaaaatgtggacacagacttgccaggcagcctggggcagagtgaagagaagcccgtgcctgctgcgcctgtgcccagcccggtggccccggccccagtgccatccagaagaaatccccctggcggcaagtccagcctcgtcttgggttagctctgactgtcctgaacgctgtcgttctgtctgtttcctccatgcttgtgaactgcacaacttgagcctgactgtacatctcttggatttgtttcattaaaaagaagcacttaaaaaaaaaaaaaaaaaaaaaaaaaaaaaaaaacaacaacataaaaatccttgcataccttgttcaattggagaattttaatgtttttcatttatcattgtaaaaccaaggacaattttataacttttttgtacgtagctgttacatgtagggcaatctgtctttaagtagggataaattactctaaaacaaaaaagaatcctagatagttttcccttcaagtcaagcgtcttgttgttt

SEQ ID NO: 428576 - DNA, 728 bp, Homo sapiens
cccacgcgtcgcggacgcgtgggtcgacccacgcgtccgagtgttttctagtagtagattggagggaaagctttgtgacacttagtactgtgtttttaagaagaaataatttggttccagatgtgttagaggatcttttgtactgaggtttttaacactttacttgggtttaccaagcctcaactggacagaccataaacagtccacaggcaccgttcctgccaggccccaacccacagggagtctctccgcagagccttcttggtgttgccctaacttgccagtggcctttgctcagagcctcctcctgtgacatgtgaacaatgaagaggcctgcgcctcctgccttgccgcctgcaaagcaaagaaactgccttttattttttaaccttaaaaagtagccagatagtaacaagactggctggctgatgagcaaagcctttgctctcacgcagaggaaggcttggatgtacaatgaaactgcctggaactaaaagcagtgaagcaagggaggcaatcacactgaagcgggtcttcctccaggaacggggtcccacaggcgtgttgttttaaataacctgatgctgtgtgcatgatgctggtgcttgaccatgaaaggaaagtctcatccttaaaatgtgttgtacttcacaatcctggactgttgcttcaagtaaacaatatccacattttgaaaaaaaaaaaaaagggggggccgcaaagattcc

SEQ ID NO: 428577 - DNA, 680 bp, Homo sapiens
aaaagatgaacaatggttaattctgtggagtgggagcatggtgggtgattattttgtttatgcttttaggtatgtttccaaccatcaaaccaaaaaaaaaagaaaaagagaaacagatccttgatcttaacaggaaatggctgtcattatgagtattatttctattccctgttttcatgaaaatgtggacacagacttgccaggcagcctggggcagagtgaagagaagcccgtgcctgctgcgcctgtgcccagcccggtggccccggccccagtgccatccagaagaaatccccctggcggcaagtccagcctcgtcttgggttagctctgactgtcctgaacgctgtcgttctgtctgtttcctccatgcttgtgaactgcacaacttgagcctgactgtacatctcttggatttgtttcattaaaaagaagcacttaaaaaaaaaaaaaaaaaaaaaaaaaaaaaaaaacaacaacataaaaatccttgcataccttgttcaattggagaattttaatgtttttcatttatcattgtaaaaccaaggacaattttataacttttttgtacgtagctgttacatgtagggcaatctgtctttaagtagggataaattactctaaaacaaaaaagaatcctagatagttttcccttcaagtcaagcgtcttgttgttt

SEQ ID NO: 428578 - DNA, 248 bp, Homo sapiens
acaaaaaaaaaaaacaacaacataaaaatccttgcataccttgttcaattggagaattttaatgtttttcatttatcattgtaaaaccaaggacaattttataacttttttgtacgtagctgttacatgtagggcaatctgtctttaagtagggataaattactctaaaacaaaaaagaatcctagatagttttcccttcaagtcaagcgtcttgttgtttaaataaacttcttgtttaaaatgaaat

SEQ ID NO: 428579 - DNA, 1596 bp, Homo sapiens
aggctgagccgtggccgccacagcccatcgtaatgccgcatggtgcttggcactccagagagccaataggaatgaaagaattcatttgaatcggccaatgccggcgggttagggggcgggggttgaaaaccctataaaggcgtcgatcggccggacaggcggagcggcggctcctgcagcggtggtcggctgttgggtgtggagtttcccagcgcccctcgggtccgaccctttgagcgttctgctccggcgccagcctacctcgctcctcggcgccatgaccacaaccaccaccttcaagggagtcgaccccaacagcaggaatagctcccgagttttgcggcctccaggtggtggatccaatttttcattaggttttgatgaaccaacagaacaacctgtgaggaagaacaaaatggcctctaatatctttgggacacctgaagaaaatcaagcttcttgggccaagtcagcaggtgccaagtctagtggtggcagggaagacttggagtcatctggactgcagagaaggaactcctctgaagcaagctccggagacttcttagatctgaagggagaaggtgatattcatgaaaatgtggacacagacttgccaggcagcctggggcagagtgaagagaagcccgtgcctgctgcgcctgtgcccagcccggtggccccggccccagtgccatccagaagaaatccccctggcggcaagtccagcctcgtcttgggttagctctgactgtcctgaacgctgtcgttctgtctgtttcctccatgcttgtgaactgcacaacttgagcctgactgtacatctcttggatttgtttcattaaaaagaagcactttatgtactgctgtcttttttttttttcttttgaagaacaggtttctctctgtccttgactcttgggtctgtgggccatggcatgagtgttttctagtagtagattggagggaaagctttgtgacacttagtactgtgtttttaagaagaaataatttggttccagatgtgttagaggatcttttgtactgaggtttttaacactttacttgggtttaccaagcctcaactggacagaccataaacagtccacaggcaccgttcctgccaggccccaacccacagggagtctctccgcagagccttcttggtgttgccctaacttgccagtggcctttgctcagagcctcctcctgtgacatgtgaacaatgaagaggcctgcgcctcctgccttgccgcctgcaaagcaaagaaactgccttttattttttaaccttaaaaagtagccagatagtaacaagactggctggctgatgagcaaagcctttgctctcacgcagaggaaggcttggatgtacaatgaaactgcctggaactaaaagcagtgaagcaagggaggcaatcacactgaagcgggtcttcctccaggaacggggtcccacaggcgtgttgttttaaataacctgatgctgtgtgcatgatgctggtgcttgaccatgaaaggaaagtctcatccttaaaatgtgttgtacttcacaatcctggactgttgcttcaagtaaacaatatccacattttgaaa

SEQ ID NO: 428580 - DNA, 1466 bp, Homo sapiens
tgatggcagtaatctcggggtataaggtacgaggctgggtctcctgcagcggtggtcggctgttgggtgtggagtttcccagcgcccctcgggtccgaccctttgagcgttctgctccggcgccagcctacctcgctcctcggcgccatgaccacaaccaccaccttcaagggagtcgaccccaacagcaggaatagctcccgagttttgcggcctccaggtggtggatccaatttttcattaggttttgatgaaccaacagaacaacctgtgaggaagaacaaaatggcctctaatatctttgggacacctgaagaaaatcaagcttcttgggccaagtcagcaggtgccaagtctagtggtggcagggaagacttggagtcatctggactgcagagaaggaactcctctgaagcaagctccggagacttcttagatctgaagggagaaggtgatattcatgaaaatgtggacacagacttgccaggcagcctggggcagagtgaagagaagcccgtgcctgctgcgcctgtgcccagcccggtggccccggccccagtgccatccagaagaaatccccctggcggcaagtccagcctcgtcttgggttagctctgactgtcctgaacgctgtcgttctgtctgtttcctccatgcttgtgaactgcacaacttgagcctgactgtacatctcttggatttgtttcattaaaaagaagcactttatgtactgctgtcttttttttttttcttttgaagaacaggtttctctctgtccttgactcttgggtctgtgggccatggcatgagtgttttctagtagtagattggagggaaagctttgtgacacttagtactgtgtttttaagaagaaataatttggttccagatgtgttagaggatcttttgtactgaggtttttaacactttacttgggtttaccaagcctcaactggacagaccataaacagtccacaggcaccgttcctgccaggccccaacccacagggagtctctccgcagagccttcttggtgttgccctaacttgccagtggcctttgctcagagcctcctcctgtgacatgtgaacaatgaagaggcctgcgcctcctgccttgccgcctgcaaagcaaagaaactgccttttattttttaaccttaaaaagtagccagatagtaacaagactggctggctgatgagcaaagcctttgctctcacgcagaggaaggcttggatgtacaatgaaactgcctggaactaaaagcagtgaagcaagggaggcaatcacactgaagcgggtcttcctccaggaacggggtcccacaggcgtgttgttttaaataacctgatgctgtgtgcatgatgctggtgcttgaccatgaaaggaaagtctcatccttaaaatgtgttgtacttcacaatcctggactgttgcttcaagtaaacaatatccacattttgaaa

SEQ ID NO: 428581 - DNA, 1470 bp, Homo sapiens
gagctcaaggatccttaattaaattaattccccccccccccgagctcctgcagcggtggtcggctgttgggtgtggagtttcccagcgcccctcgggtccgaccctttgagcgttctgctccggcgccagcctacctcgctcctcggcgccatgaccacaaccaccaccttcaagggagtcgaccccaacagcaggaatagctcccgagttttgcggcctccaggtggtggatccaatttttcattaggttttgatgaaccaacagaacaacctgtgaggaagaacaaaatggcctctaatatctttgggacacctgaagaaaatcaagcttcttgggccaagtcagcaggtgccaagtctagtggtggcagggaagacttggagtcatctggactgcagagaaggaactcctctgaagcaagctccggagacttcttagatctgaagggagaaggtgatattcatgaaaatgtggacacagacttgccaggcagcctggggcagagtgaagagaagcccgtgcctgctgcgcctgtgcccagcccggtggccccggccccagtgccatccagaagaaatccccctggcggcaagtccagcctcgtcttgggttagctctgactgtcctgaacgctgtcgttctgtctgtttcctccatgcttgtgaactgcacaacttgagcctgactgtacatctcttggatttgtttcattaaaaagaagcactttatgtactgctgtcttttttttttttcttttgaagaacaggtttctctctgtccttgactcttgggtctgtgggccatggcatgagtgttttctagtagtagattggagggaaagctttgtgacacttagtactgtgtttttaagaagaaataatttggttccagatgtgttagaggatcttttgtactgaggtttttaacactttacttgggtttaccaagcctcaactggacagaccataaacagtccacaggcaccgttcctgccaggccccaacccacagggagtctctccgcagagccttcttggtgttgccctaacttgccagtggcctttgctcagagcctcctcctgtgacatgtgaacaatgaagaggcctgcgcctcctgccttgccgcctgcaaagcaaagaaactgccttttattttttaaccttaaaaagtagccagatagtaacaagactggctggctgatgagcaaagcctttgctctcacgcagaggaaggcttggatgtacaatgaaactgcctggaactaaaagcagtgaagcaagggaggcaatcacactgaagcgggtcttcctccaggaacggggtcccacaggcgtgttgttttaaataacctgatgctgtgtgcatgatgctggtgcttgaccatgaaaggaaagtctcatccttaaaatgtgttgtacttcacaatcctggactgttgcttcaagtaaacaatatccacattttgaaa

SEQ ID NO: 428582 - DNA, 1455 bp, Homo sapiens
ggtaccggtcccgagttctttggatgcagctcctgcagcggtggtcggctgttgggtgtggagtttcccagcgcccctcgggtccgaccctttgagcgttctgctccggcgccagcctacctcgctcctcggcgccatgaccacaaccaccaccttcaagggagtcgaccccaacagcaggaatagctcccgagttttgcggcctccaggtggtggatccaatttttcattaggttttgatgaaccaacagaacaacctgtgaggaagaacaaaatggcctctaatatctttgggacacctgaagaaaatcaagcttcttgggccaagtcagcaggtgccaagtctagtggtggcagggaagacttggagtcatctggactgcagagaaggaactcctctgaagcaagctccggagacttcttagatctgaagggagaaggtgatattcatgaaaatgtggacacagacttgccaggcagcctggggcagagtgaagagaagcccgtgcctgctgcgcctgtgcccagcccggtggccccggccccagtgccatccagaagaaatccccctggcggcaagtccagcctcgtcttgggttagctctgactgtcctgaacgctgtcgttctgtctgtttcctccatgcttgtgaactgcacaacttgagcctgactgtacatctcttggatttgtttcattaaaaagaagcactttatgtactgctgtcttttttttttttcttttgaagaacaggtttctctctgtccttgactcttgggtctgtgggccatggcatgagtgttttctagtagtagattggagggaaagctttgtgacacttagtactgtgtttttaagaagaaataatttggttccagatgtgttagaggatcttttgtactgaggtttttaacactttacttgggtttaccaagcctcaactggacagaccataaacagtccacaggcaccgttcctgccaggccccaacccacagggagtctctccgcagagccttcttggtgttgccctaacttgccagtggcctttgctcagagcctcctcctgtgacatgtgaacaatgaagaggcctgcgcctcctgccttgccgcctgcaaagcaaagaaactgccttttattttttaaccttaaaaagtagccagatagtaacaagactggctggctgatgagcaaagcctttgctctcacgcagaggaaggcttggatgtacaatgaaactgcctggaactaaaagcagtgaagcaagggaggcaatcacactgaagcgggtcttcctccaggaacggggtcccacaggcgtgttgttttaaataacctgatgctgtgtgcatgatgctggtgcttgaccatgaaaggaaagtctcatccttaaaatgtgttgtacttcacaatcctggactgttgcttcaagtaaacaatatccacattttgaaa

SEQ ID NO: 428583 - DNA, 1627 bp, Homo sapiens
aggctgagccgtggccgccacagcccatcgtaatgccgcatggtgcttggcactccagagagccaataggaatgaaagaattcatttgaatcggccaatgccggcgggttagggggcgggggttgaaaaccctataaaggcgtcgatcggccggacaggcggagcggcggctcctgcagcggtggtcggctgttgggtgtggagtttcccagcgcccctcgggtccgaccctttgagcgttctgctccggcgccagcctacctcgctcctcggcgccatgaccacaaccaccaccttcaagggagtcgaccccaacagcaggaatagctcccgagttttgcggcctccaggtggtggatccaatttttcattaggttttgatgaaccaacagaacaacctgtgaggaagaacaaaatggcctctaatatctttgggacacctgaagaaaatcaagcttcttgggccaagtcagcaggtgccaagtctagtggtggcagggaagacttggagtcatctggactgcagagaaggaactcctctgaagcaagctccggagacttcttagatctgaagggagaaggtgatattcatgaaaatgtggacacagacttgccaggcagcctggggcagagtgaagagaagcccgtgcctgctgcgcctgtgcccagcccggtggccccggccccagtgccatccagaagaaatccccctggcggcaagtccagcctcgtcttgggttagctctgactgtcctgaacgctgtcgttctgtctgtttcctccatgcttgtgaactgcacaacttgagcctgactgtacatctcttggatttgtttcattaaaaagaagcactttatgtactgctgtcttttttttttttcttttgaagaacaggtttctctctgtccttgactcttgggtctgtgggccatggcatgagtgttttctagtagtagattggagggaaagctttgtgacacttagtactgtgtttttaagaagaaataatttggttccagatgtgttagaggatcttttgtactgaggtttttaacactttacttgggtttaccaagcctcaactggacagaccataaacagtccacaggcaccgttcctgccaggccccaacccacagggagtctctccgcagagccttcttggtgttgccctaacttgccagtggcctttgctcagagcctcctcctgtgacatgtgaacaatgaagaggcctgcgcctcctgccttgccgcctgcaaagcaaagaaactgccttttattttttaaccttaaaaagtagccagatagtaacaagactggctggctgatgagcaaagcctttgctctcacgcagaggaaggcttggatgtacaatgaaactgcctggaactaaaagcagtgaagcaagggaggcaatcacactgaagcgggtcttcctccaggaacggggtcccacaggcgtgttgttttaaataacctgatgctgtgtgcatgatgctggtgcttgaccatgaaaggaaagtctcatccttaaaatgtgttgtacttcacaatcctggactgttgcttcaagtaaacaatatccacattttgaaaaaaaaaaaaaagggggggccgcaaagattcc

SEQ ID NO: 428584 - DNA, 1586 bp, Homo sapiens
aggctgagccgtggccgccacagcccatcgtaatgccgcatggtgcttggcactccagagagccaataggaatgaaagaattcatttgaatcggccaatgccggcgggttagggggcgggggttgaaaaccctataaaggcgtcgatcggccggacaggcggagcggcggctcctgcagcggtggtcggctgttgggtgtggagtttcccagcgcccctcgggtccgaccctttgagcgttctgctccggcgccagcctacctcgctcctcggcgccatgaccacaaccaccaccttcaagggagtcgaccccaacagcaggaatagctcccgagttttgcggcctccaggtggtggatccaatttttcattaggttttgatgaaccaacagaacaacctgtgaggaagaacaaaatggcctctaatatctttgggacacctgaagaaaatcaagcttcttgggccaagtcagcaggtgccaagtctagtggtggcagggaagacttggagtcatctggactgcagagaaggaactcctctgaagcaagctccggagacttcttagatctgaagggagaaggtgatattcatgaaaatgtggacacagacttgccaggcagcctggggcagagtgaagagaagcccgtgcctgctgcgcctgtgcccagcccggtggccccggccccagtgccatccagaagaaatccccctggcggcaagtccagcctcgtcttgggttagctctgactgtcctgaacgctgtcgttctgtctgtttcctccatgcttgtgaactgcacaacttgagcctgactgtacatctcttggatttgtttcattaaaaagaagcactttatgtactgctgtcttttttttttttcttttgaagaacaggtttctctctgtccttgactcttgggtctgtgggccatggcatgagtgttttctagtagtagattggagggaaagctttgtgacacttagtactgtgtttttaagaagaaataatttggttccagatgtgttagaggatcttttgtactgaggtttttaacactttacttgggtttaccaagcctcaactggacagaccataaacagtccacaggcaccgttcctgccaggccccaacccacagggagtctctccgcagagccttcttggtgttgccctaacttgccagtggcctttgctcagagcctcctcctgtgacatgtgaacaatgaagaggcctgcgcctcctgccttgccgcctgcaaagcaaagaaactgccttttattttttaaccttaaaaagtagccagatagtaacaagactggctggctgatgagcaaagcctttgctctcacgcagaggaaggcttggatgtacaatgaaactgcctggaactaaaagcagtgaagcaagggaggcaatcacactgaagcgggtcttcctccaggaacggggtcccacaggcgtgtctctccgcagagccttcttggtgttgccctaaccttgccagtggcctttgctcagagcctcctcctgtgacatgagaacaatgaagaggcctgcgcctcctgccttgccgcctgcaaagcaa

SEQ ID NO: 428585 - DNA, 1520 bp, Homo sapiens
aggctgagccgtggccgccacagcccatcgtaatgccgcatggtgcttggcactccagagagccaataggaatgaaagaattcatttgaatcggccaatgccggcgggttagggggcgggggttgaaaaccctataaaggcgtcgatcggccggacaggcggagcggcggctcctgcagcggtggtcggctgttgggtgtggagtttcccagcgcccctcgggtccgaccctttgagcgttctgctccggcgccagcctacctcgctcctcggcgccatgaccacaaccaccaccttcaagggagtcgaccccaacagcaggaatagctcccgagttttgcggcctccaggtggtggatccaatttttcattaggttttgatgaaccaacagaacaacctgtgaggaagaacaaaatggcctctaatatctttgggacacctgaagaaaatcaagcttcttgggccaagtcagcaggtgccaagtctagtggtggcagggaagacttggagtcatctggactgcagagaaggaactcctctgaagcaagctccggagacttcttagatctgaagggagaaggtgatattcatgaaaatgtggacacagacttgccaggcagcctggggcagagtgaagagaagcccgtgcctgctgcgcctgtgcccagcccggtggccccggccccagtgccatccagaagaaatccccctggcggcaagtccagcctcgtcttgggttagctctgactgtcctgaacgctgtcgttctgtctgtttcctccatgcttgtgaactgcacaacttgagcctgactgtacatctcttggatttgtttcattaaaaagaagcactttatgtactgctgtcttttttttttttcttttgaagaacaggtttctctctgtccttgactcttgggtctgtgggccatggcatgagtgttttctagtagtagattggagggaaagctttgtgacaactttacttgggtttaccaagcctcaactggacagaccataaacagtccacaggcaccgttcctgccaggccccaacccacagggagtctctccgcagagccttcttggtgttgccctaacttgccagtggcctttgctcagagcctcctcctgtgacatgtgaacaatgaagaggcctgcgcctcctgccttgccgcctgcaaagcaaagaaactgccttttattttttaaccttaaaaagtagccagatagtaacaagactggctggctgatgagcaaagcctttgctctcacgcagaggaaggcttggatgtacaatgaaactgcctggaactaaaagcagtgaagcaagggaggcaatcacactgaagcgggtcttcctccaggaacggggtcccacaggcgtgttgttttaaataacctgatgctgtgtgcatgatgctggtgcttgaccatgaaaggaaagtctcatccttaaaatgtgttgtacttcacaatcctggactgttgcttcaagtaaacaatatccacattttgaaa

SEQ ID NO: 428586 - DNA, 1691 bp, Homo sapiens
aggctgagccgtggccgccacagcccatcgtaatgccgcatggtgcttggcactccagagagccaataggaatgaaagaattcatttgaatcggccaatgccggcgggttagggggcgggggttgaaaaccctataaaggcgtcgatcggccggacaggcggagcggcggctcctgcagcggtggtcggctgttgggtgtggagtttcccagcgcccctcgggtccgaccctttgagcgttctgctccggcgccagcctacctcgctcctcggcgccatgaccacaaccaccaccttcaagggagtcgaccccaacagcaggaatagctcccgagacacggggtcttgccatgttgcccaggctggtcttgaactcctaggctcaagtgatgatcctgccttggcctcctagggtgctgggattacagagttttgcggcctccaggtggtggatccaatttttcattaggttttgatgaaccaacagaacaacctgtgaggaagaacaaaatggcctctaatatctttgggacacctgaagaaaatcaagcttcttgggccaagtcagcaggtgccaagtctagtggtggcagggaagacttggagtcatctggactgcagagaaggaactcctctgaagcaagctccggagacttcttagatctgaagggagaaggtgatattcatgaaaatgtggacacagacttgccaggcagcctggggcagagtgaagagaagcccgtgcctgctgcgcctgtgcccagcccggtggccccggccccagtgccatccagaagaaatccccctggcggcaagtccagcctcgtcttgggttagctctgactgtcctgaacgctgtcgttctgtctgtttcctccatgcttgtgaactgcacaacttgagcctgactgtacatctcttggatttgtttcattaaaaagaagcactttatgtactgctgtcttttttttttttcttttgaagaacaggtttctctctgtccttgactcttgggtctgtgggccatggcatgagtgttttctagtagtagattggagggaaagctttgtgacacttagtactgtgtttttaagaagaaataatttggttccagatgtgttagaggatcttttgtactgaggtttttaacactttacttgggtttaccaagcctcaactggacagaccataaacagtccacaggcaccgttcctgccaggccccaacccacagggagtctctccgcagagccttcttggtgttgccctaacttgccagtggcctttgctcagagcctcctcctgtgacatgtgaacaatgaagaggcctgcgcctcctgccttgccgcctgcaaagcaaagaaactgccttttattttttaaccttaaaaagtagccagatagtaacaagactggctggctgatgagcaaagcctttgctctcacgcagaggaaggcttggatgtacaatgaaactgcctggaactaaaagcagtgaagcaagggaggcaatcacactgaagcgggtcttcctccaggaacggggtcccacaggcgtgttgttttaaataacctgatgctgtgtgcatgatgctggtgcttgaccatgaaaggaaagtctcatccttaaaatgtgttgtacttcacaatcctggactgttgcttcaagtaaacaatatccacattttgaaa

SEQ ID NO: 428587 - DNA, 2607 bp, Homo sapiens
agccccgtgcgctgtgctcgcgccggggcgggtggcggggttctgccgtcggcgccgcctttgtgccgcctggcgagccctgcgcgccggccccacccgggtccctgctgctctccattcattccttccacggagtcaggggctgaggaggccggggctggtcgcccctcggagcacggccggttttcgttaatcggaaccttcggggagggcttcgctttctcctgtgtgcatcccggctggtgcatccccagggtggtgggcttggccccccaggtgcccggggatcctttagggccccatgcatggtcaggtcctattgtcccattgatgggccacgcgctcctgtctctcccccgtggcatgcggttggtctcgctctcgcgcgcagccattggatccggagaccggatcgatcaggtccggcgggctccttaccctcgccgtgcccccactccttattcggacctacctgacaggtgcatgtgtggtcgagcggggctggtcatcgcgacccttcaccccccattgaggacccaatcgttcttcccctcttcgaagtgcctcccctcttccaagtgtctccccttcctaacaaaggaaagaccccttctccccatccctgcgctcatttctaaggcggggggcgggggcgggcgcggggaacgagccaacccgagtgggttttctgcgcttaaaccttcggaccgtggcctttgcatcctaccttcgcttcctcctttgacgtttgcccagtgagttcatccctggccctggttcccttgcaggaggaggtttcttgttcttgggcggggccggagacatccattgtctctaacgtggtagcgctacctgggaagcgggggatttttcttgcccttcttcccactgctttttgggcttggggcactgggtacagtgtttggacaggaacccttttccaagtccttgcttaacttacttggtggaagggtttggattctgtggaaggtgtccacattgtctcagctaattgcacactgttctttaaggtgggttacagttatgtctgggatcctcttcaaggcttggaagaagcttaaatcacttttttgagcatgtattttacatcgattatgacctgcattcatgtgtggctaccctcggggtcctggccaagtggcacaaagggagccattttgtggggctaagaagacacgtgaaatagccatatctcacaggggttagagaacttgggaacaaaaagcacgcctcactcagcaattgagccttaggaggaaagcatgggaaatgacattcctttacaactcaatactttcaggtttacaaggtcaaaaagactagagttttgcggcctccaggtggtggatccaatttttcattaggttttgatgaaccaacagaacaacctgtgaggaagaacaaaatggcctctaatatctttgggacacctgaagaaaatcaagcttcttgggccaagtcagcaggtgccaagtctagtggtggcagggaagacttggagtcatctggactgcagagaaggaactcctctgaagcaagctccggagacttcttagatctgaagggagaaggtgatattcatgaaaatgtggacacagacttgccaggcagcctggggcagagtgaagagaagcccgtgcctgctgcgcctgtgcccagcccggtggccccggccccagtgccatccagaagaaatccccctggcggcaagtccagcctcgtcttgggttagctctgactgtcctgaacgctgtcgttctgtctgtttcctccatgcttgtgaactgcacaacttgagcctgactgtacatctcttggatttgtttcattaaaaagaagcactttatgtactgctgtcttttttttttttcttttgaagaacaggtttctctctgtccttgactcttgggtctgtgggccatggcatgagtgttttctagtagtagattggagggaaagctttgtgacacttagtactgtgtttttaagaagaaataatttggttccagatgtgttagaggatcttttgtactgaggtttttaacactttacttgggtttaccaagcctcaactggacagaccataaacagtccacaggcaccgttcctgccaggccccaacccacagggagtctctccgcagagccttcttggtgttgccctaacttgccagtggcctttgctcagagcctcctcctgtgacatgtgaacaatgaagaggcctgcgcctcctgccttgccgcctgcaaagcaaagaaactgccttttattttttaaccttaaaaagtagccagatagtaacaagactggctggctgatgagcaaagcctttgctctcacgcagaggaaggcttggatgtacaatgaaactgcctggaactaaaagcagtgaagcaagggaggcaatcacactgaagcgggtcttcctccaggaacggggtcccacaggcgtgttgttttaaataacctgatgctgtgtgcatgatgctggtgcttgaccatgaaaggaaagtctcatccttaaaatgtgttgtacttcacaatcctggactgttgcttcaagtaaacaatatccacattttgaaa

SEQ ID NO: 428588 - DNA, 1683 bp, Homo sapiens
agccccgtgcgctgtgctcgcgccggggcgggtggcggggttctgccgtcggcgccgcctttgtgccgcctggcgagccctgcgcgccggccccacccgggtccctgctgctctccattcattccttccacggagtcaggggctgaggaggccggggctggtcgcccctcggagcacggccggttttcgttaatcggaaccttcggggagggcttcgctttctcctgtgtgcatcccggctggtgcatccccagggtggtgggcttggccccccaggtgcccggggatcctttagggccccatgcatggtcaggtcctattgtcccattgatgggccacgcgctcctgtctctcccccgtggcatgcggttggtctcgctctcgcgcgcagccattggatccggagaccggatcgatcagagttttgcggcctccaggtggtggatccaatttttcattaggttttgatgaaccaacagaacaacctgtgaggaagaacaaaatggcctctaatatctttgggacacctgaagaaaatcaagcttcttgggccaagtcagcaggtgccaagtctagtggtggcagggaagacttggagtcatctggactgcagagaaggaactcctctgaagcaagctccggagacttcttagatctgaagggagaaggtgatattcatgaaaatgtggacacagacttgccaggcagcctggggcagagtgaagagaagcccgtgcctgctgcgcctgtgcccagcccggtggccccggccccagtgccatccagaagaaatccccctggcggcaagtccagcctcgtcttgggttagctctgactgtcctgaacgctgtcgttctgtctgtttcctccatgcttgtgaactgcacaacttgagcctgactgtacatctcttggatttgtttcattaaaaagaagcactttatgtactgctgtcttttttttttttcttttgaagaacaggtttctctctgtccttgactcttgggtctgtgggccatggcatgagtgttttctagtagtagattggagggaaagctttgtgacacttagtactgtgtttttaagaagaaataatttggttccagatgtgttagaggatcttttgtactgaggtttttaacactttacttgggtttaccaagcctcaactggacagaccataaacagtccacaggcaccgttcctgccaggccccaacccacagggagtctctccgcagagccttcttggtgttgccctaacttgccagtggcctttgctcagagcctcctcctgtgacatgtgaacaatgaagaggcctgcgcctcctgccttgccgcctgcaaagcaaagaaactgccttttattttttaaccttaaaaagtagccagatagtaacaagactggctggctgatgagcaaagcctttgctctcacgcagaggaaggcttggatgtacaatgaaactgcctggaactaaaagcagtgaagcaagggaggcaatcacactgaagcgggtcttcctccaggaacggggtcccacaggcgtgttgttttaaataacctgatgctgtgtgcatgatgctggtgcttgaccatgaaaggaaagtctcatccttaaaatgtgttgtacttcacaatcctggactgttgcttcaagtaaacaatatccacattttgaaa

SEQ ID NO: 428589 - DNA, 1742 bp, Homo sapiens
agccccgtgcgctgtgctcgcgccggggcgggtggcggggttctgccgtcggcgccgcctttgtgccgcctggcgagccctgcgcgccggccccacccgggtccctgctgctctccattcattccttccacggagtcaggggctgaggaggccggggctggtcgcccctcggagcacggccggttttcgttaatcggaaccttcggggagggcttcgctttctcctgtgtgcatcccggctggtgcatccccagggtggtgggcttggccccccaggtgcccggggatcctttagggccccatgcatggtcaggtcctattgtcccattgatgggccacgcgctcctgtctctcccccgtggcatgcggttggtctcgctctcgcgcgcagccattggatccggagaccggatcgatcaggtccggcgggctccttaccctcgccgtgcccccactccttattcggacctacctgacagagttttgcggcctccaggtggtggatccaatttttcattaggttttgatgaaccaacagaacaacctgtgaggaagaacaaaatggcctctaatatctttgggacacctgaagaaaatcaagcttcttgggccaagtcagcaggtgccaagtctagtggtggcagggaagacttggagtcatctggactgcagagaaggaactcctctgaagcaagctccggagacttcttagatctgaagggagaaggtgatattcatgaaaatgtggacacagacttgccaggcagcctggggcagagtgaagagaagcccgtgcctgctgcgcctgtgcccagcccggtggccccggccccagtgccatccagaagaaatccccctggcggcaagtccagcctcgtcttgggttagctctgactgtcctgaacgctgtcgttctgtctgtttcctccatgcttgtgaactgcacaacttgagcctgactgtacatctcttggatttgtttcattaaaaagaagcactttatgtactgctgtcttttttttttttcttttgaagaacaggtttctctctgtccttgactcttgggtctgtgggccatggcatgagtgttttctagtagtagattggagggaaagctttgtgacacttagtactgtgtttttaagaagaaataatttggttccagatgtgttagaggatcttttgtactgaggtttttaacactttacttgggtttaccaagcctcaactggacagaccataaacagtccacaggcaccgttcctgccaggccccaacccacagggagtctctccgcagagccttcttggtgttgccctaacttgccagtggcctttgctcagagcctcctcctgtgacatgtgaacaatgaagaggcctgcgcctcctgccttgccgcctgcaaagcaaagaaactgccttttattttttaaccttaaaaagtagccagatagtaacaagactggctggctgatgagcaaagcctttgctctcacgcagaggaaggcttggatgtacaatgaaactgcctggaactaaaagcagtgaagcaagggaggcaatcacactgaagcgggtcttcctccaggaacggggtcccacaggcgtgttgttttaaataacctgatgctgtgtgcatgatgctggtgcttgaccatgaaaggaaagtctcatccttaaaatgtgttgtacttcacaatcctggactgttgcttcaagtaaacaatatccacattttgaaa

SEQ ID NO: 428590 - DNA, 1625 bp, Homo sapiens
taaacttctttgaaagtatattcagccaagcccagtagagtaaggtccattagatcttttgccatttctgaaaaggggacaccaaccaggctgttatttatgatgagttccatgctgtttcagctgccttgtgtgatcgatgaccttattacaagtattataaagcagtatttagtatcttaacatccagcactgaatgtagacactgatggagttgattcttttttcctgttagcagctatctgttgtaggggtgagggagatgaatgggtgaggaaagtgaaatgaaagttgtctgaaaagatttatgccaagaaatgtttcagtatgatctgaagttgatgttttgccattatttgcagagttttgcggcctccaggtggtggatccaatttttcattaggttttgatgaaccaacagaacaacctgtgaggaagaacaaaatggcctctaatatctttgggacacctgaagaaaatcaagcttcttgggccaagtcagcaggtgccaagtctagtggtggcagggaagacttggagtcatctggactgcagagaaggaactcctctgaagcaagctccggagacttcttagatctgaagggagaaggtgatattcatgaaaatgtggacacagacttgccaggcagcctggggcagagtgaagagaagcccgtgcctgctgcgcctgtgcccagcccggtggccccggccccagtgccatccagaagaaatccccctggcggcaagtccagcctcgtcttgggttagctctgactgtcctgaacgctgtcgttctgtctgtttcctccatgcttgtgaactgcacaacttgagcctgactgtacatctcttggatttgtttcattaaaaagaagcactttatgtactgctgtcttttttttttttcttttgaagaacaggtttctctctgtccttgactcttgggtctgtgggccatggcatgagtgttttctagtagtagattggagggaaagctttgtgacacttagtactgtgtttttaagaagaaataatttggttccagatgtgttagaggatcttttgtactgaggtttttaacactttacttgggtttaccaagcctcaactggacagaccataaacagtccacaggcaccgttcctgccaggccccaacccacagggagtctctccgcagagccttcttggtgttgccctaacttgccagtggcctttgctcagagcctcctcctgtgacatgtgaacaatgaagaggcctgcgcctcctgccttgccgcctgcaaagcaaagaaactgccttttattttttaaccttaaaaagtagccagatagtaacaagactggctggctgatgagcaaagcctttgctctcacgcagaggaaggcttggatgtacaatgaaactgcctggaactaaaagcagtgaagcaagggaggcaatcacactgaagcgggtcttcctccaggaacggggtcccacaggcgtgttgttttaaataacctgatgctgtgtgcatgatgctggtgcttgaccatgaaaggaaagtctcatccttaaaatgtgttgtacttcacaatcctggactgttgcttcaagtaaacaatatccacattttgaaa

SEQ ID NO: 428591 - DNA, 1311 bp, Homo sapiens
ctcaattagaaaactgcaatttggttccaccacatcctgactactaccagttttgcggcctccaggtggtggatccaatttttcattaggttttgatgaaccaacagaacaacctgtgaggaagaacaaaatggcctctaatatctttgggacacctgaagaaaatcaagcttcttgggccaagtcagcaggtgccaagtctagtggtggcagggaagacttggagtcatctggactgcagagaaggaactcctctgaagcaagctccggagacttcttagatctgaagggagaaggtgatattcatgaaaatgtggacacagacttgccaggcagcctggggcagagtgaagagaagcccgtgcctgctgcgcctgtgcccagcccggtggccccggccccagtgccatccagaagaaatccccctggcggcaagtccagcctcgtcttgggttagctctgactgtcctgaacgctgtcgttctgtctgtttcctccatgcttgtgaactgcacaacttgagcctgactgtacatctcttggatttgtttcattaaaaagaagcactttatgtactgctgtcttttttttttttcttttgaagaacaggtttctctctgtccttgactcttgggtctgtgggccatggcatgagtgttttctagtagtagattggagggaaagctttgtgacacttagtactgtgtttttaagaagaaataatttggttccagatgtgttagaggatcttttgtactgaggtttttaacactttacttgggtttaccaagcctcaactggacagaccataaacagtccacaggcaccgttcctgccaggccccaacccacagggagtctctccgcagagccttcttggtgttgccctaacttgccagtggcctttgctcagagcctcctcctgtgacatgtgaacaatgaagaggcctgcgcctcctgccttgccgcctgcaaagcaaagaaactgccttttattttttaaccttaaaaagtagccagatagtaacaagactggctggctgatgagcaaagcctttgctctcacgcagaggaaggcttggatgtacaatgaaactgcctggaactaaaagcagtgaagcaagggaggcaatcacactgaagcgggtcttcctccaggaacggggtcccacaggcgtgttgttttaaataacctgatgctgtgtgcatgatgctggtgcttgaccatgaaaggaaagtctcatccttaaaatgtgttgtacttcacaatcctggactgttgcttcaagtaaacaatatccacattttgaaa

SEQ ID NO: 428592 - DNA, 1307 bp, Homo sapiens
gtctccccgccagtctgtgctaccatcagcaggaatagctcccgagttttgcggcctccaggtggtggatccaatttttcattaggttttgatgaaccaacagaacaacctgtgaggaagaacaaaatggcctctaatatctttgggacacctgaagaaaatcaagcttcttgggccaagtcagcaggtgccaagtctagtggtggcagggaagacttggagtcatctggactgcagagaaggaactcctctgaagcaagctccggagacttcttagatctgaagggagaaggtgatattcatgaaaatgtggacacagacttgccaggcagcctggggcagagtgaagagaagcccgtgcctgctgcgcctgtgcccagcccggtggccccggccccagtgccatccagaagaaatccccctggcggcaagtccagcctcgtcttgggttagctctgactgtcctgaacgctgtcgttctgtctgtttcctccatgcttgtgaactgcacaacttgagcctgactgtacatctcttggatttgtttcattaaaaagaagcactttatgtactgctgtcttttttttttttcttttgaagaacaggtttctctctgtccttgactcttgggtctgtgggccatggcatgagtgttttctagtagtagattggagggaaagctttgtgacacttagtactgtgtttttaagaagaaataatttggttccagatgtgttagaggatcttttgtactgaggtttttaacactttacttgggtttaccaagcctcaactggacagaccataaacagtccacaggcaccgttcctgccaggccccaacccacagggagtctctccgcagagccttcttggtgttgccctaacttgccagtggcctttgctcagagcctcctcctgtgacatgtgaacaatgaagaggcctgcgcctcctgccttgccgcctgcaaagcaaagaaactgccttttattttttaaccttaaaaagtagccagatagtaacaagactggctggctgatgagcaaagcctttgctctcacgcagaggaaggcttggatgtacaatgaaactgcctggaactaaaagcagtgaagcaagggaggcaatcacactgaagcgggtcttcctccaggaacggggtcccacaggcgtgttgttttaaataacctgatgctgtgtgcatgatgctggtgcttgaccatgaaaggaaagtctcatccttaaaatgtgttgtacttcacaatcctggactgttgcttcaagtaaacaatatccacattttgaaa

SEQ ID NO: 428593 - DNA, 1094 bp, Homo sapiens
aggctgagccgtggccgccacagcccatcgtaatgccgcatggtgcttggcactccagagagccaataggaatgaaagaattcatttgaatcggccaatgccggcgggttagggggcgggggttgaaaaccctataaaggcgtcgatcggccggacaggcggagcggcggctcctgcagcggtggtcggctgttgggtgtggagtttcccagcgcccctcgggtccgaccctttgagcgttctgctccggcgccagcctacctcgctcctcggcgccatgaccacaaccaccaccttcaagggagtcgaccccaacagcaggaatagctcccgagttttgcggcctccaggtggtggatccaatttttcattaggttttgatgaaccaacagaacaacctgtgaggaagaacaaaatggcctctaatatctttgggacacctgaagaaaatcaagcttcttgggccaagtcagcaggtgccaagtctagtggtggcagggaagacttggagtcatctggactgcagagaaggaactcctctgaagcaagctccggagacttcttagatctgaagggagaaggtgatattcatgaaaatgtggacacagacttgccaggcagcctggggcagagtgaagagaagcccgtgcctgctgcgcctgtgcccagcccggtggccccggccccagtgccatccagaagaaatccccctggcggcaagtccagcctcgtcttgggttagctctgactgtcctgaacgctgtcgttctgtctgtttcctccatgcttgtgaactgcacaacttgagcctgactgtacatctcttggatttgtttcattaaaaagaagcacttaaaaaaaaaaaaaaaaaaaaaaaaaaaaaaaaacaacaacataaaaatccttgcataccttgttcaattggagaattttaatgtttttcatttatcattgtaaaaccaaggacaattttataacttttttgtacgtagctgttacatgtagggcaatctgtctttaagtagggataaattactctaaaacaaaaaagaatcctagatagttttcccttcaagtcaagcgtcttgttgttt

SEQ ID NO: 428594 - DNA, 1160 bp, Homo sapiens
gagctcaaggatccttaattaaattaattccccccccccccgagctcctgcagcggtggtcggctgttgggtgtggagtttcccagcgcccctcgggtccgaccctttgagcgttctgctccggcgccagcctacctcgctcctcggcgccatgaccacaaccaccaccttcaagggagtcgaccccaacagcaggaatagctcccgagttttgcggcctccaggtggtggatccaatttttcattaggttttgatgaaccaacagaacaacctgtgaggaagaacaaaatggcctctaatatctttgggacacctgaagaaaatcaagcttcttgggccaagtcagcaggtgccaagtctagtggtggcagggaagacttggagtcatctggactgcagagaaggaactcctctgaagcaagctccggagacttcttagatctgaagggagaaggtgatattcatgaaaatgtggacacagacttgccaggcagcctggggcagagtgaagagaagcccgtgcctgctgcgcctgtgcccagcccggtggccccggccccagtgccatccagaagaaatccccctggcggcaagtccagcctcgtcttgggttagctcactttacttgggtttaccaagcctcaactggacagaccataaacagtccacaggcaccgttcctgccaggccccaacccacagggagtctctccgcagagccttcttggtgttgccctaacttgccagtggcctttgctcagagcctcctcctgtgacatgtgaacaatgaagaggcctgcgcctcctgccttgccgcctgcaaagcaaagaaactgccttttattttttaaccttaaaaagtagccagatagtaacaagactggctggctgatgagcaaagcctttgctctcacgcagaggaaggcttggatgtacaatgaaactgcctggaactaaaagcagtgaagcaagggaggcaatcacactgaagcgggtcttcctccaggaacggggtcccacaggcgtgttgttttaaataacctgatgctgtgtgcatgatgctggtgcttgaccatgaaaggaaagtctcatccttaaaatgtgttgtacttcacaatcctggactgttgcttcaagtaaacaatatccacattttgaaa

SEQ ID NO: 428595 - DNA, 1400 bp, Homo sapiens
tgatggcagtaatctcggggtataaggtacgaggctgggtctcctgcagcggtggtcggctgttgggtgtggagtttcccagcgcccctcgggtccgaccctttgagcgttctgctccggcgccagcctacctcgctcctcggcgccatgaccacaaccaccaccttcaagggagtcgaccccaacagcaggaatagctcccgagttttgcggcctccaggtggtggatccaatttttcattaggttttgatgaaccaacagaacaacctgtgaggaagaacaaaatggcctctaatatctttgggacacctgaagaaaatcaagcttcttgggccaagtcagcaggtgccaagtctagtggtggcagggaagacttggagtcatctggactgcagagaaggaactcctctgaagcaagctccggagacttcttagatctgaagggagaaggtgatagagaaggtgatattcatgaaaatgtggacacagacttgccatccagaagaaatccccctggcggcaagtccagcctcgtcttgggttagctctgactgtcctgaacgctgtcgttctgtctgtttcctccatgcttgtgaactgcacaacttgagcctgactgtacatctcttggatttgtttcattaaaaagaagcactttatgtactgctgtcttttttttttttcttttgaagaacaggtttctctctgtccttgactcttgggtctgtgggccatggcatgagtgttttctagtagtagattggagggaaagctttgtgacacttagtactgtgtttttaagaagaaataatttggttccagatgtgttagaggatcttttgtactgaggtttttaacactttacttgggtttaccaagcctcaactggacagaccataaacagtccacaggcaccgttcctgccaggccccaacccacagggagtctctccgcagagccttcttggtgttgccctaacttgccagtggcctttgctcagagcctcctcctgtgacatgtgaacaatgaagaggcctgcgcctcctgccttgccgcctgcaaagcaaagaaactgccttttattttttaaccttaaaaagtagccagatagtaacaagactggctggctgatgagcaaagcctttgctctcacgcagaggaaggcttggatgtacaatgaaactgcctggaactaaaagcagtgaagcaagggaggcaatcacactgaagcgggtcttcctccaggaacggggtcccacaggcgtgttgttttaaataacctgatgctgtgtgcatgatgctggtgcttgaccatgaaaggaaagtctcatccttaaaatgtgttgtacttcacaatcctggactgttgcttcaagtaaacaatatccacattttgaaa

SEQ ID NO: 428596 - DNA, 1308 bp, Homo sapiens
tgatggcagtaatctcggggtataaggtacgaggctgggtctcctgcagcggtggtcggctgttgggtgtggagtttcccagcgcccctcgggtccgaccctttgagcgttctgctccggcgccagcctacctcgctcctcggcgccatgaccacaaccaccaccttcaagggagtcgaccccaacagcaggaatagctcccgagttttgcggcctccaggtggtggatccaatttttcattaggttttgatgaaccaacagaacaacctgtgaggaagaacaaaatggcctctaatatctttgggacacctgaagaaaatcaagcttcttgggccaagtcagcaggtgccaagtctagtggtggcagggaagacttggagtcatctggactgcagagaaggaactcctctgaagcaagctccggagacttcttagatctgaagggagaaggtgatatgactgtcctgaacgctgtcgttctgtctgtttcctccatgcttgtgaactgcacaacttgagcctgactgtacatctcttggatttgtttcattaaaaagaagcactttatgtactgctgtcttttttttttttcttttgaagaacaggtttctctctgtccttgactcttgggtctgtgggccatggcatgagtgttttctagtagtagattggagggaaagctttgtgacacttagtactgtgtttttaagaagaaataatttggttccagatgtgttagaggatcttttgtactgaggtttttaacactttacttgggtttaccaagcctcaactggacagaccataaacagtccacaggcaccgttcctgccaggccccaacccacagggagtctctccgcagagccttcttggtgttgccctaacttgccagtggcctttgctcagagcctcctcctgtgacatgtgaacaatgaagaggcctgcgcctcctgccttgccgcctgcaaagcaaagaaactgccttttattttttaaccttaaaaagtagccagatagtaacaagactggctggctgatgagcaaagcctttgctctcacgcagaggaaggcttggatgtacaatgaaactgcctggaactaaaagcagtgaagcaagggaggcaatcacactgaagcgggtcttcctccaggaacggggtcccacaggcgtgttgttttaaataacctgatgctgtgtgcatgatgctggtgcttgaccatgaaaggaaagtctcatccttaaaatgtgttgtacttcacaatcctggactgttgcttcaagtaaacaatatccacattttgaaa

SEQ ID NO: 428597 - DNA, 998 bp, Homo sapiens
gggaatacgacttgacccgacagacagaggcgtggggacaactgggtctgtagggcgacgcttttatccgagacagatccggcccctcctgtgccatccagaagaaatccccctggcggcaagtccagcctcgtcttgggttagctctgactgtcctgaacgctgtcgttctgtctgtttcctccatgcttgtgaactgcacaacttgagcctgactgtacatctcttggatttgtttcattaaaaagaagcactttatgtactgctgtcttttttttttttcttttgaagaacaggtttctctctgtccttgactcttgggtctgtgggccatggcatgagtgttttctagtagtagattggagggaaagctttgtgacacttagtactgtgtttttaagaagaaataatttggttccagatgtgttagaggatcttttgtactgaggtttttaacactttacttgggtttaccaagcctcaactggacagaccataaacagtccacaggcaccgttcctgccaggccccaacccacagggagtctctccgcagagccttcttggtgttgccctaacttgccagtggcctttgctcagagcctcctcctgtgacatgtgaacaatgaagaggcctgcgcctcctgccttgccgcctgcaaagcaaagaaactgccttttattttttaaccttaaaaagtagccagatagtaacaagactggctggctgatgagcaaagcctttgctctcacgcagaggaaggcttggatgtacaatgaaactgcctggaactaaaagcagtgaagcaagggaggcaatcacactgaagcgggtcttcctccaggaacggggtcccacaggcgtgttgttttaaataacctgatgctgtgtgcatgatgctggtgcttgaccatgaaaggaaagtctcatccttaaaatgtgttgtacttcacaatcctggactgttgcttcaagtaaacaatatccacattttgaaa

SEQ ID NO: 428598 - DNA, 1004 bp, Homo sapiens
gagctcaaggatccttaattaaattaattccccccccccccgagctcctgcagcggtggtcggctgttgggtgtggagtttcccagcgcccctcgggtccgaccctttgagcgttctgctccggcgccagcctacctcgctcctcggcgccatgaccacaaccaccaccttcaagggagtcgaccccaacagcaggaatagctcccgagttttgcggcctccaggtggtggatccaatttttcattaggttttgatgaaccaacagaacaacctgtgaggaagaacaaaatggcctctaatatctttgggacacctgaagaaaatcaagcttcttgggccaagtcagcaggtgccaagtctagtggtggcagggaagacttggagtcatctggactgcagagaaggaactcctctgaagcaagctccggagacttcttagatctgaagggagaaggtgatattcatgaaaatgtggacacagacttgccaggcagcctggggcagagtgaagagaagcccgtgcctgctgcgcctgtgcccagccccaacccacagggagtctctccgcagagccttcttggtgttgccctaacttgccagtggcctttgctcagagcctcctcctgtgacatgtgaacaatgaagaggcctgcgcctcctgccttgccgcctgcaaagcaaagaaactgccttttattttttaaccttaaaaagtagccagatagtaacaagactggctggctgatgagcaaagcctttgctctcacgcagaggaaggcttggatgtacaatgaaactgcctggaactaaaagcagtgaagcaagggaggcaatcacactgaagcgggtcttcctccaggaacggggtcccacaggcgtgtctctccgcagagccttcttggtgttgccctaaccttgccagtggcctttgctcagagcctcctcctgtgacatgagaacaatgaagaggcctgcgcctcctgccttgccgcctgcaaagcaa

SEQ ID NO: 428599 - DNA, 1112 bp, Homo sapiens
tgatggcagtaatctcggggtataaggtacgaggctgggtctcctgcagcggtggtcggctgttgggtgtggagtttcccagcgcccctcgggtccgaccctttgagcgttctgctccggcgccagcctacctcgctcctcggcgccatgaccacaaccaccaccttcaagggagtcgaccccaacagcaggaatagctcccgagttttgcggcctccaggtggtggatccaatttttcattaggttttgatgaaccaacagaacaacctgtgaggaagaacaaaatggcctctaatatctttgggacacctgaagaaaatcaagcttcttgggccaagtcagcaggtgccaagtctagtggtggcagggaagacttggagtcatctggactgcagagaaggaactcctctgaagcaagctccggagacttcttagatctgaagggagaaggtgatacagcatgaggccagaaaggctttcaggtcaatatgattctgaaatttgtactaagagtttcagttcacccactggaattttacattgaggtagttaggaaagggactgggccatattgataatggaagattgatagtaaaatcatagaagtgtgttaacatggtctcagtctgtttctgtatctcttttaccattaggatttgttttatctcccctattgatttttggaacttgtggatctttctcacttcctgtgtgtctcatatatagaagcatttctgagttcagaactgctttgcgttgaactccaggagactagtgctggcattaccattggttgtgtctgcagttgaatactgccaccaagccccccagggggtgtgctgcgaagtggaaagaccccgcccgactaagcactaaagccctcagagcacagtgaggcatcacctgtctgagtggggagagaactggagaagggctttggaactgataggggtccttccataactattatctagtttccccttatcggggaaaggagagagaaatgaaaggagagatttaccagttttccattctaataaaagatctctgaagtgctaattggtgttaggtcctcagaggaaatgttggggtttgttgtagacgtggtact

SEQ ID NO: 428600 - DNA, 349 bp, Homo sapiens
gagatgaatgggtgaggaaagtgaaatgaaagttgtctgaaaagatttatgccaagaaatgtttcagtatgatctgaagttgatgttttgccattatttgcagagttttgcggcctccaggtggtggatccaatttttcattaggttttgatgaaccaacagaacaacctgtgaggaagaacaaaatggcctctaatatctttgggacacctgaagaaaatcaagcttcttgggccaagtcagcaggtactcttgttatctgtgctcactgttcaaagggatgggcccagcatcaacagccacagatgcagcttgggcaccagcatgtgcccccgtgtctaaaaaacaa

SEQ ID NO: 428601 - DNA, 1133 bp, Homo sapiens
agtcccggaactgctagaacgaaccattcgcatatggagggggtgacccaccatctcagaacattaaaaaagggaaagaatcccctggtgaactacagtgaaagtcttattgagcatttaaatggaaataaaaatattcagtggacctaatgaagagtagatgactttcccttctgtcccctccccgacaggcactcatggtaccggcgccggcgcagctgtgactgtcgctgcagacggaaactgactggggtcaattcaagtcatgcaggctgtgagaaacgcggggtcgcggttcctgcggtcctggacttggccccagacagccggcagggtcgtggccagaacgccggccgggaccatctgcacaggcgctcgacagctccaagacgctgcggccaagcagaaagttgaacagaacgcggctcccagccacaccaagttcagcatttaccctcccattccaggagaggagagctctctgaggtgggcaggaaagaaatttgaggagatcccaattgcacacattaaagcatcccacaacaacacacagatccaggtagtctctgctagtaatgagccccttgcctttgcttcctgtggcacagagggatttcggaatgccaagaagggcacaggcatcgcagcacagacagcaggcatagccgcagcggcgagagctaaacaaaagggcgtgatccacatccgagttgtggtgaaaggcctggggccaggacgcttgtctgccatgcacggactgatcatgggcggcctggaagtgatctcaatcacagacaacaccccaatcccacacaacggctgccgccccaggaaggctcggaagctgtgatgggaaggaggcctgcacttggacctgacctcaagcctcagctccagtgggaccttgtaaaatgctccctgtcagagctctccagaatatgcttgttggagatccttcaggcagtaagggagagttttgcctccttacacagtggcctttgcttgcacctccagctggagatgggtgtgccccagaagtaagctttgcatctcttacaagaggggagctacaggggcagccgtggcctaggcccaaactctgctctgagaaaataaatatctgtaccacctgt

SEQ ID NO: 428602 - DNA, 1034 bp, Homo sapiens
agtcccggaactgctagaacgaaccattcgcatatggagggggtgacccaccatctcagaacattaaaaaagggaaagaatcccctggtgaactacagtgaaagtcttattgagcatttaaatggaaataaaaatattcagtggacctaatgaagagtagatgactttcccttctgtcccctccccgacaggcactcatggtaccggcgccggcgcagctgtgactgtcgctgcagacggaaactgactggggtcaattcaagtcatgcaggctgtgagaaacgcggggtcgcggttcctgcggtcctggacttggccccagacagccggcagggtcgtggccagaacgccggccgggaccatctgcacaggcgctcgacagctccaagacgctgcggccaagcagaaagttgaacagaacgcggctcccagccacaccaagttcagcacacagatccaggtagtctctgctagtaatgagccccttgcctttgcttcctgtggcacagagggatttcggaatgccaagaagggcacaggcatcgcagcacagacagcaggcatagccgcagcggcgagagctaaacaaaagggcgtgatccacatccgagttgtggtgaaaggcctggggccaggacgcttgtctgccatgcacggactgatcatgggcggcctggaagtgatctcaatcacagacaacaccccaatcccacacaacggctgccgccccaggaaggctcggaagctgtgatgggaaggaggcctgcacttggacctgacctcaagcctcagctccagtgggaccttgtaaaatgctccctgtcagagctctccagaatatgcttgttggagatccttcaggcagtaagggagagttttgcctccttacacagtggcctttgcttgcacctccagctggagatgggtgtgccccagaagtaagctttgcatctcttacaagaggggagctacaggggcagccgtggcctaggcccaaactctgctctgagaaaataaatatctgtaccacctgt

SEQ ID NO: 428603 - DNA, 615 bp, Homo sapiens
attctgcaacctgccaaattctgtggtctctgctggcgcctgtcctccactatagccatctgccctttgcctccctgtttacttctctggatgccctttccctgagctcacacaccccttgctctaggaggcagtagcaagagatttggatgcagtagttctctctccggggcactaaccactctgcttctctccagagagctaaacaaaagggcgtgatccacatccgagttgtggtgaaaggcctggggccaggacgcttggtaagttacagtgatttccatagtgtacttgcctcctagtaagtgtgagaatttggggcttgagagcagagtacagggagagtagtataattgaccaagcccctcagagcaagcctagatcacttagtataattcatcagacactgagtgcctgctgcgtgccacgcactgggaatgggaaggtggttcctgggggaactgtcacaaacaaatcccttaggacagactggtgagcgctgtggtaaagcatgtgcccagatcgctgggagcccatcaggggatcccgaacctagcagggataatctttcctgatgatcattagcacagataatctttagcttcttcaaagagg

SEQ ID NO: 428604 - DNA, 146 bp, Homo sapiens
tctttgttcgcagatcgtaaagtgcaaagtggaaagtggtgggtacagtttgagaggggaacagtgtgaaaacctggttaaagggtttgggtggagaccttttgggctacacattatggaggtgtatcctctagagtcagctctga

SEQ ID NO: 428605 - DNA, 1146 bp, Homo sapiens
agtcccggaactgctagaacgaaccattcgcatatggagggggtgacccaccatctcagaacattaaaaaagggaaagaatcccctggtgaactacagtgaaagtcttattgagcatttaaatggaaataaaaatattcagtggacctaatgaagagtagatgactttcccttctgtcccctccccgacaggcactcatggtaccggcgccggcgcagctgtgactgtcgctgcagacggaaactgactggggtcaattcaagtcatgcaggctgtgagaaacgcggggtcgcggttcctgcggtcctggacttggccccagacagccggcagggtcgtggccagaacgccggccgggaccatctgcacaggcgctcgacagctccaagacgctgcggccaagcagaaagttgaacagaacgcggctcccagccacaccaagttcagcatttaccctcccattccaggagaggagagctctctgaggtgggcaggaaagaaatttgaggagatcccaattgcacacattaaagcatcccacaacaacacacagatccaggtagtctctgctagtaatgagccccttgcctttgcttcctgtggcacagagggatttcggaatgccaagaagggcacaggcatcgcagcacagacagcaggcatagccgcagcggcgagagctaaacaaaagggcgtgatccacatccgagttgtggtgaaaggcctggggccaggacgcttgtctgccatgcacggactgatcatgggcggcctggaagtgatctcaatcacagacaacaccccaatcccacacaacggctgccgccccaggaaggctcggaagctgtgatgggaaggaggcctgcacttggacctgacctcaagcctcagctccagtgggaccttgtaaaatgctccctgtcagagctctccagaatatgcttgttggagatccttcaggcagtaagggagagttttgcctccttacacagtggcctttgcttgcacctccagctggagatgggtgtgccccagaagtaagctttgcatctcttacaagaggggagctacaggggcagccgtggcctaggcccaaactctgctctgtgcccgcctcgaagtggatcctcatagagtcagccttga

SEQ ID NO: 428606 - DNA, 2382 bp, Homo sapiens
agtcccggaactgctagaacgaaccattcgcatatggagggggtgacccaccatctcagaacattaaaaaagggaaagaatcccctggtgaactacagtgaaagtcttattgagcatttaaatggaaataaaaatattcagtggacctaatgaagagtagatgactttcccttctgtcccctccccgacaggcactcatggtaccggcgccggcgcagctgtgactgtcgctgcagacggaaactgactggggtcaattcaagtcatgcaggctgtgagaaacgcggggtcgcggttcctgcggtcctggacttggccccagacagccggcagggtcgtggccagaacgccggccgggaccatctgcacaggcgctcgacagctccaagacgctgcggccaagcagaaagttgaacagaacgcggctcccagccacaccaagttcaggtgagccccacttggaccagccctctggagacccgcaacccctgactcttgcccgacaccctccagagtcagaaccagtgaattttcagctatgtcacttgctatccgtgggaccttatgcaaataaatctgagcctcagccttctcatctaaaaatgcggataatgctgagagaggttgtgagaatcagatgagccgtggtacagagtaaatgttcagtgaacattcgttaaatcaatgagtgaatgtgagatatccataacatgtatcagcgttcttttcttctgagatggagatcttttcagaccaataaccttccctgcctccaaaacaaaatggggaggtagagggcgctagcgatggaacagatgttcctgcacgtcttacggatggtccagggtgggttttgtgctcagccctaggaactggcatcttgcttcccaccagtgccaccacctctgtatgctgtatacacatccacttaacttcacatccatttaacaaacatttaccaagaatctactatgagtgagacaccatgctaggtgccgtgaatacagatacaaaagatcattcctccccacaagtagttcacagtctttgagggaagacaaacatgcaaacattttaaccataatctgctcaataatataatggaggtaagcattggttggaagtatgaaatcataagtgtctaactcctggccgggtgcagtagctcatgcctttaatcccagcactttaggcggccaaggtgggcgaattacttgaggtcaggagatcgagaccagcctggccaacatggcgaaaccccgtctccactaaaagcacaaaaactagccaggcgtgatgtctggcacctgtaatcccagccactcaggaggctgaagtagaagaatcgcatgaacccagggagcggaggttgcagtgagccaagatcacgccactgtactccagcctgggtgacagattgagactctgtctcaaagaaaaaaaaaaaaaaaagaataagtgtctcattcctgaggaaatcaggcaagaccatggagaaaagaacatggagctcagaagtgaatgggagttcatctggacaagttgaagtgggtcattggagacaaagcatttaccctcccattccaggagaggagagctctctgaggtgggcaggaaagaaatttgaggagatcccaattgcacacattaaagcatcccacaacaacacacagatccaggtagtctctgctagtaatgagccccttgcctttgcttcctgtggcacagagggatttcggaatgccaagaagggcacaggcatcgcagcacagacagcaggcatagccgcagcggcgagagctaaacaaaagggcgtgatccacatccgagttgtggtgaaaggcctggggccaggacgcttgtctgccatgcacggactgatcatgggcggcctggaagtgatctcaatcacagacaacaccccaatcccacacaacggctgccgccccaggaaggctcggaagctgtgatgggaaggaggcctgcacttggacctgacctcaagcctcagctccagtgggaccttgtaaaatgctccctgtcagagctctccagaatatgcttgttggagatccttcaggcagtaagggagagttttgcctccttacacagtggcctttgcttgcacctccagctggagatgggtgtgccccagaagtaagctttgcatctcttacaagaggggagctacaggggcagccgtggcctaggcccaaactctgctctgagaaaataaatatctgtaccacctgtcataattttgagattttttgctttcagagttacgtaattcctaattcctcttgaaaaagagagtgtgaaatgaggtgaggcctcagatgaaagtaaaatataaatgtgagttgctatttaccagacact

SEQ ID NO: 428607 - DNA, 2507 bp, Homo sapiens
agtcccggaactgctagaacgaaccattcgcatatggagggggtgacccaccatctcagaacattaaaaaagggaaagaatcccctggtgaactacagtgaaagtcttattgagcatttaaatggaaataaaaatattcagtggacctaatgaagagtagatgactttcccttctgtcccctccccgacaggcactcatggtaccggcgccggcgcagctgtgactgtcgctgcagacggaaactgactggggtcaattcaagtcatgcaggctgtgagaaacgcggggtcgcggttcctgcggtcctggacttggccccagacagccgggtaacaaatgactgccccctcgagcccaccgccacctccaggactatgctcctactcgtgtcccttgagccacccgggccccagtgaccgttaggccgtggccctcaccgagcttttcttcccagcagggtcgtggccagaacgccggccgggaccatctgcacaggcgctcgacagctccaagacgctgcggccaagcagaaagttgaacagaacgcggctcccagccacaccaagttcaggtgagccccacttggaccagccctctggagacccgcaacccctgactcttgcccgacaccctccagagtcagaaccagtgaattttcagctatgtcacttgctatccgtgggaccttatgcaaataaatctgagcctcagccttctcatctaaaaatgcggataatgctgagagaggttgtgagaatcagatgagccgtggtacagagtaaatgttcagtgaacattcgttaaatcaatgagtgaatgtgagatatccataacatgtatcagcgttcttttcttctgagatggagatcttttcagaccaataaccttccctgcctccaaaacaaaatggggaggtagagggcgctagcgatggaacagatgttcctgcacgtcttacggatggtccagggtgggttttgtgctcagccctaggaactggcatcttgcttcccaccagtgccaccacctctgtatgctgtatacacatccacttaacttcacatccatttaacaaacatttaccaagaatctactatgagtgagacaccatgctaggtgccgtgaatacagatacaaaagatcattcctccccacaagtagttcacagtctttgagggaagacaaacatgcaaacattttaaccataatctgctcaataatataatggaggtaagcattggttggaagtatgaaatcataagtgtctaactcctggccgggtgcagtagctcatgcctttaatcccagcactttaggcggccaaggtgggcgaattacttgaggtcaggagatcgagaccagcctggccaacatggcgaaaccccgtctccactaaaagcacaaaaactagccaggcgtgatgtctggcacctgtaatcccagccactcaggaggctgaagtagaagaatcgcatgaacccagggagcggaggttgcagtgagccaagatcacgccactgtactccagcctgggtgacagattgagactctgtctcaaagaaaaaaaaaaaaaaaagaataagtgtctcattcctgaggaaatcaggcaagaccatggagaaaagaacatggagctcagaagtgaatgggagttcatctggacaagttgaagtgggtcattggagacaaagcatttaccctcccattccaggagaggagagctctctgaggtgggcaggaaagaaatttgaggagatcccaattgcacacattaaagcatcccacaacaacacacagatccaggtagtctctgctagtaatgagccccttgcctttgcttcctgtggcacagagggatttcggaatgccaagaagggcacaggcatcgcagcacagacagcaggcatagccgcagcggcgagagctaaacaaaagggcgtgatccacatccgagttgtggtgaaaggcctggggccaggacgcttgtctgccatgcacggactgatcatgggcggcctggaagtgatctcaatcacagacaacaccccaatcccacacaacggctgccgccccaggaaggctcggaagctgtgatgggaaggaggcctgcacttggacctgacctcaagcctcagctccagtgggaccttgtaaaatgctccctgtcagagctctccagaatatgcttgttggagatccttcaggcagtaagggagagttttgcctccttacacagtggcctttgcttgcacctccagctggagatgggtgtgccccagaagtaagctttgcatctcttacaagaggggagctacaggggcagccgtggcctaggcccaaactctgctctgagaaaataaatatctgtaccacctgtcataattttgagattttttgctttcagagttacgtaattcctaattcctcttgaaaaagagagtgtgaaatgaggtgaggcctcagatgaaagtaaaatataaatgtgagttgctatttaccagacact

SEQ ID NO: 428608 - DNA, 1387 bp, Homo sapiens
agtcccggaactgctagaacgaaccattcgcatatggagggggtgacccaccatctcagaacattaaaaaagggaaagaatcccctggtgaactacagtgaaagtcttattgagcatttaaatggaaataaaaatattcagtggacctaatgaagagtagatgactttcccttctgtcccctccccgacaggcactcatggtaccggcgccggcgcagctgtgactgtcgctgcagacggaaactgactggggtcaattcaagtcatgcaggctgtgagaaacgcggggtcgcggttcctgcggtcctggacttggccccagacagccgggtaacaaatgactgccccctcgagcccaccgccacctccaggactatgctcctactcgtgtcccttgagccacccgggccccagtgaccgttaggccgtggccctcaccgagcttttcttcccagcagggtcgtggccagaacgccggccgggaccatctgcacaggcgctcgacagctccaagacgctgcggccaagcagaaagttgaacagaacgcggctcccagccacaccaagttcagcatttaccctcccattccaggagaggagagctctctgaggtgggcaggaaagaaatttgaggagatcccaattgcacacattaaagcatcccacaacaacacacagatccaggtagtctctgctagtaatgagccccttgcctttgcttcctgtggcacagagggatttcggaatgccaagaagggcacaggcatcgcagcacagacagcaggcatagccgcagcggcgagagctaaacaaaagggcgtgatccacatccgagttgtggtgaaaggcctggggccaggacgcttgtctgccatgcacggactgatcatgggcggcctggaagtgatctcaatcacagacaacaccccaatcccacacaacggctgccgccccaggaaggctcggaagctgtgatgggaaggaggcctgcacttggacctgacctcaagcctcagctccagtgggaccttgtaaaatgctccctgtcagagctctccagaatatgcttgttggagatccttcaggcagtaagggagagttttgcctccttacacagtggcctttgcttgcacctccagctggagatgggtgtgccccagaagtaagctttgcatctcttacaagaggggagctacaggggcagccgtggcctaggcccaaactctgctctgagaaaataaatatctgtaccacctgtcataattttgagattttttgctttcagagttacgtaattcctaattcctcttgaaaaagagagtgtgaaatgaggtgaggcctcagatgaaagtaaaatataaatgtgagttgctatttaccagacact

SEQ ID NO: 428609 - DNA, 1534 bp, Homo sapiens
agtcccggaactgctagaacgaaccattcgcatatggagggggtgacccaccatctcagaacattaaaaaagggaaagaatcccctggtgaactacagtgaaagtcttattgagcatttaaatggaaataaaaatattcagtggacctaatgaagagtagatgactttcccttctgtcccctccccgacaggcactcatggtaccggcgccggcgcagctgtgactgtcgctgcagacggaaactgactggggtcaattcaagtcatgcaggctgtgagaaacgcggggtcgcggttcctgcggtcctggacttggccccagacagccggcagggtcgtggccagaacgccggccgggaccatctgcacaggcgctcgacagctccaagacgctgcggccaagcagaaagttgaacagaacgcggctcccagccacaccaagttcagggacaaggaagatggggagtatgcatgaaaatcccttctcatagcggaaagtccccagatgtgtctgaagtcagcaagtcaagaaacagcatcataagcacagcagtcacacatgcggtggtggcaccagaaggactgaaaaggaatggtgggggcagccacttaagaagcagcagggggcacagagctgttattttttaaccatgtgttgtatttctttgatttttaaaaagtcgagacaattttaaataaaatctttcttctaattgcagcatttaccctcccattccaggagaggagagctctctgaggtgggcaggaaagaaatttgaggagatcccaattgcacacattaaagcatcccacaacaacacacagatccaggtagtctctgctagtaatgagccccttgcctttgcttcctgtggcacagagggatttcggaatgccaagaagggcacaggcatcgcagcacagacagcaggcatagccgcagcggcgagagctaaacaaaagggcgtgatccacatccgagttgtggtgaaaggcctggggccaggacgcttgtctgccatgcacggactgatcatgggcggcctggaagtgatctcaatcacagacaacaccccaatcccacacaacggctgccgccccaggaaggctcggaagctgtgatgggaaggaggcctgcacttggacctgacctcaagcctcagctccagtgggaccttgtaaaatgctccctgtcagagctctccagaatatgcttgttggagatccttcaggcagtaagggagagttttgcctccttacacagtggcctttgcttgcacctccagctggagatgggtgtgccccagaagtaagctttgcatctcttacaagaggggagctacaggggcagccgtggcctaggcccaaactctgctctgagaaaataaatatctgtaccacctgtcataattttgagattttttgctttcagagttacgtaattcctaattcctcttgaaaaagagagtgtgaaatgaggtgaggcctcagatgaaagtaaaatataaatgtgagttgctatttaccagacact

SEQ ID NO: 428610 - DNA, 1163 bp, Homo sapiens
agtcccggaactgctagaacgaaccattcgcatatggagggggtgacccaccatctcagaacattaaaaaagggaaagaatcccctggtgaactacagtgaaagtcttattgagcatttaaatggaaataaaaatattcagtggacctaatgaagagtagatgactttcccttctgtcccctccccgacaggcactcatggtaccggcgccggcgcagctgtgactgtcgctgcagacggaaactgactggggtcaattcaagtcatgcaggctgtgagaaacgcggggtcgcggttcctgcggtcctggacttggccccagacagccggcagggtcgtggccagaacgccggccgggaccatctgcacaggcgctcgacagctccaagacgctgcggccaagcagaaagttgaacagaacgcggctcccagccacaccaagttcagcacacagatccaggtagtctctgctagtaatgagccccttgcctttgcttcctgtggcacagagggatttcggaatgccaagaagggcacaggcatcgcagcacagacagcaggcatagccgcagcggcgagagctaaacaaaagggcgtgatccacatccgagttgtggtgaaaggcctggggccaggacgcttgtctgccatgcacggactgatcatgggcggcctggaagtgatctcaatcacagacaacaccccaatcccacacaacggctgccgccccaggaaggctcggaagctgtgatgggaaggaggcctgcacttggacctgacctcaagcctcagctccagtgggaccttgtaaaatgctccctgtcagagctctccagaatatgcttgttggagatccttcaggcagtaagggagagttttgcctccttacacagtggcctttgcttgcacctccagctggagatgggtgtgccccagaagtaagctttgcatctcttacaagaggggagctacaggggcagccgtggcctaggcccaaactctgctctgagaaaataaatatctgtaccacctgtcataattttgagattttttgctttcagagttacgtaattcctaattcctcttgaaaaagagagtgtgaaatgaggtgaggcctcagatgaaagtaaaatataaatgtgagttgctatttaccagacact

SEQ ID NO: 428611 - DNA, 1242 bp, Homo sapiens
agtcccggaactgctagaacgaaccattcgcatatggagggggtgacccaccatctcagaacattaaaaaagggaaagaatcccctggtgaactacagtgaaagtcttattgagcatttaaatggaaataaaaatattcagtggacctaatgaagagtagatgactttcccttctgtcccctccccgacaggcactcatggtaccggcgccggcgcagctgtgactgtcgctgcagacggaaactgactggggtcaattcaagtcatgcaggctgtgagaaacgcggggtcgcggttcctgcggtcctggacttggccccagacagccggcagggtcgtggccagaacgccggccgggaccatctgcacaggcgctcgacagctccaagacgctgcggccaagcagaaagttgaacagaacgcggctcccagccacaccaagttcaggagaggagagctctctgaggtgggcaggaaagaaatttgaggagatcccaattgcacacattaaagcatcccacaacaacacacagatccaggtagtctctgctagtaatgagccccttgcctttgcttcctgtggcacagagggatttcggaatgccaagaagggcacaggcatcgcagcacagacagcaggcatagccgcagcggcgagagctaaacaaaagggcgtgatccacatccgagttgtggtgaaaggcctggggccaggacgcttgtctgccatgcacggactgatcatgggcggcctggaagtgatctcaatcacagacaacaccccaatcccacacaacggctgccgccccaggaaggctcggaagctgtgatgggaaggaggcctgcacttggacctgacctcaagcctcagctccagtgggaccttgtaaaatgctccctgtcagagctctccagaatatgcttgttggagatccttcaggcagtaagggagagttttgcctccttacacagtggcctttgcttgcacctccagctggagatgggtgtgccccagaagtaagctttgcatctcttacaagaggggagctacaggggcagccgtggcctaggcccaaactctgctctgagaaaataaatatctgtaccacctgtcataattttgagattttttgctttcagagttacgtaattcctaattcctcttgaaaaagagagtgtgaaatgaggtgaggcctcagatgaaagtaaaatataaatgtgagttgctatttaccagacact

SEQ ID NO: 428612 - DNA, 1955 bp, Homo sapiens
agtcccggaactgctagaacgaaccattcgcatatggagggggtgacccaccatctcagaacattaaaaaagggaaagaatcccctggtgaactacagtgaaagtcttattgagcatttaaatggaaataaaaatattcagtggacctaatgaagagtagatgactttcccttctgtcccctccccgacaggcactcatggtaccggcgccggcgcagctgtgactgtcgctgcagacggaaactgactggggtcaattcaagtcatgcaggctgtgagaaacgcggggtcgcggttcctgcggtcctggacttggccccagacagccgggtaacaaatgactgccccctcgagcccaccgccacctccaggactatgctcctactcgtgtcccttgagccacccgggccccagtgaccgttaggccgtggccctcaccgagcttttcttcccagcagggtcgtggccagaacgccggccgggaccatctgcacaggcgctcgacagctccaagacgctgcggccaagcagaaagttgaacagaacgcggctcccagccacaccaagttcaggtgagccccacttggaccagccctctggagacccgcaacccctgactcttgcccgacaccctccagagtcagaaccagtgaattttcagctatgtcacttgctatccgtgggaccttatgcaaataaatctgagcctcagccttctcatctaaaaatgcggataatgctgagagaggttgtgagaatcagatgagccgtggtacagagtaaatgttcagtgaacattcgttaaatcaatgagtgaatgtgagatatccataacatgtatcagcgttcttttcttctgagatggagatcttttcagaccaataaccttccctgcctccaaaacaaaatggggaggtagagggcgctagcgatggaacagatgttcctgcacgtcttacggatggtccagggtgggttttgtgctcagccctaggaactggcatcttgcttcccaccagtgccaccacctctgtatgctgtatacacatccacttaacttcacatccatttaacaaacatttaccaagaatctactatgagtgagacaccatgctaggtgccgtgaatacagatacaaaagatcattcctccccacaagtagttcacagtctttgagggaagacaaacatgcaaacattttaaccataatctgctcaataatataatggaggtaagcattggttggaagtatgaaatcataagtgtctaactcctggccgggtgcagtagctcatgcctttaatcccagcactttaggcggccaaggtgggcgaattacttgaggtcaggagatcgagaccagcctggccaacatggcgaaaccccgtctccactaaaagcacaaaaactagccaggcgtgatgtctggcacctgtaatcccagccactcaggaggctgaagtagaagaatcgcatgaacccagggagcggaggttgcagtgagccaagatcacgccactgtactccagcctgggtgacagattgagactctgtctcaaagaaaaaaaaaaaaaaaagaataagtgtctcattcctgaggaaatcaggcaagaccatggagaaaagaacatggagctcagaagtgaatgggagttcatctggacaagttgaagtgggtcattggagacaaagcatttaccctcccattccaggagaggagagctctctgaggtgggcaggaaagaaatttgaggagatcccaattgcacacattaaagcatcccacaacaacacacagatccaggtagtctctgctagtaatgagccccttgcctttgcttcctgtggcacagagggatttcggaatgccaagaagggcacaggcatcgcagcacagacagcaggcatagccgcagcggcgcggaattggtgtcgaaaagagaagagtgttgtgt

SEQ ID NO: 428613 - DNA, 718 bp, Homo sapiens
agtcccggaactgctagaacgaaccattcgcatatggagggggtgacccaccatctcagaacattaaaaaagggaaagaatcccctggtgaactacagtgaaagtcttattgagcatttaaatggaaataaaaatattcagtggacctaatgaagagtagatgactttcccttctgtcccctccccgacaggcactcatggtaccggcgccggcgcagctgtgactgtcgctgcagacggaaactgactggggtcaattcaagtcatgcaggctgtgagaaacgcggggtcgcggttcctgcggtcctggacttggccccagacagccggcagggtcgtggccagaacgccggccgggaccatctgcacaggcgctcgacagctccaagacgctgcggccaagcagaaagttgaacagaacgcggctcccagccacaccaagttcagcatttaccctcccattccaggagaggagagctctctgaggtgggcaggaaagaaatttgaggagatcccaattgcacacattaaagcatcccacaacaacacacagatccaggtagtctctgctagtaatgagccccttgcctttgcttcctgtggcacagagggattcccagaagtaagctttgcatctcttacaagaggggagctacaggggcagccgtggcctaggcccaaactctgctctgagaaaataaatatctgtaccacctgt

SEQ ID NO: 428614 - DNA, 551 bp, Homo sapiens
agtcccggaactgctagaacgaaccattcgcatatggagggggtgacccaccatctcagaacattaaaaaagggaaagaatcccctggtgaactacagtgaaagtcttattgagcatttaaatggaaataaaaatattcagtggacctaatgaagagtagatgactttcccttctgtcccctccccgacaggcactcatggtaccggcgccggcgcagctgtgactgtcgctgcagacggaaactgactggggtcaattcaagtcatgcaggctgtgagaaacgcggggtcgcggttcctgcggtcctggacttggccccagacagccggcagggtcgtggccagaacgccggccgggaccatctgcacaggcgctcgacagctccaagacgctgcggccaagcagaaagttgaacagaacgcggctcccagccacaccaagttcagcatttaccctcccattccaggagaggagagctctctgaggtgggcaggaaagaaatttgaggagatcccaattgcacactgtcgagattcggtacgcctcgatc

SEQ ID NO: 428615 - DNA, 476 bp, Homo sapiens
agtcccggaactgctagaacgaaccattcgcatatggagggggtgacccaccatctcagaacattaaaaaagggaaagaatcccctggtgaactacagtgaaagtcttattgagcatttaaatggaaataaaaatattcagtggacctaatgaagagtagatgactttcccttctgtcccctccccgacaggcactcatggtaccggcgccggcgcagctgtgactgtcgctgcagacggaaactgactggggtcaattcaagtcatgcaggctgtgagaaacgcggggtcgcggttcctgcggtcctggacttggccccagacagccggcagggtcgtggccagaacgccggccgggaccatctgcacaggcgctcgacagctccaagacgcaacgagggtgctgctcgagttatcgggaccctgttgggaactgtcgacaacactcacgtggaggtcaccattgcttttcgtgc

SEQ ID NO: 428616 - DNA, 602 bp, Homo sapiens
gactggtgagcgctgtggtaaagcatgtgcccagatcgctgggagcccatcaggggatcccgaacctagcagggataatctttcctgatgatcattagcacagataatctttagcttcttcaaagaggtgacatctctctgactttgcaggaataatgaggtatcagggaggtggaggcacagcaggtacggggggacattgcaggcagagaaaactgcctgagtaagctacagaagtatgatacccaaggtgtgccaaggtctacaagaagtctttgttcgcagatcgtaaagtgcaaagtggaaagtggtgggtacagtttgagaggggaacagtgtgaaaacctggttaaagggtttgggtggagacctttgtgagagtagaataggattgggattataggtatcaaagccagtgagcatctcacccctccgttcccttctctacgccaccctgtccctctccgaaccctgcctggagacactggatcatcatttctgggaccatgtcattctacttttccttctgttccttccagtctgccatgcacggactgatcatgggcggcctggaagtgatctcaatcacagacaacacccca

SEQ ID NO: 428617 - DNA, 1168 bp, Homo sapiens
agtcccggaactgctagaacgaaccattcgcatatggagggggtgacccaccatctcagaacattaaaaaagggaaagaatcccctggtgaactacagtgaaagtcttattgagcatttaaatggaaataaaaatattcagtggacctaatgaagagtagatgactttcccttctgtcccctccccgacaggcactcatggtaccggcgccggcgcagctgtgactgtcgctgcagacggaaactgactggggtcaattcaagtcatgcaggctgtgagaaacgcggggtcgcggttcctgcggtcctggacttggccccagacagccggcagggtcgtggccagaacgccggccgggaccatctgcacaggcgctcgacagctccaagacgctgcggccaagcagaaagttgaacagaacgcggctcccagccacaccaagttcagcatttaccctcccattccaggagaggagagctctctgaggtgggcaggaaagaaatttgaggagatcccaattgcacacattaaagcatcccacaacaacacacagatccaggtagtctctgctagtaatgagccccttgcctttgcttcctgtggcacagagggatttcggaatgccaagaagggcacaggcatcgcagcacagacagcaggcatagccgcagcggcgagagctaaacaaaagggcgtgatccacatccgagttgtggtgaaaggcctggggccaggacgcttgtctgccatgcacggactgatcatgggcggcctggaagtgatctcaatcacagacaacaccccaatcccacacaacggctgccgccccaggaaggctcggaagctgtgatgggaaggaggcctgcacttggacctgacctcaagcctcagctccagtgggaccttgtaaaatgctccctgtcagagctctccagaatatgcttgttggagatccttcaggcagtaagggagagttttgcctccttacacagtggcctttgcttgcacctccagctggagatgggtgtgccccagaagtaagctttgcatctcttacaagaggggagctacaggggcagccgtggcctaggcccaaactctgctctgagaaaataaatatctgtaccacctgtaaaaccacagaaaaaaaaaacagggactttaacgg

SEQ ID NO: 428618 - DNA, 1262 bp, Homo sapiens
agtcccggaactgctagaacgaaccattcgcatatggagggggtgacccaccatctcagaacattaaaaaagggaaagaatcccctggtgaactacagtgaaagtcttattgagcatttaaatggaaataaaaatattcagtggacctaatgaagagtagatgactttcccttctgtcccctccccgacaggcactcatggtaccggcgccggcgcagctgtgactgtcgctgcagacggaaactgactggggtcaattcaagtcatgcaggctgtgagaaacgcggggtcgcggttcctgcggtcctggacttggccccagacagccggcagggtcgtggccagaacgccggccgggaccatctgcacaggcgctcgacagctccaagacgctgcggccaagcagaaagttgaacagaacgcggctcccagccacaccaagttcagcatttaccctcccattccaggagaggagagctctctgaggtgggcaggaaagaaatttgaggagatcccaattgcacacattaaagcatcccacaacaacacacagatccaggtagtctctgctagtaatgagccccttgcctttgcttcctgtggcacagagggatttcggaatgccaagaagggcacaggcatcgcagcacagacagcaggcatagccgcagcggcgagagctaaacaaaagggcgtgatccacatccgagttgtggtgaaaggcctggggccaggacgcttgtctgccatgcacggactgatcatgggcggcctggaagtgatctcaatcacagacaacaccccaatcccacacaacggctgccgccccaggaaggctcggaagctgtgatgggaaggaggcctgcacttggacctgacctcaagcctcagctccagtgggaccttgtaaaatgctccctgtcagagctctccagaatatgcttgttggagatccttcaggcagtaagggagagttttgcctccttacacagtggcctttgcttgcacctccagctggagatgggtgtgccccagaagtaagctttgcatctcttacaagaggggagctacaggggcagccgtggcctaggcccaaactctgctctgagaaaataaatatctgtaccacctgtcataattttgagattttttgctttcagagttacgtaattcctaattcctcttgaaaaagagagtgtgaaatgaggtgaggcctcagatgaaagtaaaatataaatgtgagttgctatttaccagacact

SEQ ID NO: 428619 - DNA, 1180 bp, Homo sapiens
agtcccggaactgctagaacgaaccattcgcatatggagggggtgacccaccatctcagaacattaaaaaagggaaagaatcccctggtgaactacagtgaaagtcttattgagcatttaaatggaaataaaaatattcagtggacctaatgaagagtagatgactttcccttctgtcccctccccgacaggcactcatggtaccggcgccggcgcagctgtgactgtcgctgcagacggaaactgactggggtcaattcaagtcatgcaggctgtgagaaacgcggggtcgcggttcctgcggtcctggacttggccccagacagccggcagggtcgtggccagaacgccggccgggaccatctgcacaggcgctcgacagctccaagacgctgcggccaagcagaaagttgaacagaacgcggctcccagccacaccaagttcagcatttaccctcccattccaggagaggagagctctctgaggtgggcaggaaagaaatttgaggagatcccaattgcacacattaaagcatcccacaacaacacacagatccaggtagtctctgctagtaatgagccccttgcctttgcttcctgtggcacagagggatttcggaatgccaagaagggcacaggcatcgcagcacagacagcaggcatagccgcagcggcgagagctaaacaaaagggcgtgatccacatccgagttgtggtgaaaggcctggggccaggacgcttgtctgccatgcacggactgatcatgggcggcctggaagtgatctcaatcacagacaacaccccaatcccacacaacggctgccgccccaggaaggctcggaagctgtgatgggaaggaggcctgcacttggacctgacctcaagcctcagctccagtgggaccttgtaaaatgctccctgtcagagctctccagaatatgcttgttggagatccttcaggcagtaagggagagttttgcctccttacacagtggcctttgcttgcacctccagctggagatgggtgtgccccagaagtaagctttgcatctcttacaagaggggagctacaggggcagcgggccagccaactgttcgggaaatattttgccctgtaaaaaaaggggcgtaatcccaggccagtacgacagtttgaaagcaaggggaaaagagcggaagg

SEQ ID NO: 428620 - DNA, 2328 bp, Homo sapiens
agtcccggaactgctagaacgaaccattcgcatatggagggggtgacccaccatctcagaacattaaaaaagggaaagaatcccctggtgaactacagtgaaagtcttattgagcatttaaatggaaataaaaatattcagtggacctaatgaagagtagatgactttcccttctgtcccctccccgacaggcactcatggtaccggcgccggcgcagctgtgactgtcgctgcagacggaaactgactggggtcaattcaagtcatgcaggctgtgagaaacgcggggtcgcggttcctgcggtcctggacttggccccagacagccggcagggtcgtggccagaacgccggccgggaccatctgcacaggcgctcgacagctccaagacgctgcggccaagcagaaagttgaacagaacgcggctcccagccacaccaagttcaggtgagccccacttggaccagccctctggagacccgcaacccctgactcttgcccgacaccctccagagtcagaaccagtgaattttcagctatgtcacttgctatccgtgggaccttatgcaaataaatctgagcctcagccttctcatctaagtaaatgttcagtgaacattcgttaaatcaatgagtgaatgtgagatatccataacatgtatcagcgttcttttcttctgagatggagatcttttcagaccaataaccttccctgcctccaaaacaaaatggggaggtagagggcgctagcgatggaacagatgttcctgcacgtcttacggatggtccagggtgggttttgtgctcagccctaggaactggcatcttgcttcccaccagtgccaccacctctgtatgctgtatacacatccacttaacttcacatccatttaacaaacatttaccaagaatctactatgagtgagacaccatgctaggtgccgtgaatacagatacaaaagatcattcctccccacaagtagttcacagtctttgagggaagacaaacatgcaaacattttaaccataatctgctcaataatataatggaggtaagcattggttggaagtatgaaatcataagtgtctaactcctggccgggtgcagtagctcatgcctttaatcccagcactttaggcggccaaggtgggcgaattacttgaggtcaggagatcgagaccagcctggccaacatggcgaaaccccgtctccactaaaagcacaaaaactagccaggcgtgatgtctggcacctgtaatcccagccactcaggaggctgaagtagaagaatcgcatgaacccagggagcggaggttgcagtgagccaagatcacgccactgtactccagcctgggtgacagattgagactctgtctcaaagaaaaaaaaaaaaaaaagaataagtgtctcattcctgaggaaatcaggcaagaccatggagaaaagaacatggagctcagaagtgaatgggagttcatctggacaagttgaagtgggtcattggagacaaagcatttaccctcccattccaggagaggagagctctctgaggtgggcaggaaagaaatttgaggagatcccaattgcacacattaaagcatcccacaacaacacacagatccaggtagtctctgctagtaatgagccccttgcctttgcttcctgtggcacagagggatttcggaatgccaagaagggcacaggcatcgcagcacagacagcaggcatagccgcagcggcgagagctaaacaaaagggcgtgatccacatccgagttgtggtgaaaggcctggggccaggacgcttgtctgccatgcacggactgatcatgggcggcctggaagtgatctcaatcacagacaacaccccaatcccacacaacggctgccgccccaggaaggctcggaagctgtgatgggaaggaggcctgcacttggacctgacctcaagcctcagctccagtgggaccttgtaaaatgctccctgtcagagctctccagaatatgcttgttggagatccttcaggcagtaagggagagttttgcctccttacacagtggcctttgcttgcacctccagctggagatgggtgtgccccagaagtaagctttgcatctcttacaagaggggagctacaggggcagccgtggcctaggcccaaactctgctctgagaaaataaatatctgtaccacctgtcataattttgagattttttgctttcagagttacgtaattcctaattcctcttgaaaaagagagtgtgaaatgaggtgaggcctcagatgaaagtaaaatataaatgtgagttgctatttaccagacact

SEQ ID NO: 428621 - DNA, 1193 bp, Homo sapiens
agtcccggaactgctagaacgaaccattcgcatatggagggggtgacccaccatctcagaacattaaaaaagggaaagaatcccctggtgaactacagtgaaagtcttattgagcatttaaatggaaataaaaatattcagtggacctaatgaagagtagatgactttcccttctgtcccctccccgacaggcactcatggtaccggcgccggcgcagctgtgactgtcgctgcagacggaaactgactggggtcaattcaagtcatgcaggctgtgagaaacgcggggtcgcggttcctgcggtcctggacttggccccagacagccggcagggtcgtggccagaacgccggccgggaccatctgcacaggcgctcgacagctccaagacgctgcggccaagcagaaagttgaacagaacgcggctcccagccacaccaagttcagcatttaccctcccattccaggagaggagagctctctgaggtgggcaggaaagaaatttgaggagatcccaattgcacacattaaagcatcccacaacaatcggaatgccaagaagggcacaggcatcgcagcacagacagcaggcatagccgcagcggcgagagctaaacaaaagggcgtgatccacatccgagttgtggtgaaaggcctggggccaggacgcttgtctgccatgcacggactgatcatgggcggcctggaagtgatctcaatcacagacaacaccccaatcccacacaacggctgccgccccaggaaggctcggaagctgtgatgggaaggaggcctgcacttggacctgacctcaagcctcagctccagtgggaccttgtaaaatgctccctgtcagagctctccagaatatgcttgttggagatccttcaggcagtaagggagagttttgcctccttacacagtggcctttgcttgcacctccagctggagatgggtgtgccccagaagtaagctttgcatctcttacaagaggggagctacaggggcagccgtggcctaggcccaaactctgctctgagaaaataaatatctgtaccacctgtcataattttgagattttttgctttcagagttacgtaattcctaattcctcttgaaaaagagagtgtgaaatgaggtgaggcctcagatgaaagtaaaatataaatgtgagttgctatttaccagacact

SEQ ID NO: 428622 - DNA, 1319 bp, Homo sapiens
ctgccttgctcacctctgacattagcagagcttgtttccttacctgtaaaacaaaggtggcgggttagctgtgaggtttaaatgacttccatgtaaagagttagaagagagcctgcaatgagtgctaagcacattcaccgtttgttttctcacgggttttctgttacactcctccgagtgcagagaggcagctcccttgtgaagctatccacacggtcttccgcctctcgcttgcctgtctcctgtctctccagggaggtgctggctgctgttgggctgagtcctcttggaacttccttgggtttcttacaccaacattaaagactgaagtaatctcccaccgcagccccagcctcaaactactgctcctattgttccagccatcatttctacaccctggggtggttgttcacattcctggctcactcatctatcttccttcctccccaaagctattcccctgacattcaggcacactccttccccctcatgcttagatatgtgtccccagtccctctggatatccctgccaaatgtatcttgctaaaccccccttttaaattgggacacatccctctagtggatatctggatgctgccctgtgtctagggatcaagcccaactcttccacttgtgtaacttatggtgctgcttcctgtggtcatctcagttcccacagttcctaacccttcttcccactgcacagctcctcctcatcccacctctgaaagaccacatccaacctcagacaccaggactacagccaaaaatggaaaaaaaccttagtattgaatccaagatgtgatcaattataagctgcaccatcactttatgtgccactaagagcacagtccattaacagtgatacacccttgtaaaataaatctgatttctgagatgttacggcacggggaaagtgctggaactaagccttcctggctcctgaatactccaagaaacagggtagtgtgggaagctgagtaacagccctcaaaagatggtcacgtcctaatccctggaatttgtgagtgtcgctttatatggcaaaaagaacgctgcagatgtggtaaaatggaggatcttcgctggtggaggactatccataaggccctaaatgccatctccagtatccttaaaaacggaggaagtccagcctgggcaacacagtgagactccatctctacaaaaaatgtttaaaattagctaattagctgggtgtggtggtacaggcctgtagtcccagatactcgagaggctgaagtggaagggttgcttgagtccaggaggtcgagactgcagtgagctatgatcacacaacc

SEQ ID NO: 428623 - DNA, 607 bp, Homo sapiens
ctctaaaaatgttgacagcatgattatcacactcctctgctgtttgaggggcagggagcatttggagatgccttgtttcaggaacccattcagccaagttgtcctggcaagccgtacctcccacagccccctccacaccggctgtttgtccaatctaactttgcactggagcaagatgtgttttcccaggatgaggaaaggaaggttagcccacactgctggatgtggaaggggatgggaaccagggaaagaatggtaactggggaggaagggaaaccatgatacttttgtagtcgaaggcctaactgggcgcactctgccataacttggcccctctgcttcctttccactgggagtgccagaaatcacagggcagcagtcgctcaccctgcctttgtagacaagaaaatgaaaccatcgaagggtgaatttcagctagcatattgccatcactcttttatggtataaaggatgagagaggcggtgagggagacattgccccaaacatgatgtccacatcctaagacttacctgatatttcttattacacaaagacaacattgactggtttaagagagaaaaaaaagtcgacgcaatccagaagaat

SEQ ID NO: 428624 - DNA, 321 bp, Homo sapiens
gactatttggcggctggttcctaacgcttggaggaaactgcagagcaaaaaaccacctgcgagaaagaatcctgacctcaggtgatccacccgccttggcctcccaaagtgctgggattacaggtgtgagccactatacccgaccagatcaaatctttttttgacatttttgcaaaaaaattttcctaatgttcttgatttaattgtatagaatttgtataattaggtgtattttatttgcgtctagctttgaggtatcataatttatgtatcttatgtgaattttttgctgtaataccaataaagttttttttctccaca

SEQ ID NO: 428625 - DNA, 431 bp, Homo sapiens
atacctacattagatttatcgatagaatactcatagccaacattgagtgttacctcacttgggaataaattagagtggattagaaatatataaaatgatttaaaaatctgagcctgttttgaagctctttttttttcctttttatttaattactatttatcttctttcttttttctttttttttcagaggtctcactatgttgccttggcctcccaaagtgctgggattacaggtgtgagccactatacccgaccagatcaaatctttttttgacatttttgcaaaaaaattttcctaatgttcttgatttaattgtatagaatttgtataattaggtgtattttatttgcgtctagctttgaggtatcataatttatgtatcttatgtgaattttttgctgtaataccaataaagttttttttctccaca

SEQ ID NO: 428626 - DNA, 1741 bp, Homo sapiens
agcgggggtgttacggggacactggcccgactactttcgttccgtcttccatcgttttctctcgtgcaatggcgtccgggctggtaagattgctgcagcagggacatcgctgcctcctggctccagtcgcccccaagctggtccctccggttcggggagtgaagaagggattccgcgccgccttccgcttccagaaggagttagagcggcagcgccttctgcggtgcccgccgccgcccgtgcgccgttcagagaagccgaactgggattaccatgcagaaatacaagcttttggacatcggttacaggaaaacttttccttagatcttctcaaaactgcatttgttaatagctgctatattaaaagtgaggaggccaaacgccaacaacttgggatagagaaagaagctgttcttctgaatcttaaaagtaatcaagaactatccgaacaagggacatctttttcacagacttgccttacacagtttcttgaagacgagtacccagacatgcccactgaaggcataaaaaatcttgttgactttctcactggtgaggaagtcgtgtgtcacgtggctagaaacttggctgtggagcagttaacactgagtgaagaattcccagtgcccccagctgtgttacagcagactttctttgcagttattggagccctgttacagagcagtggacctgagaggactgcacttttcatcagggacttcttaattactcaaatgactggaaaagagctctttgagatgtggaagataataaatcccatggggctattggtagaagaactgaagaaaaggaatgtttcagctcctgaatcaagacttactaggcagtctggtggcaccacagctttgcctttgtattttgttggcttatactgtgataaaaagttgattgcagaaggacctggggaaacagtattggttgcagaagaagaggctgctcgagtggcccttagaaaactttatggattcacagaaaatagacggccgtggaactattccaagcccaaagaaaccttgagagcagaaaagagcatcactgccagctagccgccatggatgcagcagcctgaaacttgagagcgaaagtgagataaatgtcaaaggtgtttcaagccagacattttcacaattgtgaagaaatagatgttttgtttctgttttttactgtgttcccaaaattaaataaatgttaaccaagtcacagtgtttttggttttgtttttctgaaatcttggtttgatcaaatctttttttttttctcttgagatggagtcttactctgtcgcccaggctggactgcagtggtgcgatctcggctcactgcaacctccacctcacaggttcaagcgattctcgtggctcagcctccctagtagctgggattacaggcacacaccaccatacctggctaatttttgtatttttggtagagatggggtttcaccaagttggctaggctagtcttgaactcctgacctcaggtgatccacccgccttggcctcccaaagtgctgggattacaggtgtgagccactatacccgaccagatcaaatctttttttgacatttttgcaaaaaaattttcctaatgttcttgatttaattgtatagaatttgtataattaggtgtattttatttgcgtctagctttgaggtatcataatttatgtatcttatgtgaattttttgctgtaataccaataaagttttttttctccaca

SEQ ID NO: 428627 - DNA, 1221 bp, Homo sapiens
agcgggggtgttacggggacactggcccgactactttcgttccgtcttccatcgttttctctcgtgcaatggcgtccgggctggtaagattgctgcagcagggacatcgctgcctcctggctccagtcgcccccaagctggtccctccggttcggggagtgaagaagggattccgcgccgccttccgcttccagaaggagttagagcggcagcgccttctgcggtgcccgccgccgcccgtgcgccgttcagagaagccgaactgggattaccatgcagaaatacaagcttttggacatcggttacaggaaaacttttccttagatcttctcaaaactgcatttgttaatagctgctatattaaaagtgaggaggccaaacgccaacaacttgggatagagaaagaagctgttcttctgaatcttaaaagtaatcaagaactatccgaacaagggacatctttttcacagacttgccttacacagtttcttgaagacgagtacccagacatgcccactgaaggcataaaaaatcttgttgactttctcactggtgaggaagtcgtgtgtcacgtggctagaaacttggctgtggagcagttaacactgagtgaagaattcccagtgcccccagctgtgttacagcagactttctttgcagttattggagccctgttacagagcagtggacctgagaggactgcacttttcatcagggacttcttaattactcaaatgactggaaaagagctctttgagatgtggaagataataaatcccatggggctattggtagaagaactgaagaaaaggaatgtttcagctcctgaatcaagacttactaggcagtctggtggcaccacagctttgcctttgtattttgttggcttatactgtgataaaaagttgattgcagaaggacctggggaaacagtattggttgcagaagaagaggctgctcgagtggcccttagaaaactttatggattcacagaaaatagacggccgtggaactattccaagcccaaagaaaccttgagagcagaaaagagcatcactgccagctagccgccatggatgcagcagcctgaaacttgagagcgaaagtgagataaatgtcaaaggtgtttcaagccagacattttcacaattgtgaagaaatagatgttttgtttctgttttttactgtgttcccaaaattaaataaatgttaaccaagtca

SEQ ID NO: 428628 - DNA, 1828 bp, Homo sapiens
  misc_feature (1769)..(1769): n is a, c, g, or t
  misc_feature (1791)..(1791): n is a, c, g, or t
  misc_feature (1799)..(1799): n is a, c, g, or t
  misc_feature (1803)..(1803): n is a, c, g, or t
  misc_feature (1809)..(1809): n is a, c, g, or t
  misc_feature (1825)..(1825): n is a, c, g, or t
agcgggggtgttacggggacactggcccgactactttcgttccgtcttccatcgttttctctcgtgcaatggcgtccgggctggtaagattgctgcagcagggacatcgctgcctcctggctccagtcgcccccaagctggtccctccggttcggggagtgaagaagggattccgcgccgccttccgcttccagaaggagttagagcggcagcgccttctgcggtgcccgccgccgcccgtgcgccgttcagagaagccgaactgggattaccatgcagaaatacaagcttttggacatcggttacaggaaaacttttccttagatcttctcaaaactgcatttgttaatagctgctatattaaaagtgaggaggccaaacgccaacaacttgggatagagaaagaagctgttcttctgaatcttaaaagtaatcaagaactatccgaacaagggacatctttttcacagacttgccttacacagtttcttgaagacgagtacccagacatgcccactgaaggcataaaaaatcttgttgactttctcactggtgaggaagtcgtgtgtcacgtggctagaaacttggctgtggagcagttaacactgagtgaagaattcccagtgcccccagctgtgttacagcagactttctttgcagttattggagccctgttacagagcagtggacctgagaggactgcacttttcatcagggacttcttaattactcaaatgactggaaaagagctctttgagatgtggaagataataaatcccatggggctattggtagaagaactgaagaaaaggaatgtttcagctcctgaatcaagacttactaggcagtctggtggcaccacagctttgcctttgtattttgttggcttatactgtgataaaaagttgattgcagaaggacctggggaaacagtattggttgcagaagaagaggctgctcgagtggcccttagaaaactttatggattcacagaaaatagacggccgtggaactattccaagcccaaagaaaccttgagagcagaaaagagcatcactgccagctagccgccatggatgcagcagcctgaaacttgagagcgaaagtgagataaatgtcaaaggtgtttcaagccagacattttcacaattgtgaagaaatagatgttttgtttctgttttttactgtgttcccaaaattaaataaatgttaaccaagtcacagtgtttttggttttgtttttctgaaatcttggtttgatcaaatctttttttttttctcttgagatggagtcttactctgtcgcccaggctggactgcagtggtgcgatctcggctcactgcaacctccacctcacaggttcaagcgattctcgtggctcagcctccctagtagctgggattacaggcacacaccaccatacctggctaatttttgtatttttggtagagatggggtttcaccaagttggctaggctagtcttgaactcctgacctcaggtgatccacccgccttggcctcccaaagtgctgggattacaggtgtgagccactatacccgaccagatcaaatctttttttgacatttttgcaaaaaaattttcctaatgttcttgatttaattgtatagaatttgtataattaggtgtattttatttgcgtctagctttgaggtatcataatttatgtatcttatgtgaattttttgctgtaataccaataaagttttttttctccacaaaaaaaaaaaaaaaaaaaaaaaaaaaanaaaaaaaaaaaaaaaaaaaaanaaaaaaanaaanaaaaanaaaaaaaaaaaaaaanaaa

SEQ ID NO: 428629 - DNA, 1503 bp, Homo sapiens
agcgggggtgttacggggacactggcccgactactttcgttccgtcttccatcgttttctctcgtgcaatggcgtccgggctggtaagattgctgcagcagggacatcgctgcctcctggctccagtcgcccccaagctggtccctccggttcggggagtgaagaagggattccgcgccgccttccgcttccagaaggagttagagcggcagcgccttctgcggtgcccgccgccgcccgtgcgccgttcagagaagccgaactgggattaccatgcagaaatacaagcttttggacatcggttacaggaaaacttttccttagatcttctcaaaactgcatttgttaatagctgctatattaaaagtgaggaggccaaacgccaacaacttgggatagagaaagaagctgttcttctgaatcttaaaagtaatcaagaactatccgaacaagggacatctttttcacagacttgccttacacagtttcttgaagacgagtacccagacatgcccactgaaggcataaaaaatcttgttgactttctcactggtgaggaagtcgtgtgtcacgtggctagaaacttggctgtggagcagttaacactgagtgaagaattcccagtgcccccagctgtgttacagcagactttctttgcagttattggagccctgttacagagcagtggacctgagaggactgcacttttcatcagggacttcttaattactcaaatgactggaaaagagctctttgagatgtggaagataataaatcccatggggctattggtagaagaactgaagaaaaggaatgtttcagctcctgaatcaagacttactaggcagtctggtggcaccacagctttgcctttgtattttgttggcttatactgtgataaaaagttgattgcagaaggacctggggaaacagtattggttgcagaagaagaggctgctcgagtggcccttagaaaactttatggattcacagaaaatagacggccgtggaactattccaagcccaaagaaaccttgagagcagaaaagagcatcactgccagctagccgccatggatgcagcagcctgaaacttgagagcgaaagtgagataaatgtcaaaggtgtttcaagccagacattttcacaattgtgaagaaatagatgttttgtttctgttttttactgtgttcccaaaattaaataaatgttaaccaagtcacagtgtttttggttttgtttttctgaaatcttggtttgatcaaatctttttttttttctcttgagatggagtcttactctgtcgcccaggctggactgcagtggtgcgatctcggctcactgcaacctccacctcacaggttcaagcgattctcgtggctcagcctcctacttgggaggccgaggcaggagaatctcttgaacctcggaggcggaggttgcagtgagccaagatcatgccactgtactccagcctgggcggcagagcaagactctgtatcag

SEQ ID NO: 428630 - DNA, 746 bp, Homo sapiens
ctctcaccattagcaaccttgcatcccatgggcccttcttctatggccacatgtctctgtggctctttccttcccccttctcttccactgttaaggactcatgtgcttacttagtcctgaatggagacaccgtcatcatccacatgagcccactgtcctaatccatacaggctgctacaaggaaatgcattagaccaggtagcttataaataacagaactttgtttctcacagtcctggaggctgagaagtgcaagatcaaggtgccggcagtcttggtgtctggtgaaggcctgctttctcatagaggcttccttcttgctgtgtcttcgcatggtgagaggaacaaacaagctcccttgtgcctttaataaggtgctaatcccagtcatgagggcagagtctcccgtaaggcttaacctcctaatgccatcaccttgagggttaggattttaacacatgaacagtgacggaacacaacgttcattccatagcaccagggtagtctcctcatgtcaaggtctttacctgaatcacatgcatgatgtaccgttttcatgtaaggttctaggaatctgtggacatctttggggggccattattttgctgatcacatattacatattttttaatattctagactagtatgaaaacaatgccacttccattgctttatatacgtatctatatacacattgtctattgctataattaaaaaaaagttgtagacacaaatatacccattta

SEQ ID NO: 428631 - DNA, 961 bp, Homo sapiens
ctctcaccattagcaaccttgcatcccatgggcccttcttctatggccacatgtctctgtggctctttccttcccccttctcttccactgttaaggactcatgtgcttacttagtcctgaatggagacaccgtcatcatccacatgagcccactgtcctaatccatacaggctgctacaaggaaatgcattagaccaggtagcttataaataacagaactttgtttctcacagtcctggaggctgagaagtgcaagatcaaggtgccggcagtcttggtgtctggtgaaggcctgctttctcatagaggcttccttcttgctgtgtcttcgcatggtgagaggaacaaacaagctcccttgtgcctttaataaggtgctaatcccagtcatgagggcagagtctcccgtaaggcttaacctcctaatgccatcaccttgagggttaggattttaacacatgaacagtgacggaacacaacgttcattccatagcaccagggtagtctcctcatgtcaaggtctttacctgaatcacatgcatgatgtaccgttttcatgtaaggttctaggaatctgtggacatctttggggggccattattttgctgatcacatattacatattttttaatattctagactagtatgaaaacaatgccacttccattgctttatatacgtatctatatacacattgtctattgctataattaaaaaaaagttgtagacacaaatatacccatttaaaaaaaaaattttttttgctattttacttcatactgccaactcctttttcctgaaactgcttcaactctggaattcttttttgctattagttttattttattgaaatattcatgaatgagcatacacttgtatatggatttaaaattcacagtaatgttctcatgagttcatctgtgaataacattttatagacaaaatgtctgcactaagacaa

SEQ ID NO: 428632 - DNA, 8382 bp, Homo sapiens
tattagccaagctaagttactcttttgcctcctgttgttactcaagtcttttctcttctgtccttctgccagccttaccccactccttaatcctctgaaccagcaaaccattgccaagttctgatgcaaagtggtttataggcctgactggaccagactaaaagtgttcaaaatagcaagcaacaaggagcagaaatccatattagaatgggatatggactatatttatattggtacagaatgccttcaataaagagttgtgagttgtgtaggtgagttgccatggagctacaaatatgagttgatattctgaaatcctagacagccatctccaaggttaagaaaaatccttatgcactcacttgcaaagatatccacagcatgctcttggagcgccgccggccgggaggcgaaggatgcaggcggctccgcgcgccggctgcggggcagcgctcctgctgtggattgtcagcagctgcctctgcagagcctggacggctccctccacgtcccaaaaatgtgatgagccacttgtctctggactcccccatgtggctttcagcagctcctcctccatctctggtagctattctcccggctatgccaagataaacaagagaggaggtgctgggggatggtctccatcagacagcgaccattatcaatggcttcaggttgactttggcaatcggaagcagatcagtgccattgcaacccaaggaaggtatagcagctcagattgggtgacccaataccggatgctctacagcgacacagggagaaactggaaaccctatcatcaagatgggaatatctgggcatttcccggaaacattaactctgacggtgtggtccggcacgaattacagcatccgattattgcccgctatgtgcgcatagtgcctctggattggaatggagaaggtcgcattggactcagaattgaagtttatggctgttcttactgggctgatgttatcaactttgatggccatgttgtattaccatatagattcagaaacaagaagatgaaaacactgaaagatgtcattgccttgaactttaagacgtctgaaagtgaaggagtaatcctgcacggagaaggacagcaaggagattacattaccttggaactgaaaaaagccaagctggtcctcagtttaaacttaggaagcaaccagcttggccccatatatggccacacatcagtgatgacaggaagtttgctggatgaccaccactggcactctgtggtcattgagcgccaggggcggagcattaacctcactctggacaggagcatgcagcacttccgtaccaatggagagtttgactacctggacttggactatgagataacctttggaggcatccctttctctggcaagcccagctccagcagtagaaagaatttcaaaggctgcatggaaagcatcaactacaatggcgtcaacattactgatcttgccagaaggaagaaattagagccctcaaatgtgggaaatttgagcttttcttgtgtggaaccctatacggtgcctgtctttttcaacgctacaagttacctggaggtgcccggacggcttaaccaggacctgttctcagtcagtttccagtttaggacatggaaccccaatggtctcctggtcttcagtcactttgcggataatttgggcaatgtggagattgacctcactgaaagcaaagtgggtgttcacatcaacatcacacagaccaagatgagccaaatcgatatttcctcaggttctgggttgaatgatggacagtggcacgaggttcgcttcctagccaaggaaaattttgctattctcaccatcgatggagatgaagcatcagcagttcgaactaatagtccccttcaagttaaaactggcgagaagtacttttttggaggttttctgaaccagatgaataactcaagtcactctgtccttcagccttcattccaaggatgcatgcagctcattcaagtggacgatcaacttgtaaatttatacgaagtggcacaaaggaagccgggaagtttcgcgaatgtcagcattgacatgtgtgcgatcatagacagatgtgtgcccaatcactgtgagcatggtggaaagtgctcgcaaacatgggacagcttcaaatgcacttgtgatgagacaggatacagtggggccacctgccacaactctatctacgagccttcctgtgaagcctacaaacacctaggacagacatcaaattattactggatagatcctgatggcagcggacctctggggcctctgaaagtttactgcaacatgacagaggacaaagtgtggaccatagtgtctcatgacttgcagatgcagacgcctgtggtcggctacaacccagaaaaatactcagtgacacagctcgtttacagcgcctccatggaccagataagtgccatcactgacagtgccgagtactgcgagcagtatgtctcctatttctgcaagatgtcaagattgttgaacaccccagatggaagcccttacacttggtgggttggcaaagccaacgagaagcactactactggggaggctctgggcctggaatccagaaatgtgcctgcggcatcgaacgcaactgcacagatcccaagtactactgtaactgcgacgcggactacaagcaatggaggaaggatgctggtttcttatcatacaaagatcacctgccagtgagccaagtggtggttggagatactgaccgtcaaggctcagaagccaaattgagcgtaggtcctctgcgctgccaaggagacaggaattattggaatgccgcctctttcccaaacccatcctcctacctgcacttctctactttccaaggggaaactagcgctgacatttctttctacttcaaaacattaaccccctggggagtgtttcttgaaaatatgggaaaggaagatttcatcaagctggagctgaagtctgccacagaagtgtccttttcatttgatgtgggaaatgggccagtagagattgtagtgaggtcaccaacccctctcaacgatgaccagtggcaccgggtcactgcagagaggaatgtcaagcaggccagcctacaggtggaccggctaccgcagcagatccgcaaggccccaacagaaggccacacccgcctggagctctacagccagttatttgtgggtggtgctgggggccagcagggcttcctgggctgcatccgctccttgaggatgaatggggtgacacttgacctggaggaaagagcaaaggtcacatctgggttcatatccggatgctcgggccattgcaccagctatggaacaaactgtgaaaatggaggcaaatgcctagagagataccacggttactcctgcgattgctctaatactgcatatgatggaacattttgcaacaaagatgttggtgcattttttgaagaagggatgtggctacgatataactttcaggcaccagcaacaaatgccagagactccagcagcagagtagacaacgctcccgaccagcagaactcccacccggacctggcacaggaggagatccgcttcagcttcagcaccaccaaggcgccctgcattctcctctacatcagctccttcaccacagacttcttggcagtcctcgtcaaacccactggaagcttacagattcgatacaacctgggtggcacccgagagccatacaatattgacgtagaccacaggaacatggccaatggacagccccacagtgtcaacatcacccgccacgagaagaccatctttctcaagctcgatcattatccttctgtgagttaccatctgccaagttcatccgacaccctcttcaattctcccaagtcgctctttctgggaaaagttatagaaacagggaaaattgaccaagagattcacaaatacaacaccccaggattcactggttgcctctccagagtccagttcaaccagatcgcccctctcaaggccgccttgaggcagacaaacgcctcggctcacgtccacatccagggcgagctggtggagtccaactgcggggcctcgccgctgaccctctcccccatgtcgtccgccaccgacccctggcacctggatcacctggattcagccagtgcggattttccatataatccaggacaaggccaagctataagaaatggagtcaacagaaactcggctatcattggaggcgtcattgctgtggtgattttcaccatcctgtgcaccctggtcttcctgatccggtacatgttccgccacaagggcacctaccataccaacgaagcaaagggggcggagtcggcagagagcgcggacgccgccatcatgaacaacgaccccaacttcacagagaccattgatgaaagcaaaaaggaatggctcatttgaggggtggctacttggctatgggatagggaggagggaattactagggaggagagaaagggacaaaagcaccctgcttcatactcttgagcacatccttaaaatatcagcacaagttgggggaggcaggcaatggaatataatggaatattcttgagactgatcacaaaaaaaaaaaacctttttaatatttctttatagctgagttttcccttctgtatcaaaacaaaataatacaaaaaatgcttttagagtttaagcaatggttgaaatttgtaggtactatctgtcttattttgtgtgtgtttagaggtgttctaaagacccgtggtaacagggcaagttttctacgtttttaagagcccttagaacgtgggtattttttttcttgagaaaagctaatgcacctacagatggcccccaacattctcttccttttgcttctagtcaaccttaatgggctgttacagaaactagttcgtgtttatatactatttcctttgatgtcctataagtcggaaaagaaaggggcaaagagaacctattatttgccagtttttaagcagagctcaatctatgccagctctctggcatctggggttcctgactgataccagcagttgaaggaagagagtgcatggcacctggtgtgtaacgacacaatcagcacaactggagagaggcattaaagaaccagggaaggtagtttgatttttcattgaattctacaagctaatattgttccacgtatgtagtcttagaccaatagctgtaactatcagctgcaataccatggtgaccagctgttacaaaagattttttcctgttttatctgaaacatactggatttatatatgtataagcgcctcaatggggaattagagccagatgttatgatttgtttgctctttttcttttatagttatagcaaaaatatggataatttctagtgaatgcataaattaggttgcgtttcttattttgctttaaatctctggtagtttttccacccctgtgacacaatcctaatagacagtgtcctgtaaatggacacaacacaataaagtcaagttattattgctgttactctggatgatatggaaaacactgccatattttaaatcaactactccacgtgtttttccatccaatcacactgctgtgattcagggatctttcttctaaaacggacacatttgaacctcaggttcatcacaaacctggtacctgttgcttcccagaggatggagaagtgtagttaatcacacctcttagtttaatctgaaatcttgacccagttatttaacaaataaatacctcattgattatatttaaaagtaatacacttcctgtaaacaaatggggacaatgcatccaaaaaatctttttaaacagattacacaaaaattatttccagaaaggctaccatttatcatcattatatttcaagcctcttatacttaataagcactttctaaaaagtcttgagatcccaccattctgaggaattcaatatgatcactttttccttctttgcctgggagaggttaagaggcggtttcgaaggtatagatgctattgttctgatggcccggctgaataaaatggaaattctagtttgttagaattatgcattctttttcaagattctcagtgtgcctaacttattggagcacatcagtttcttgggtaatggaaaacattacctagagttgccagtggcacattacaccagtacagagcacattccaaaggagacattggaccagttaattcccatacaagtcaaggtaacagaacaaaagggaatcctgatgcccttttaccattgctggttgagctcaggcactgtcatggacacccttaattttaaaaggttttaatcattcttctataaaatacatttaaaatggaaaaatacttaatatcactaaatatcagaacaatgtaacatttacaaatgacatattgaaagcaaaggctgttttatttagccaagatgattaccattaggagttactttatgtattgttgaaagcaaattttaaacatgatgttttagaagtgtttctgatttttaaacctggtttacaggtattacttctgcacttaccaaataatgccagatggaaatttattatttcttgcaattcccgtgatagctctgttctttatgcattgtctcaacactttcccttttttcccaaaatgagtagagaattaaagccacccaaaacagcttctgctactaaaatgttctcatcctttctcctccctctccttttcctgccacaaaaggtgaaaaatgagatccaatcctctcaccaaaatttcaaacctaggacactggaatgactgcagggatcagtggttctcccatatcaccatcaattaagacatataggacactgtcttccttcaagagggttacaatgtggccatcagacaggaaaccaaacggtggataaagtattaagtaactaagtgccaaataaatgctggaaatcttgacctctccttgggattatgggtgtaacaaaaatccctacatctgtttatgaaggccatattcagtacattttaaatggtaaataatctgtttatgtgaagaaaaagaattaagtctttcttccaactctctccttggatagcctagcacagtgcagcctccataaccatgacattcccgcccaagctctcagtgcctaatcctgctttgtcattcacatctcacaaaatcttgacatcttacattccaatacattatcaagcaagcacaagtatgctggtagtagcctctttaaataatatgtatagacaacaacaacgacaaaaaatagactgttttaaagtttcagggaaagttggtggctgatttaaagttgtgcaggaaacatcttctgtgtatgaagcaaatgtcgatgttttgaaaagctaggagatgactttgaatgaatgcaaggttagtgagatcctaagctctcaaaatagcatattccctagagctcaagaaagctggtccaggaggttgaaaaagctattttgttgttaaattattttctggcccttcttaatatttaaaaatgtatttccccttgtggctttcaaccacctgctcaaaaaaagagacttgttacatgaaagttttcattaaagagctgaaaacaagaatttagagagccattcctagaaaatgtcctactgccctgcatttgacaaacaagcatcctttactaacaagagcaggaattcagaggcacaagaaaaagcattggcatgagccaaagagtctgtcttaatgttacttttgaaaatctgctgagcggccaccatatgcaggctgagagctgggcacaggcgaagccattggaagcacttcaggaacaagcacacagctgtgggacttgaacatgcaagtgttcaggttgtgtcaagaagcttttctttccttctatgatggaatctgttcttttctatcctacttttttctctcttcctctcctcaccacattataccctgctcttacgcagtaaacgttttaatggcccgtttatgtctcatgcctccaaacaacactgaatttgaaaccccccattttttcttttcaccaccctgttgagcaattttcccaaaaaaagggcagcaattattaaattgaattcaagtttctagattttactaagttttattttgtcaggttttttaaattttttcagtgagcgtggtgactgcagaggttagtgctgtgaaaagctgggctaaatattctttctgtaaagtcaaacaggattccatcccctgtgaaataacacaaaatttcactctctaaaagcaacagcatgtaaactagaatgaaagaaggaaattatgtacgtatgcctaatattctttgtgaatgtctttcatttaactaaaattatattagaaaccagattgataaataaaaaattcaaagtagttttaattatccta

SEQ ID NO: 428633 - DNA, 9786 bp, Homo sapiens
tattagccaagctaagttactcttttgcctcctgttgttactcaagtcttttctcttctgtccttctgccagccttaccccactccttaatcctctgaaccagcaaaccattgccaagttctgatgcaaagtggtttataggcctgactggaccagactaaaagtgttcaaaatagcaagcaacaaggagcagaaatccatattagaatgggatatggactatatttatattggtacagaatgccttcaataaagagttgtgagttgtgtaggtgagttgccatggagctacaaatatgagttgatattctgaaatcctagacagccatctccaaggttaagaaaaatccttatgcactcacttgcaaagatatccacagcatgctcttggagcgccgccggccgggaggcgaaggatgcaggcggctccgcgcgccggctgcggggcagcgctcctgctgtggattgtcagcagctgcctctgcagagcctggacggctccctccacgtcccaaaaatgtgatgagccacttgtctctggactcccccatgtggctttcagcagctcctcctccatctctggtagctattctcccggctatgccaagataaacaagagaggaggtgctgggggatggtctccatcagacagcgaccattatcaatggcttcaggttgactttggcaatcggaagcagatcagtgccattgcaacccaaggaaggtatagcagctcagattgggtgacccaataccggatgctctacagcgacacagggagaaactggaaaccctatcatcaagatgggaatatctgggcatttcccggaaacattaactctgacggtgtggtccggcacgaattacagcatccgattattgcccgctatgtgcgcatagtgcctctggattggaatggagaaggtcgcattggactcagaattgaagtttatggctgttcttactgggctgatgttatcaactttgatggccatgttgtattaccatatagattcagaaacaagaagatgaaaacactgaaagatgtcattgccttgaactttaagacgtctgaaagtgaaggagtaatcctgcacggagaaggacagcaaggagattacattaccttggaactgaaaaaagccaagctggtcctcagtttaaacttaggaagcaaccagcttggccccatatatggccacacatcagtgatgacaggaagtttgctggatgaccaccactggcactctgtggtcattgagcgccaggggcggagcattaacctcactctggacaggagcatgcagcacttccgtaccaatggagagtttgactacctggacttggactatgagataacctttggaggcatccctttctctggcaagcccagctccagcagtagaaagaatttcaaaggctgcatggaaagcatcaactacaatggcgtcaacattactgatcttgccagaaggaagaaattagagccctcaaatgtgggaaatttgagcttttcttgtgtggaaccctatacggtgcctgtctttttcaacgctacaagttacctggaggtgcccggacggcttaaccaggacctgttctcagtcagtttccagtttaggacatggaaccccaatggtctcctggtcttcagtcactttgcggataatttgggcaatgtggagattgacctcactgaaagcaaagtgggtgttcacatcaacatcacacagaccaagatgagccaaatcgatatttcctcaggttctgggttgaatgatggacagtggcacgaggttcgcttcctagccaaggaaaattttgctattctcaccatcgatggagatgaagcatcagcagttcgaactaatagtccccttcaagttaaaactggcgagaagtacttttttggaggttttctgaaccagatgaataactcaagtcactctgtccttcagccttcattccaaggatgcatgcagctcattcaagtggacgatcaacttgtaaatttatacgaagtggcacaaaggaagccgggaagtttcgcgaatgtcagcattgacatgtgtgcgatcatagacagatgtgtgcccaatcactgtgagcatggtggaaagtgctcgcaaacatgggacagcttcaaatgcacttgtgatgagacaggatacagtggggccacctgccacaactctatctacgagccttcctgtgaagcctacaaacacctaggacagacatcaaattattactggatagatcctgatggcagcggacctctggggcctctgaaagtttactgcaacatgacagaggacaaagtgtggaccatagtgtctcatgacttgcagatgcagacgcctgtggtcggctacaacccagaaaaatactcagtgacacagctcgtttacagcgcctccatggaccagataagtgccatcactgacagtgccgagtactgcgagcagtatgtctcctatttctgcaagatgtcaagattgttgaacaccccagatggaagcccttacacttggtgggttggcaaagccaacgagaagcactactactggggaggctctgggcctggaatccagaaatgtgcctgcggcatcgaacgcaactgcacagatcccaagtactactgtaactgcgacgcggactacaagcaatggaggaaggatgctggtttcttatcatacaaagatcacctgccagtgagccaagtggtggttggagatactgaccgtcaaggctcagaagccaaattgagcgtaggtcctctgcgctgccaaggagacaggaattattggaatgccgcctctttcccaaacccatcctcctacctgcacttctctactttccaaggggaaactagcgctgacatttctttctacttcaaaacattaaccccctggggagtgtttcttgaaaatatgggaaaggaagatttcatcaagctggagctgaagtctgccacagaagtgtccttttcatttgatgtgggaaatgggccagtagagattgtagtgaggtcaccaacccctctcaacgatgaccagtggcaccgggtcactgcagagaggaatgtcaagcaggccagcctacaggtggaccggctaccgcagcagatccgcaaggccccaacagaaggccacacccgcctggagctctacagccagttatttgtgggtggtgctgggggccagcagggcttcctgggctgcatccgctccttgaggatgaatggggtgacacttgacctggaggaaagagcaaaggtcacatctgggttcatatccggatgctcgggccattgcaccagctatggaacaaactgtgaaaatggaggcaaatgcctagagagataccacggttactcctgcgattgctctaatactgcatatgatggaacattttgcaacaaagatgttggtgcattttttgaagaagggatgtggctacgatataactttcaggcaccagcaacaaatgccagagactccagcagcagagtagacaacgctcccgaccagcagaactcccacccggacctggcacaggaggagatccgcttcagcttcagcaccaccaaggcgccctgcattctcctctacatcagctccttcaccacagacttcttggcagtcctcgtcaaacccactggaagcttacagattcgatacaacctgggtggcacccgagagccatacaatattgacgtagaccacaggaacatggccaatggacagccccacagtgtcaacatcacccgccacgagaagaccatctttctcaagctcgatcattatccttctgtgagttaccatctgccaagttcatccgacaccctcttcaattctcccaagtcgctctttctgggaaaagttatagaaacagggaaaattgaccaagagattcacaaatacaacaccccaggattcactggttgcctctccagagtccagttcaaccagatcgcccctctcaaggccgccttgaggcagacaaacgcctcggctcacgtccacatccagggcgagctggtggagtccaactgcggggcctcgccgctgaccctctcccccatgtcgtccgccaccgacccctggcacctggatcacctggattcagccagtgcggattttccatataatccaggacaaggccaagctataagaaatggagtcaacagaaactcggctatcattggaggcgtcattgctgtggtgattttcaccatcctgtgcaccctggtcttcctgatccggtacatgttccgccacaagggcacctaccataccaacgaagcaaagggggcggagtcggcagagagcgcggacgccgccatcatgaacaacgaccccaacttcacagagaccattgatgaaagcaaaaaggaatggctcatttgaggggtggctacttggctatgggatagggaggagggaattactagggaggagagaaagggacaaaagcaccctgcttcatactcttgagcacatccttaaaatatcagcacaagttgggggaggcaggcaatggaatataatggaatattcttgagactgatcacaaaaaaaaaaaacctttttaatatttctttatagctgagttttcccttctgtatcaaaacaaaataatacaaaaaatgcttttagagtttaagcaatggttgaaatttgtaggtactatctgtcttattttgtgtgtgtttagaggtgttctaaagacccgtggtaacagggcaagttttctacgtttttaagagcccttagaacgtgggtattttttttcttgagaaaagctaatgcacctacagatggcccccaacattctcttccttttgcttctagtcaaccttaatgggctgttacagaaactagttcgtgtttatatactatttcctttgatgtcctataagtcggaaaagaaaggggcaaagagaacctattatttgccagtttttaagcagagctcaatctatgccagctctctggcatctggggttcctgactgataccagcagttgaaggaagagagtgcatggcacctggtgtgtaacgacacaatcagcacaactggagagaggcattaaagaaccagggaaggtagtttgatttttcattgaattctacaagctaatattgttccacgtatgtagtcttagaccaatagctgtaactatcagctgcaataccatggtgaccagctgttacaaaagattttttcctgttttatctgaaacatactggatttatatatgtataagcgcctcaatggggaattagagccagatgttatgatttgtttgctctttttcttttatagttatagcaaaaatatggataatttctagtgaatgcataaattaggttgcgtttcttattttgctttaaatctctggtagtttttccacccctgtgacacaatcctaatagacagtgtcctgtaaatggacacaacacaataaagtcaagttattattgctgttactctggatgatatggaaaacactgccatattttaaatcaactactccacgtgtttttccatccaatcacactgctgtgattcagggatctttcttctaaaacggacacatttgaacctcaggttcatcacaaacctggtacctgttgcttcccagaggatggagaagtgtagttaatcacacctcttagtttaatctgaaatcttgacccagttatttaacaaataaatacctcattgattatatttaaaagtaatacacttcctgtaaacaaatggggacaatgcatccaaaaaatctttttaaacagattacacaaaaattatttccagaaaggctaccatttatcatcattatatttcaagcctcttatacttaataagcactttctaaaaagtcttgagatcccaccattctgaggaattcaatatgatcactttttccttctttgcctgggagaggttaagaggcggtttcgaaggtatagatgctattgttctgatggcccggctgaataaaatggaaattctagtttgttagaattatgcattctttttcaagattctcagtgtgcctaacttattggagcacatcagtttcttgggtaatggaaaacattacctagagttgccagtggcacattacaccagtacagagcacattccaaaggagacattggaccagttaattcccatacaagtcaaggtaacagaacaaaagggaatcctgatgcccttttaccattgctggttgagctcaggcactgtcatggacacccttaattttaaaaggttttaatcattcttctataaaatacatttaaaatggaaaaatacttaatatcactaaatatcagaacaatgtaacatttacaaatgacatattgaaagcaaaggctgttttatttagccaagatgattaccattaggagttactttatgtattgttgaaagcaaattttaaacatgatgttttagaagtgtttctgatttttaaacctggtttacaggtattacttctgcacttaccaaataatgccagatggaaatttattatttcttgcaattcccgtgatagctctgttctttatgcattgtctcaacactttcccttttttcccaaaatgagtagagaattaaagccacccaaaacagcttctgctactaaaatgttctcatcctttctcctccctctccttttcctgccacaaaaggtgaaaaatgagatccaatcctctcaccaaaatttcaaacctaggacactggaatgactgcagggatcagtggttctcccatatcaccatcaattaagacatataggacactgtcttccttcaagagggttacaatgtggccatcagacaggaaaccaaacggtggataaagtattaagtaactaagtgccaaataaatgctggaaatcttgacctctccttgggattatgggtgtaacaaaaatccctacatctgtttatgaaggccatattcagtacattttaaatggtaaataatctgtttatgtgaagaaaaagaattaagtctttcttccaactctctccttggatagcctagcacagtgcagcctccataaccatgacattcccgcccaagctctcagtgcctaatcctgctttgtcattcacatctcacaaaatcttgacatcttacattccaatacattatcaagcaagcacaagtatgctggtagtagcctctttaaataatatgtatagacaacaacaacgacaaaaaatagactgttttaaagtttcagggaaagttggtggctgatttaaagttgtgcaggaaacatcttctgtgtatgaagcaaatgtcgatgttttgaaaagctaggagatgactttgaatgaatgcaaggttagtgagatcctaagctctcaaaatagcatattccctagagctcaagaaagctggtccaggaggttgaaaaagctattttgttgttaaattattttctggcccttcttaatatttaaaaatgtatttccccttgtggctttcaaccacctgctcaaaaaaagagacttgttacatgaaagttttcattaaagagctgaaaacaagaatttagagagccattcctagaaaatgtcctactgccctgcatttgacaaacaagcatcctttactaacaagagcaggaattcagaggcacaagaaaaagcattggcatgagccaaagagtctgtcttaatgttacttttgaaaatctgctgagcggccaccatatgcaggctgagagctgggcacaggcgaagccattggaagcacttcaggaacaagcacacagctgtgggacttgaacatgcaagtgttcaggttgtgtcaagaagcttttctttccttctatgatggaatctgttcttttctatcctacttttttctctcttcctctcctcaccacattataccctgctcttacgcagtaaacgttttaatggcccgtttatgtctcatgcctccaaacaacactgaatttgaaaccccccattttttcttttcaccaccctgttgagcaattttcccaaaaaaagggcagcaattattaaattgaattcaagtaagccagccaaagataggtcctaaattgctagtcccagtagaaccacctgatcctaaaccagtgcgaaacagacagtaacaatgtccccagctgacttcagctaagaaccaatggctcctacccccgccccgcttttttttgttgttttttgttttgttttgagacggagtcttgctctgtcccccaggctggagtgcactggcgcaatctcgggctcactgcaacctcctcctcctcccacattgaggcgattctcctgcctcagcctcccaagtagctgggattacaggcacccgccatcacacccagctaattttttttttttttttgtattattagtagaagccaggtttcaccatgttggccagggtggtctcgaactcctgacctcaagtgatccgtccacctcggccttgcaaattgctgggattacaggtgtgagccaccgtgccgagccagccccattttttaaatgatgttttggttaagagtggaccatgagaattagctgacagcatcccctttctctctccctgccttggtgggaccctccctgtgtgaccttggtcaagtcctcgaacttttgtcccgtatttaagatggagctgttttacctacttcataagacagttgcgaggtgccattgattcttgactgcaaaataccttgaaacccttatataaagactgaagtcaacggagcctagtgaaagacttactttgtggcttgtggttgaaagtcacatcaaaagacaaatgtggccacgttcaggaattggagacttactggcatggctctacagctgctcagttattaatcatgcagactaacctgtcaacactgggagatgcaacatagcaaaaggacagagaaattagaattttttgtgcagaaagccctaaattcccacctgaatgtaacttacagctcccttacctactctcacacatgccctcaaacatgctagattggcttatacataggccaacacaaaatacaaacgtgacgtgttcatgtagcctagtggctatatgcctattctccatgtaccctgcatggtagtgctgcaaactttaaagtacatttctttcacagcagtattttttttcataagtggcatataaatctcattcaatgaaatggggaaatcacgttgagaagttggtctgtcatctcccattgagcaaagactggcaggagataataaaaataaatatgggcacacatgtattaatatacagcacgcatttacaagtttattttccagataaaattgtgctataagaacagctctaccaagacagtctgcaccatttccaagtctcagttaatttacagcaactgctgctttcggagatggctgtgaaaatatggaagttcctctcaagtaggccaagaaacagttctagattttactaagttttattttgtcaggttttttaaattttttcagtgagcgtggtgactgcagaggttagtgctgtgaaaagctgggctaaatattctttctgtaaagtcaaacaggattccatcccctgtgaaataacacaaaatttcactctctaaaagcaacagcatgtaaactagaatgaaagaaggaaattatgtacgtatgcctaatattctttgtgaatgtctttcatttaactaaaattatattagaaaccagattgataaataaaaaattcaaagtagttttaattatccta

SEQ ID NO: 428634 - DNA, 5249 bp, Homo sapiens
ctccttatgctcatccctccttcctcatccctccttatgctcatccctccttgtgggtggtgctgggggccagcagggcttcctgggctgcatccgctccttgaggatgaatggggtgacacttgacctggaggaaagagcaaaggtcacatctgggttcatatccggatgctcgggccattgcaccagctatggaacaaactgtgaaaatggaggcaaatgcctagagagataccacggttactcctgcgattgctctaatactgcatatgatggaacattttgcaacaaagatgttggtgcattttttgaagaagggatgtggctacgatataactttcaggcaccagcaacaaatgccagagactccagcagcagagtagacaacgctcccgaccagcagaactcccacccggacctggcacaggaggagatccgcttcagcttcagcaccaccaaggcgccctgcattctcctctacatcagctccttcaccacagacttcttggcagtcctcgtcaaacccactggaagcttacagattcgatacaacctgggtggcacccgagagccatacaatattgacgtagaccacaggaacatggccaatggacagccccacagtgtcaacatcacccgccacgagaagaccatctttctcaagctcgatcattatccttctgtgagttaccatctgccaagttcatccgacaccctcttcaattctcccaagtcgctctttctgggaaaagttatagaaacagggaaaattgaccaagagattcacaaatacaacaccccaggattcactggttgcctctccagagtccagttcaaccagatcgcccctctcaaggccgccttgaggcagacaaacgcctcggctcacgtccacatccagggcgagctggtggagtccaactgcggggcctcgccgctgaccctctcccccatgtcgtccgccaccgacccctggcacctggatcacctggattcagccagtgcggattttccatataatccaggacaaggccaagctataagaaatggagtcaacagaaactcggctatcattggaggcgtcattgctgtggtgattttcaccatcctgtgcaccctggtcttcctgatccggtacatgttccgccacaagggcacctaccataccaacgaagcaaagggggcggagtcggcagagagcgcggacgccgccatcatgaacaacgaccccaacttcacagagaccattgatgaaagcaaaaaggaatggctcatttgaggggtggctacttggctatgggatagggaggagggaattactagggaggagagaaagggacaaaagcaccctgcttcatactcttgagcacatccttaaaatatcagcacaagttgggggaggcaggcaatggaatataatggaatattcttgagactgatcacaaaaaaaaaaaacctttttaatatttctttatagctgagttttcccttctgtatcaaaacaaaataatacaaaaaatgcttttagagtttaagcaatggttgaaatttgtaggtactatctgtcttattttgtgtgtgtttagaggtgttctaaagacccgtggtaacagggcaagttttctacgtttttaagagcccttagaacgtgggtattttttttcttgagaaaagctaatgcacctacagatggcccccaacattctcttccttttgcttctagtcaaccttaatgggctgttacagaaactagttcgtgtttatatactatttcctttgatgtcctataagtcggaaaagaaaggggcaaagagaacctattatttgccagtttttaagcagagctcaatctatgccagctctctggcatctggggttcctgactgataccagcagttgaaggaagagagtgcatggcacctggtgtgtaacgacacaatcagcacaactggagagaggcattaaagaaccagggaaggtagtttgatttttcattgaattctacaagctaatattgttccacgtatgtagtcttagaccaatagctgtaactatcagctgcaataccatggtgaccagctgttacaaaagattttttcctgttttatctgaaacatactggatttatatatgtataagcgcctcaatggggaattagagccagatgttatgatttgtttgctctttttcttttatagttatagcaaaaatatggataatttctagtgaatgcataaattaggttgcgtttcttattttgctttaaatctctggtagtttttccacccctgtgacacaatcctaatagacagtgtcctgtaaatggacacaacacaataaagtcaagttattattgctgttactctggatgatatggaaaacactgccatattttaaatcaactactccacgtgtttttccatccaatcacactgctgtgattcagggatctttcttctaaaacggacacatttgaacctcaggttcatcacaaacctggtacctgttgcttcccagaggatggagaagtgtagttaatcacacctcttagtttaatctgaaatcttgacccagttatttaacaaataaatacctcattgattatatttaaaagtaatacacttcctgtaaacaaatggggacaatgcatccaaaaaatctttttaaacagattacacaaaaattatttccagaaaggctaccatttatcatcattatatttcaagcctcttatacttaataagcactttctaaaaagtcttgagatcccaccattctgaggaattcaatatgatcactttttccttctttgcctgggagaggttaagaggcggtttcgaaggtatagatgctattgttctgatggcccggctgaataaaatggaaattctagtttgttagaattatgcattctttttcaagattctcagtgtgcctaacttattggagcacatcagtttcttgggtaatggaaaacattacctagagttgccagtggcacattacaccagtacagagcacattccaaaggagacattggaccagttaattcccatacaagtcaaggtaacagaacaaaagggaatcctgatgcccttttaccattgctggttgagctcaggcactgtcatggacacccttaattttaaaaggttttaatcattcttctataaaatacatttaaaatggaaaaatacttaatatcactaaatatcagaacaatgtaacatttacaaatgacatattgaaagcaaaggctgttttatttagccaagatgattaccattaggagttactttatgtattgttgaaagcaaattttaaacatgatgttttagaagtgtttctgatttttaaacctggtttacaggtattacttctgcacttaccaaataatgccagatggaaatttattatttcttgcaattcccgtgatagctctgttctttatgcattgtctcaacactttcccttttttcccaaaatgagtagagaattaaagccacccaaaacagcttctgctactaaaatgttctcatcctttctcctccctctccttttcctgccacaaaaggtgaaaaatgagatccaatcctctcaccaaaatttcaaacctaggacactggaatgactgcagggatcagtggttctcccatatcaccatcaattaagacatataggacactgtcttccttcaagagggttacaatgtggccatcagacaggaaaccaaacggtggataaagtattaagtaactaagtgccaaataaatgctggaaatcttgacctctccttgggattatgggtgtaacaaaaatccctacatctgtttatgaaggccatattcagtacattttaaatggtaaataatctgtttatgtgaagaaaaagaattaagtctttcttccaactctctccttggatagcctagcacagtgcagcctccataaccatgacattcccgcccaagctctcagtgcctaatcctgctttgtcattcacatctcacaaaatcttgacatcttacattccaatacattatcaagcaagcacaagtatgctggtagtagcctctttaaataatatgtatagacaacaacaacgacaaaaaatagactgttttaaagtttcagggaaagttggtggctgatttaaagttgtgcaggaaacatcttctgtgtatgaagcaaatgtcgatgttttgaaaagctaggagatgactttgaatgaatgcaaggttagtgagatcctaagctctcaaaatagcatattccctagagctcaagaaagctggtccaggaggttgaaaaagctattttgttgttaaattattttctggcccttcttaatatttaaaaatgtatttccccttgtggctttcaaccacctgctcaaaaaaagagacttgttacatgaaagttttcattaaagagctgaaaacaagaatttagagagccattcctagaaaatgtcctactgccctgcatttgacaaacaagcatcctttactaacaagagcaggaattcagaggcacaagaaaaagcattggcatgagccaaagagtctgtcttaatgttacttttgaaaatctgctgagcggccaccatatgcaggctgagagctgggcacaggcgaagccattggaagcacttcaggaacaagcacacagctgtgggacttgaacatgcaagtgttcaggttgtgtcaagaagcttttctttccttctatgatggaatctgttcttttctatcctacttttttctctcttcctctcctcaccacattataccctgctcttacgcagtaaacgttttaatggcccgtttatgtctcatgcctccaaacaacactgaatttgaaaccccccattttttcttttcaccaccctgttgagcaattttcccaaaaaaagggcagcaattattaaattgaattcaagtttctagattttactaagttttattttgtcaggttttttaaattttttcagtgagcgtggtgactgcagaggttagtgctgtgaaaagctgggctaaatattctttctgtaaagtcaaacaggattccatcccctgtgaaataacacaaaatttcactctctaaaagcaacagcatgtaaactagaatgaaagaaggaaattatgtacgtatgcctaatattctttgtgaatgtctttcatttaactaaaattatattagaaaccagattgataaataaaaaattcaaagtagttttaattatccta

SEQ ID NO: 428635 - DNA, 405 bp, Homo sapiens
cactgaaagcaaagtgggtgttcacatcaacatcacacagaccaagatgagccaaatcgatatttcctcaggtcagtgaaacctatttgacatttgttcctgaaacttattgcaatttccagagttaatgttgtgctttgtttggttttgctggtgttacacgctcaggattaggttttaattcagatcttcaagacgcttacttggttgtagtgtgtgctgattgaataaagaaaacttggaaagttgttgagagagcaaggcatgggtgaaggagaaaattggttgagattggaaaagcaaaatctattccttaccaatgctagtttatttttaatagataaattgctcttcttttaagtgaataatttatgtttaaaaacaaggaatgtttattttaaaaac

SEQ ID NO: 428636 - DNA, 8106 bp, Homo sapiens
  misc_feature (7)..(7): n is a, c, g, or t
  misc_feature (26)..(26): n is a, c, g, or t
tgagggnagaagaggaagcgggaggngcttggcttcctcgcgtatttgaggacagcccatctcccttcaagaaccctacggagagtcggactgcatctccgcagcgagctcttggagcgccgccggccgggaggcgaaggatgcaggcggctccgcgcgccggctgcggggcagcgctcctgctgtggattgtcagcagctgcctctgcagagcctggacggctccctccacgtcccaaaaatgtgatgagccacttgtctctggactcccccatgtggctttcagcagctcctcctccatctctggtagctattctcccggctatgccaagataaacaagagaggaggtgctgggggatggtctccatcagacagcgaccattatcaatggcttcaggttgactttggcaatcggaagcagatcagtgccattgcaacccaaggaaggtatagcagctcagattgggtgacccaataccggatgctctacagcgacacagggagaaactggaaaccctatcatcaagatgggaatatctgggcatttcccggaaacattaactctgacggtgtggtccggcacgaattacagcatccgattattgcccgctatgtgcgcatagtgcctctggattggaatggagaaggtcgcattggactcagaattgaagtttatggctgttcttactgggctgatgttatcaactttgatggccatgttgtattaccatatagattcagaaacaagaagatgaaaacactgaaagatgtcattgccttgaactttaagacgtctgaaagtgaaggagtaatcctgcacggagaaggacagcaaggagattacattaccttggaactgaaaaaagccaagctggtcctcagtttaaacttaggaagcaaccagcttggccccatatatggccacacatcagtgatgacaggaagtttgctggatgaccaccactggcactctgtggtcattgagcgccaggggcggagcattaacctcactctggacaggagcatgcagcacttccgtaccaatggagagtttgactacctggacttggactatgagataacctttggaggcatccctttctctggcaagcccagctccagcagtagaaagaatttcaaaggctgcatggaaagcatcaactacaatggcgtcaacattactgatcttgccagaaggaagaaattagagccctcaaatgtgggaaatttgagcttttcttgtgtggaaccctatacggtgcctgtctttttcaacgctacaagttacctggaggtgcccggacggcttaaccaggacctgttctcagtcagtttccagtttaggacatggaaccccaatggtctcctggtcttcagtcactttgcggataatttgggcaatgtggagattgacctcactgaaagcaaagtgggtgttcacatcaacatcacacagaccaagatgagccaaatcgatatttcctcaggttctgggttgaatgatggacagtggcacgaggttcgcttcctagccaaggaaaattttgctattctcaccatcgatggagatgaagcatcagcagttcgaactaatagtccccttcaagttaaaactggcgagaagtacttttttggaggttttctgaaccagatgaataactcaagtcactctgtccttcagccttcattccaaggatgcatgcagctcattcaagtggacgatcaacttgtaaatttatacgaagtggcacaaaggaagccgggaagtttcgcgaatgtcagcattgacatgtgtgcgatcatagacagatgtgtgcccaatcactgtgagcatggtggaaagtgctcgcaaacatgggacagcttcaaatgcacttgtgatgagacaggatacagtggggccacctgccacaactctatctacgagccttcctgtgaagcctacaaacacctaggacagacatcaaattattactggatagatcctgatggcagcggacctctggggcctctgaaagtttactgcaacatgacagaggacaaagtgtggaccatagtgtctcatgacttgcagatgcagacgcctgtggtcggctacaacccagaaaaatactcagtgacacagctcgtttacagcgcctccatggaccagataagtgccatcactgacagtgccgagtactgcgagcagtatgtctcctatttctgcaagatgtcaagattgttgaacaccccagatggaagcccttacacttggtgggttggcaaagccaacgagaagcactactactggggaggctctgggcctggaatccagaaatgtgcctgcggcatcgaacgcaactgcacagatcccaagtactactgtaactgcgacgcggactacaagcaatggaggaaggatgctggtttcttatcatacaaagatcacctgccagtgagccaagtggtggttggagatactgaccgtcaaggctcagaagccaaattgagcgtaggtcctctgcgctgccaaggagacaggaattattggaatgccgcctctttcccaaacccatcctcctacctgcacttctctactttccaaggggaaactagcgctgacatttctttctacttcaaaacattaaccccctggggagtgtttcttgaaaatatgggaaaggaagatttcatcaagctggagctgaagtctgccacagaagtgtccttttcatttgatgtgggaaatgggccagtagagattgtagtgaggtcaccaacccctctcaacgatgaccagtggcaccgggtcactgcagagaggaatgtcaagcaggccagcctacaggtggaccggctaccgcagcagatccgcaaggccccaacagaaggccacacccgcctggagctctacagccagttatttgtgggtggtgctgggggccagcagggcttcctgggctgcatccgctccttgaggatgaatggggtgacacttgacctggaggaaagagcaaaggtcacatctgggttcatatccggatgctcgggccattgcaccagctatggaacaaactgtgaaaatggaggcaaatgcctagagagataccacggttactcctgcgattgctctaatactgcatatgatggaacattttgcaacaaagatgttggtgcattttttgaagaagggatgtggctacgatataactttcaggcaccagcaacaaatgccagagactccagcagcagagtagacaacgctcccgaccagcagaactcccacccggacctggcacaggaggagatccgcttcagcttcagcaccaccaaggcgccctgcattctcctctacatcagctccttcaccacagacttcttggcagtcctcgtcaaacccactggaagcttacagattcgatacaacctgggtggcacccgagagccatacaatattgacgtagaccacaggaacatggccaatggacagccccacagtgtcaacatcacccgccacgagaagaccatctttctcaagctcgatcattatccttctgtgagttaccatctgccaagttcatccgacaccctcttcaattctcccaagtcgctctttctgggaaaagttatagaaacagggaaaattgaccaagagattcacaaatacaacaccccaggattcactggttgcctctccagagtccagttcaaccagatcgcccctctcaaggccgccttgaggcagacaaacgcctcggctcacgtccacatccagggcgagctggtggagtccaactgcggggcctcgccgctgaccctctcccccatgtcgtccgccaccgacccctggcacctggatcacctggattcagccagtgcggattttccatataatccaggacaaggccaagctataagaaatggagtcaacagaaactcggctatcattggaggcgtcattgctgtggtgattttcaccatcctgtgcaccctggtcttcctgatccggtacatgttccgccacaagggcacctaccataccaacgaagcaaagggggcggagtcggcagagagcgcggacgccgccatcatgaacaacgaccccaacttcacagagaccattgatgaaagcaaaaaggaatggctcatttgaggggtggctacttggctatgggatagggaggagggaattactagggaggagagaaagggacaaaagcaccctgcttcatactcttgagcacatccttaaaatatcagcacaagttgggggaggcaggcaatggaatataatggaatattcttgagactgatcacaaaaaaaaaaaacctttttaatatttctttatagctgagttttcccttctgtatcaaaacaaaataatacaaaaaatgcttttagagtttaagcaatggttgaaatttgtaggtactatctgtcttattttgtgtgtgtttagaggtgttctaaagacccgtggtaacagggcaagttttctacgtttttaagagcccttagaacgtgggtattttttttcttgagaaaagctaatgcacctacagatggcccccaacattctcttccttttgcttctagtcaaccttaatgggctgttacagaaactagttcgtgtttatatactatttcctttgatgtcctataagtcggaaaagaaaggggcaaagagaacctattatttgccagtttttaagcagagctcaatctatgccagctctctggcatctggggttcctgactgataccagcagttgaaggaagagagtgcatggcacctggtgtgtaacgacacaatcagcacaactggagagaggcattaaagaaccagggaaggtagtttgatttttcattgaattctacaagctaatattgttccacgtatgtagtcttagaccaatagctgtaactatcagctgcaataccatggtgaccagctgttacaaaagattttttcctgttttatctgaaacatactggatttatatatgtataagcgcctcaatggggaattagagccagatgttatgatttgtttgctctttttcttttatagttatagcaaaaatatggataatttctagtgaatgcataaattaggttgcgtttcttattttgctttaaatctctggtagtttttccacccctgtgacacaatcctaatagacagtgtcctgtaaatggacacaacacaataaagtcaagttattattgctgttactctggatgatatggaaaacactgccatattttaaatcaactactccacgtgtttttccatccaatcacactgctgtgattcagggatctttcttctaaaacggacacatttgaacctcaggttcatcacaaacctggtacctgttgcttcccagaggatggagaagtgtagttaatcacacctcttagtttaatctgaaatcttgacccagttatttaacaaataaatacctcattgattatatttaaaagtaatacacttcctgtaaacaaatggggacaatgcatccaaaaaatctttttaaacagattacacaaaaattatttccagaaaggctaccatttatcatcattatatttcaagcctcttatacttaataagcactttctaaaaagtcttgagatcccaccattctgaggaattcaatatgatcactttttccttctttgcctgggagaggttaagaggcggtttcgaaggtatagatgctattgttctgatggcccggctgaataaaatggaaattctagtttgttagaattatgcattctttttcaagattctcagtgtgcctaacttattggagcacatcagtttcttgggtaatggaaaacattacctagagttgccagtggcacattacaccagtacagagcacattccaaaggagacattggaccagttaattcccatacaagtcaaggtaacagaacaaaagggaatcctgatgcccttttaccattgctggttgagctcaggcactgtcatggacacccttaattttaaaaggttttaatcattcttctataaaatacatttaaaatggaaaaatacttaatatcactaaatatcagaacaatgtaacatttacaaatgacatattgaaagcaaaggctgttttatttagccaagatgattaccattaggagttactttatgtattgttgaaagcaaattttaaacatgatgttttagaagtgtttctgatttttaaacctggtttacaggtattacttctgcacttaccaaataatgccagatggaaatttattatttcttgcaattcccgtgatagctctgttctttatgcattgtctcaacactttcccttttttcccaaaatgagtagagaattaaagccacccaaaacagcttctgctactaaaatgttctcatcctttctcctccctctccttttcctgccacaaaaggtgaaaaatgagatccaatcctctcaccaaaatttcaaacctaggacactggaatgactgcagggatcagtggttctcccatatcaccatcaattaagacatataggacactgtcttccttcaagagggttacaatgtggccatcagacaggaaaccaaacggtggataaagtattaagtaactaagtgccaaataaatgctggaaatcttgacctctccttgggattatgggtgtaacaaaaatccctacatctgtttatgaaggccatattcagtacattttaaatggtaaataatctgtttatgtgaagaaaaagaattaagtctttcttccaactctctccttggatagcctagcacagtgcagcctccataaccatgacattcccgcccaagctctcagtgcctaatcctgctttgtcattcacatctcacaaaatcttgacatcttacattccaatacattatcaagcaagcacaagtatgctggtagtagcctctttaaataatatgtatagacaacaacaacgacaaaaaatagactgttttaaagtttcagggaaagttggtggctgatttaaagttgtgcaggaaacatcttctgtgtatgaagcaaatgtcgatgttttgaaaagctaggagatgactttgaatgaatgcaaggttagtgagatcctaagctctcaaaatagcatattccctagagctcaagaaagctggtccaggaggttgaaaaagctattttgttgttaaattattttctggcccttcttaatatttaaaaatgtatttccccttgtggctttcaaccacctgctcaaaaaaagagacttgttacatgaaagttttcattaaagagctgaaaacaagaatttagagagccattcctagaaaatgtcctactgccctgcatttgacaaacaagcatcctttactaacaagagcaggaattcagaggcacaagaaaaagcattggcatgagccaaagagtctgtcttaatgttacttttgaaaatctgctgagcggccaccatatgcaggctgagagctgggcacaggcgaagccattggaagcacttcaggaacaagcacacagctgtgggacttgaacatgcaagtgttcaggttgtgtcaagaagcttttctttccttctatgatggaatctgttcttttctatcctacttttttctctcttcctctcctcaccacattataccctgctcttacgcagtaaacgttttaatggcccgtttatgtctcatgcctccaaacaacactgaatttgaaaccccccattttttcttttcaccaccctgttgagcaattttcccaaaaaaagggcagcaattattaaattgaattcaagtttctagattttactaagttttattttgtcaggttttttaaattttttcagtgagcgtggtgactgcagaggttagtgctgtgaaaagctgggctaaatattctttctgtaaagtcaaacaggattccatcccctgtgaaataacacaaaatttcactctctaaaagcaacagcatgtaaactagaatgaaagaaggaaattatgtacgtatgcctaatattctttgtgaatgtctttcatttaactaaaattatattagaaaccagattgataaataaaaaattcaaagtagttttaattatccta

SEQ ID NO: 428637 - DNA, 4657 bp, Homo sapiens
cggggtttgatcccgagagcggtggactcaaagctgcccgccgggactcgggctgccggccgacaaaggacggtcctcgggggttctgaagtctgacccggccagtgggaaagccacctgcatcacaaagcgaggggcacacctgaaccggggctggcgggaagagaaacagggaaaattgaccaagagattcacaaatacaacaccccaggattcactggttgcctctccagagtccagttcaaccagatcgcccctctcaaggccgccttgaggcagacaaacgcctcggctcacgtccacatccagggcgagctggtggagtccaactgcggggcctcgccgctgaccctctcccccatgtcgtccgccaccgacccctggcacctggatcacctggattcagccagtgcggattttccatataatccaggacaaggccaagctataagaaatggagtcaacagaaactcggctatcattggaggcgtcattgctgtggtgattttcaccatcctgtgcaccctggtcttcctgatccggtacatgttccgccacaagggcacctaccataccaacgaagcaaagggggcggagtcggcagagagcgcggacgccgccatcatgaacaacgaccccaacttcacagagaccattgatgaaagcaaaaaggaatggctcatttgaggggtggctacttggctatgggatagggaggagggaattactagggaggagagaaagggacaaaagcaccctgcttcatactcttgagcacatccttaaaatatcagcacaagttgggggaggcaggcaatggaatataatggaatattcttgagactgatcacaaaaaaaaaaaacctttttaatatttctttatagctgagttttcccttctgtatcaaaacaaaataatacaaaaaatgcttttagagtttaagcaatggttgaaatttgtaggtactatctgtcttattttgtgtgtgtttagaggtgttctaaagacccgtggtaacagggcaagttttctacgtttttaagagcccttagaacgtgggtattttttttcttgagaaaagctaatgcacctacagatggcccccaacattctcttccttttgcttctagtcaaccttaatgggctgttacagaaactagttcgtgtttatatactatttcctttgatgtcctataagtcggaaaagaaaggggcaaagagaacctattatttgccagtttttaagcagagctcaatctatgccagctctctggcatctggggttcctgactgataccagcagttgaaggaagagagtgcatggcacctggtgtgtaacgacacaatcagcacaactggagagaggcattaaagaaccagggaaggtagtttgatttttcattgaattctacaagctaatattgttccacgtatgtagtcttagaccaatagctgtaactatcagctgcaataccatggtgaccagctgttacaaaagattttttcctgttttatctgaaacatactggatttatatatgtataagcgcctcaatggggaattagagccagatgttatgatttgtttgctctttttcttttatagttatagcaaaaatatggataatttctagtgaatgcataaattaggttgcgtttcttattttgctttaaatctctggtagtttttccacccctgtgacacaatcctaatagacagtgtcctgtaaatggacacaacacaataaagtcaagttattattgctgttactctggatgatatggaaaacactgccatattttaaatcaactactccacgtgtttttccatccaatcacactgctgtgattcagggatctttcttctaaaacggacacatttgaacctcaggttcatcacaaacctggtacctgttgcttcccagaggatggagaagtgtagttaatcacacctcttagtttaatctgaaatcttgacccagttatttaacaaataaatacctcattgattatatttaaaagtaatacacttcctgtaaacaaatggggacaatgcatccaaaaaatctttttaaacagattacacaaaaattatttccagaaaggctaccatttatcatcattatatttcaagcctcttatacttaataagcactttctaaaaagtcttgagatcccaccattctgaggaattcaatatgatcactttttccttctttgcctgggagaggttaagaggcggtttcgaaggtatagatgctattgttctgatggcccggctgaataaaatggaaattctagtttgttagaattatgcattctttttcaagattctcagtgtgcctaacttattggagcacatcagtttcttgggtaatggaaaacattacctagagttgccagtggcacattacaccagtacagagcacattccaaaggagacattggaccagttaattcccatacaagtcaaggtaacagaacaaaagggaatcctgatgcccttttaccattgctggttgagctcaggcactgtcatggacacccttaattttaaaaggttttaatcattcttctataaaatacatttaaaatggaaaaatacttaatatcactaaatatcagaacaatgtaacatttacaaatgacatattgaaagcaaaggctgttttatttagccaagatgattaccattaggagttactttatgtattgttgaaagcaaattttaaacatgatgttttagaagtgtttctgatttttaaacctggtttacaggtattacttctgcacttaccaaataatgccagatggaaatttattatttcttgcaattcccgtgatagctctgttctttatgcattgtctcaacactttcccttttttcccaaaatgagtagagaattaaagccacccaaaacagcttctgctactaaaatgttctcatcctttctcctccctctccttttcctgccacaaaaggtgaaaaatgagatccaatcctctcaccaaaatttcaaacctaggacactggaatgactgcagggatcagtggttctcccatatcaccatcaattaagacatataggacactgtcttccttcaagagggttacaatgtggccatcagacaggaaaccaaacggtggataaagtattaagtaactaagtgccaaataaatgctggaaatcttgacctctccttgggattatgggtgtaacaaaaatccctacatctgtttatgaaggccatattcagtacattttaaatggtaaataatctgtttatgtgaagaaaaagaattaagtctttcttccaactctctccttggatagcctagcacagtgcagcctccataaccatgacattcccgcccaagctctcagtgcctaatcctgctttgtcattcacatctcacaaaatcttgacatcttacattccaatacattatcaagcaagcacaagtatgctggtagtagcctctttaaataatatgtatagacaacaacaacgacaaaaaatagactgttttaaagtttcagggaaagttggtggctgatttaaagttgtgcaggaaacatcttctgtgtatgaagcaaatgtcgatgttttgaaaagctaggagatgactttgaatgaatgcaaggttagtgagatcctaagctctcaaaatagcatattccctagagctcaagaaagctggtccaggaggttgaaaaagctattttgttgttaaattattttctggcccttcttaatatttaaaaatgtatttccccttgtggctttcaaccacctgctcaaaaaaagagacttgttacatgaaagttttcattaaagagctgaaaacaagaatttagagagccattcctagaaaatgtcctactgccctgcatttgacaaacaagcatcctttactaacaagagcaggaattcagaggcacaagaaaaagcattggcatgagccaaagagtctgtcttaatgttacttttgaaaatctgctgagcggccaccatatgcaggctgagagctgggcacaggcgaagccattggaagcacttcaggaacaagcacacagctgtgggacttgaacatgcaagtgttcaggttgtgtcaagaagcttttctttccttctatgatggaatctgttcttttctatcctacttttttctctcttcctctcctcaccacattataccctgctcttacgcagtaaacgttttaatggcccgtttatgtctcatgcctccaaacaacactgaatttgaaaccccccattttttcttttcaccaccctgttgagcaattttcccaaaaaaagggcagcaattattaaattgaattcaagtttctagattttactaagttttattttgtcaggttttttaaattttttcagtgagcgtggtgactgcagaggttagtgctgtgaaaagctgggctaaatattctttctgtaaagtcaaacaggattccatcccctgtgaaataacacaaaatttcactctctaaaagcaacagcatgtaaactagaatgaaagaaggaaattatgtacgtatgcctaatattctttgtgaatgtctttcatttaactaaaattatattagaaaccagattgataaataaaaaattcaaagtagttttaattatccta

SEQ ID NO: 428638 - DNA, 3018 bp, Homo sapiens
tattagccaagctaagttactcttttgcctcctgttgttactcaagtcttttctcttctgtccttctgccagccttaccccactccttaatcctctgaaccagcaaaccattgccaagttctgatgcaaagtggtttataggcctgactggaccagactaaaagtgttcaaaatagcaagcaacaaggagcagaaatccatattagaatgggatatggactatatttatattggtacagaatgccttcaataaagagttgtgagttgtgtaggtgagttgccatggagctacaaatatgagttgatattctgaaatcctagacagccatctccaaggttaagaaaaatccttatgcactcacttgcaaagatatccacagcatgctcttggagcgccgccggccgggaggcgaaggatgcaggcggctccgcgcgccggctgcggggcagcgctcctgctgtggattgtcagcagctgcctctgcagagcctggacggctccctccacgtcccaaaaatgtgatgagccacttgtctctggactcccccatgtggctttcagcagctcctcctccatctctggtagctattctcccggctatgccaagataaacaagagaggaggtgctgggggatggtctccatcagacagcgaccattatcaatggcttcaggttgactttggcaatcggaagcagatcagtgccattgcaacccaaggaaggtatagcagctcagattgggtgacccaataccggatgctctacagcgacacagggagaaactggaaaccctatcatcaagatgggaatatctgggcatttcccggaaacattaactctgacggtgtggtccggcacgaattacagcatccgattattgcccgctatgtgcgcatagtgcctctggattggaatggagaaggtcgcattggactcagaattgaagtttatggctgttcttactgggctgatgttatcaactttgatggccatgttgtattaccatatagattcagaaacaagaagatgaaaacactgaaagatgtcattgccttgaactttaagacgtctgaaagtgaaggagtaatcctgcacggagaaggacagcaaggagattacattaccttggaactgaaaaaagccaagctggtcctcagtttaaacttaggaagcaaccagcttggccccatatatggccacacatcagtgatgacaggaagtttgctggatgaccaccactggcactctgtggtcattgagcgccaggggcggagcattaacctcactctggacaggagcatgcagcacttccgtaccaatggagagtttgactacctggacttggactatgagataacctttggaggcatccctttctctggcaagcccagctccagcagtagaaagaatttcaaaggctgcatggaaagcatcaactacaatggcgtcaacattactgatcttgccagaaggaagaaattagagccctcaaatgtgggaaatttgagcttttcttgtgtggaaccctatacggtgcctgtctttttcaacgctacaagttacctggaggtgcccggacggcttaaccaggacctgttctcagtcagtttccagtttaggacatggaaccccaatggtctcctggtcttcagtcactttgcggataatttgggcaatgtggagattgacctcactgaaagcaaagtgggtgttcacatcaacatcacacagaccaagatgagccaaatcgatatttcctcaggttctgggttgaatgatggacagtggcacgaggttcgcttcctagccaaggaaaattttgctattctcaccatcgatggagatgaagcatcagcagttcgaactaatagtccccttcaagttaaaactggcgagaagtacttttttggaggttttctgaaccagatgaataactcaagtcactctgtccttcagccttcattccaaggatgcatgcagctcattcaagtggacgatcaacttgtaaatttatacgaagtggcacaaaggaagccgggaagtttcgcgaatgtcagcattgacatgtgtgcgatcatagacagatgtgtgcccaatcactgtgagcatggtggaaagtgctcgcaaacatgggacagcttcaaatgcacttgtgatgagacaggatacagtggggccacctgccacaactctatctacgagccttcctgtgaagcctacaaacacctaggacagacatcaaattattactggatagatcctgatggcagcggacctctggggcctctgaaagtttactgcaacatgacagaggacaaagtgtggaccatagtgtctcatgacttgcagatgcagacgcctgtggtcggctacaacccagaaaaatactcagtgacacagctcgtttacagcgcctccatggaccagataagtgccatcactgacagtgccgagtactgcgagcagtatgtctcctatttctgcaagatgtcaagattgttgaacaccccagatggaagcccttacacttggtgggttggcaaagccaacgagaagcactactactggggaggctctgggcctggaatccagaaatgtgcctgcggcatcgaacgcaactgcacagatcccaagtactactgtaactgcgacgcggactacaagcaatggaggaaggatgctggtttcttatcatacaaagatcacctgccagtgagccaagtggtggttggagatactgaccgtcaaggctcagaagccaaattgagcgtaggtcctctgcgctgccaaggagacagtaagtttgcatagcagctatggcttgcactttcttatcccatttaaatattgtttccaggctcctcagaagatgcctgcaatcagacttgctctcctgtagctcctacagaaacatcacacaacccaagcagagataacttagaggaggggaacagccataaagcctccagtacaggagccgagatttgggcataaagtggggatatccatctttcct

SEQ ID NO: 428639 - DNA, 591 bp, Homo sapiens
  misc_feature (564)..(564): n is a, c, g, or t
aactgagctaacaagaaatactagaaaaggaggaaggagaacattgctgcagcttggatctacaacctaagaaagcaagagtgatcaatctcagctctgttaaacatcttgtttacttactgcattcagcagcttgcaaatggttaactatatgcaaaaaagtcagcatagctgtgaagtatgccgtgaattttaattgagggaaaaagggacaattgcttcaggatgctctagtatgcactctgcttgaaatattttcaatgaaatgctcagtattctatctttgaccagaggttttaactttatgaagctatgggacttgacaaaaagtgatatttgagaagaaagtacgcagtggttggtgttttcttttttttaataaaggaattgaattactttgaacacctcttccagctgtgcattacagataacgtcaggaagagtctctgctttacaggtaagatgaatgtttccaggcttttcttatacttatttttgctatagtaaagtgattgaatttgtatgttcgcttcctttaaataaacaactttgcattaaaggacnacgcggccgcgaatttagtagtagtaa

SEQ ID NO: 428640 - DNA, 4202 bp, Homo sapiens
aactgagctaacaagaaatactagaaaaggaggaaggagaacattgctgcagcttggatctacaacctaagaaagcaagagtgatcaatctcagctctgttaaacatcttgtttacttactgcattcagcagcttgcaaatggttaactatatgcaaaaaagtcagcatagctgtgaagtatgccgtgaattttaattgagggaaaaagggacaattgcttcaggatgctctagtatgcactctgcttgaaatattttcaatgaaatgctcagtattctatctttgaccagaggttttaactttatgaagctatgggacttgacaaaaagtgatatttgagaagaaagtacgcagtggttggtgttttcttttttttaataaaggaattgaattactttgaacacctcttccagctgtgcattacagataacgtcaggaagagtctctgctttacagaatcggatttcatcacatgacaacatgaagctgtggattcatctcttttattcatctctccttgcctgtatatctttacactcccaaactccagtgctctcatccagaggctcttgtgattctctttgcaattgtgaggaaaaagatggcacaatgctaataaattgtgaagcaaaaggtatcaagatggtatctgaaataagtgtgccaccatcacgacctttccaactaagcttattaaataacggcttgacgatgcttcacacaaatgacttttctgggcttaccaatgctatttcaatacaccttggatttaacaatattgcagatattgagataggtgcatttaatggccttggcctcctgaaacaacttcatatcaatcacaattctttagaaattcttaaagaggatactttccatggactggaaaacctggaattcctgcaagcagataacaattttatcacagtgattgaaccaagtgcctttagcaagctcaacagactcaaagtgttaattttaaatgacaatgctattgagagtcttcctccaaacatcttccgatttgttcctttaacccatctagatcttcgtggaaatcaattacaaacattgccttatgttggttttctcgaacacattggccgaatattggatcttcagttggaggacaacaaatgggcctgcaattgtgacttattgcagttaaaaacttggttggagaacatgcctccacagtctataattggtgatgttgtctgcaacagccctccattttttaaaggaagtatactcagtagactaaagaaggaatctatttgccctactccaccagtgtatgaagaacatgaggatccttcaggatcattacatctggcagcaacatcttcaataaatgatagtcgcatgtcaactaagaccacgtccattctaaaactacccaccaaagcaccaggtttgataccttatattacaaagccatccactcaacttccaggaccttactgccctattccttgtaactgcaaagtcctatccccatcaggacttctaatacattgtcaggagcgcaacattgaaagcttatcagatctgagacctcctccgcaaaatcctagaaagctcattctagcgggaaatattattcacagtttaatgaagtctgatctagtggaatatttcactttggaaatgcttcacttgggaaacaatcgtattgaagttcttgaagaaggatcgtttatgaacctaacgagattacaaaaactctatctaaatggtaaccacctgaccaaattaagtaaaggcatgttccttggtctccataatcttgaatacttatatcttgaatacaatgccattaaggaaatactgccaggaacctttaatccaatgcctaaacttaaagtcctgtatttaaataacacctcctccaagttttaccaccacatattttttcaggggttcctctaactaaggtaaatcttaaacaaaccagtttacccatctacctgtaagtaatatttggatgatcttgatttactaacccagattgaccttgaggataacccctgggctgctcctgtgacctggttggactgcagcaatggatacaaaagttaagcaagaacacagtgacagatgacatcctctgcacttcccccgggcatctcgacaaaaaggaattgaaagccctaaatagtgaaattctctgtccaggtttagtaaataacccatccatgccaacacagactagttaccttatggtcaccactcctgcaacaacaacaaatacggctgatactattttacgatctcttacggacgctgtgccactgtctgttctaatattgggacttctgattatgttcatcactattgttttctgtgctgcagggatagtggttcttgttcttcaccgcaggagaagatacaaaaagaaacaagtagatgagcaaatgagagacaacagtcctgtgcatcttcagtacagcatgtatggccataaaaccactcatcacactactgaaagaccctctgcctcactctatgaacagcacatggtgagccccatggttcatgtctatagaagtccatcctttggtccaaagcatctggaagaggaagaagagaggaatgagaaagaaggaagtgatgcaaaacatctccaaagaagtcttttggaacaggaaaatcattcaccactcacagggtcaaatatgaaatacaaaaccacgaaccaatcaacagaatttttatccttccaagatgccagctcattgtacagaaacattttagaaaaagaaagggaacttcagcaactgggaatcacagaatacctaaggaaaaacattgctcagctccagcctgatatggaggcacattatcctggagcccacgaagagctgaagttaatggaaacattaatgtactcacgtccaaggaaggtattagtggaacagacaaaaaatgagtattttgaacttaaagctaatttacatgctgaacctgactatttagaagtcctggagcagcaaacatagatggagagtttgagggctttcgcagaaatgctgtgattctgttttaagtccataccttgtaaataagtgccttacgtgagtgtgtcatcaatcagaacctaagcacagcagtaaactatggggaaaaaaaaagaagaagaaaaagaaactcagggatcactgggagaagccatggcattatcttcaggcaatttagtctgtcccaaataaaataaatccttgcatgtaaatcattcaagggttatagtaatatttcatatactgaaaagtgtctcataggagtcctcttgcacatctaaaaaggctgaacatttaagtatcccgaattttcttgaattgctttccctatagattaattacaattggatttcatcatttaaaaaccatacttgtatatgtagttataatatgtaaggaatacattgtttataaccagtatgtacttcaaaaatgtgtattgtcaaacatacctaactttcttgcaataaatgcaaaagaaactggaacttgacaattataaatagtaatagtgaagaaaaaatagaaaggttgcaattatataggccatgggtggctcaaaactttgaacatttgagcttaaacaaatgccactctcatgcattctaaattaaaaagttaaaatgattaatagttcaggtggaagaaataagcatactttttgggttttctacacattttgtgtagacaattttaatgtcagtgctgctgtgaactaaagtatgtcatttatgctcaaagtttaattcttcttcttgggatattttaaaaatgctactgagattctgctgtaaatatgactagagaatatattgggtttgctttatttcataggcttaattctttgtaaatctgaatgaccataatagaaatacatttcttgtggcaagtaattcacagttgtaaagtaaataggaaaaattattttatttttattgatgtacattgatagatgccataaatcagtagcaaaaggcacttctaaaggtaagtggtttaagttgcctcaagagagggacaatgtagctttattttacaagaaggcatagttagatttctatgaaatatttattctgtacagttttatatagttttggttcacaaaagtaattattcttgggtgcctttcaagaaaattaaaaatactactcactacaataaaactaaaatgaaaactcttt

SEQ ID NO: 428641 - DNA, 3272 bp, Homo sapiens
aactgagctaacaagaaatactagaaaaggaggaaggagaacattgctgcagcttggatctacaacctaagaaagcaagagtgatcaatctcagctctgttaaacatcttgtttacttactgcattcagcagcttgcaaatggttaactatatgcaaaaaagtcagcatagctgtgaagtatgccgtgaattttaattgagggaaaaagggacaattgcttcaggatgctctagtatgcactctgcttgaaatattttcaatgaaatgctcagtattctatctttgaccagaggttttaactttatgaagctatgggacttgacaaaaagtgatatttgagaagaaagtacgcagtggttggtgttttcttttttttaataaaggaattgaattactttgaacacctcttccagctgtgcattacagataacgtcaggaagagtctctgctttacagaatcggatttcatcacatgacaacatgaagctgtggattcatctcttttattcatctctccttgcctgtatatctttacactcccaaactccagtgctctcatccagaggctcttgtgattctctttgcaattgtgaggaaaaagatggcacaatgctaataaattgtgaagcaaaaggtatcaagatggtatctgaaataagtgtgccaccatcacgacctttccaactaagcttattaaataacggcttgacgatgcttcacacaaatgacttttctgggcttaccaatgctatttcaatacaccttggatttaacaatattgcagatattgagataggtgcatttaatggccttggcctcctgaaacaacttcatatcaatcacaattctttagaaattcttaaagaggatactttccatggactggaaaacctggaattcctgcaagcagataacaattttatcacagtgattgaaccaagtgcctttagcaagctcaacagactcaaagtgttaattttaaatgacaatgctattgagagtcttcctccaaacatcttccgatttgttcctttaacccatctagatcttcgtggaaatcaattacaaacattgccttatgttggttttctcgaacacattggccgaatattggatcttcagttggaggacaacaaatgggcctgcaattgtgacttattgcagttaaaaacttggttggagaacatgcctccacagtctataattggtgatgttgtctgcaacagccctccattttttaaaggaagtatactcagtagactaaagaaggaatctatttgccctactccaccagtgtatgaagaacatgaggatccttcaggatcattacatctggcagcaacatcttcaataaatgatagtcgcatgtcaactaagaccacgtccattctaaaactacccaccaaagcaccaggtttgataccttatattacaaagccatccactcaacttccaggaccttactgccctattccttgtaactgcaaagtcctatccccatcaggacttctaatacattgtcaggagcgcaacattgaaagcttatcagatctgagacctcctccgcaaaatcctagaaagctcattctagcgggaaatattattcacagtttaatgaagttccatcctttggtccaaagcatctggaagaggaagaagagaggaatgagaaagaaggaagtgatgcaaaacatctccaaagaagtcttttggaacaggaaaatcattcaccactcacagggtcaaatatgaaatacaaaaccacgaaccaatcaacagaatttttatccttccaagatgccagctcattgtacagaaacattttagaaaaagaaagggaacttcagcaactgggaatcacagaatacctaaggaaaaacattgctcagctccagcctgatatggaggcacattatcctggagcccacgaagagctgaagttaatggaaacattaatgtactcacgtccaaggaaggtattagtggaacagacaaaaaatgagtattttgaacttaaagctaatttacatgctgaacctgactatttagaagtcctggagcagcaaacatagatggagagtttgagggctttcgcagaaatgctgtgattctgttttaagtccataccttgtaaataagtgccttacgtgagtgtgtcatcaatcagaacctaagcacagcagtaaactatggggaaaaaaaaagaagaagaaaaagaaactcagggatcactgggagaagccatggcattatcttcaggcaatttagtctgtcccaaataaaataaatccttgcatgtaaatcattcaagggttatagtaatatttcatatactgaaaagtgtctcataggagtcctcttgcacatctaaaaaggctgaacatttaagtatcccgaattttcttgaattgctttccctatagattaattacaattggatttcatcatttaaaaaccatacttgtatatgtagttataatatgtaaggaatacattgtttataaccagtatgtacttcaaaaatgtgtattgtcaaacatacctaactttcttgcaataaatgcaaaagaaactggaacttgacaattataaatagtaatagtgaagaaaaaatagaaaggttgcaattatataggccatgggtggctcaaaactttgaacatttgagcttaaacaaatgccactctcatgcattctaaattaaaaagttaaaatgattaatagttcaggtggaagaaataagcatactttttgggttttctacacattttgtgtagacaattttaatgtcagtgctgctgtgaactaaagtatgtcatttatgctcaaagtttaattcttcttcttgggatattttaaaaatgctactgagattctgctgtaaatatgactagagaatatattgggtttgctttatttcataggcttaattctttgtaaatctgaatgaccataatagaaatacatttcttgtggcaagtaattcacagttgtaaagtaaataggaaaaattattttatttttattgatgtacattgatagatgccataaatcagtagcaaaaggcacttctaaaggtaagtggtttaagttgcctcaagagagggacaatgtagctttattttacaagaaggcatagttagatttctatgaaatatttattctgtacagttttatatagttttggttcacaaaagtaattattcttgggtgcctttcaagaaaattaaaaatactactcactacaataaaactaaaatgaaaactcttt

SEQ ID NO: 428642 - DNA, 1062 bp, Homo sapiens
ccaaagtggctgagccatcatgcccagccctcccttattttcttaatcgcattttattagagctggcatgtgaatttaatttgccatttttcagtttcctttaatttacatattaaagaattgtaacagttctttaccaatgaatcaaaaccattcacttgaattaattttctccaggcagaggctcgtctgcttgaggaacaacgaagagttcaggtttaccttcatgaaagcacacaagatgaattagcaaggaaatgtgaacaagtcctcattgaaaaacacttggaaattttccacacagaatttcagaatttattggatgctgacaaaaatgaagatttgggacgcatgtataatcttgtatctagaatccaggatggcctaggagaattgaaaaaactgttggagacacacattcataatcagggtcttgcagccattgaaaagtgtggagaagctgctttaaatgaccccaaaatgtatgtacagacagtgcttgatgttcataaaaaatacaatgccctggtaatgtctgcattcaacaatgacgctggctttgtggctgctcttgataaggcttgtggtcgcttcataaacaacaacgcggttaccaagatggcccaatcatccagtaaatcccctgagttgctggctcgatactgtgactccttgttgaagaaaagttccaagaacccagaggaggcagaactagaagacacactcaatcaagtgatggttgtcttcaagtacatagaagacacaccgcaccaggagcagaagaaatgcgtataaacagctccaccgagaacagtgatgaaggacttaaagtgagagatggaaaaggaataccgtttactgcaacacttgcgtcatctagtgtgaactctgcagaggagcacgtagccagcactaatgaggggagagagcccacagactcagttccaaaagaacaaatgtcacttgttcacgtggggactgaagcctttccgataagtgatgagtctatgataaaggacagaaaagatcggctgcctctagagagtgcagtggttagaggca

SEQ ID NO: 428643 - DNA, 640 bp, Homo sapiens
ggtaagattggagaagactggttagggaataggaagataagctgttgtctaaaaaacgcagtctccagtaaaaggaagaaattgggacatttttttaaaaccccacataggtacactggaaaacatgggccacagggataaaccttccatttttacttccaaccttaccatgtgctcacaaaaaaaggtgttaaatacatgtaagttttgacgaggttatttaaaagtgtaggatataaaccaagaatttttcacaccccaaaaccccgcacaaattaagggattacatatctgagtgacaagtacatacaaacgcattacttctagagatacttagatgtagataaaagaccacatttcaatagagggatcacacagaccagtgggatgtttcttctgagataacccactttatgcaggaaacagtgtggactctggggacggcctctgctctggctgaggatttctgtcccagagcggtacaggaatctgcgtagtgttttagtttggagaaaacaggaagttacacttattctcgtgcccaattccttcaacccgggggatccacttgtttctagagcggtcggcacccgtggttgagcttccagcttttgttcccttttgtggagtgtaatttatg

SEQ ID NO: 428644 - DNA, 672 bp, Homo sapiens
aaaatctaataagtagatggcccttgaccatagacacgtcccccgggagccctagcacggatctcagtattgttacaaaccaagggagaccggggactcagtgtgaagcgacaggcactaggctgggagtgtgaggtaggcctttgattccattcagcgagcctgatgtttctccaattctgagcttctgggatttttattattttggcaaataagtctccttaaatggctcaccaagaaagtttggacctttgtgtccaagtggcttgattttatctcacttgacaaaatttgggagagcagattagggacctggattttctgtaatgtggatgtccctgttaatggccgagtaggaaactaggccatgatcggactctacccagtgctgggtagaggacattttcacggagagctcacagaaatcaacattctcccctctgtctagggaagcagggcacttcttaaaggttgaaaaatagaaagcagccttcactgcctaccttttaatataatagtgatcggtttcctcatttttcttgatagtaagaaattaagggttaacatcaatgtgccaatgaaaaccgaacagaagcaggaacaagaaaccacacacaaaaacatcgaggaagaccgcaaactactgattcaggtgacttatctgtatgcctg

SEQ ID NO: 428645 - DNA, 771 bp, Homo sapiens
ggcggcggcggcgggaggaggagggccgggcgggcaggggaggaggaggaggcgggcgccgtgtcgcacgcagctccaggcggggcagccccggtagctgagggacgcagctagaccttggcgggacggggctttcgccggggcccaggcccagggaccaggcggaggcgtcgcgggagcctttggggcaccacagagatgcgggtgagtgtcggcagccgccggggccgagaggaggtggcggcggcggcggcggcgcaggcccggccccgagccgcggtgtcgcagtgactcgggccgcgacggccgaaaccaggcgcctggcgaggcctgagccgccgaaacgcggccgggcagaatggcggccgggccgggggactcgtgggcggaggacgccgaaggtggcagaggagcgagcggggccgggccctgagtcaccccggacgggccggggcggccaggcctggactacgcactgggaaaaagcacgattcatcgcgcctggaggcggcggcctggtggcgccggcccctttccccgccgcgaccgggctgggttctcggagggtgggccgacgtgtggcccggggcggctcgggcgtccgcgcctcgcctggtgaggcgacctccgcgggacgccgggacccgtgcccttgccccctcgcgcccacgcttcttcccggcgctgctttccggccgacgcgtgttcccctgtgagctctgggctcaagcgcaggagcagccgcggagccgggctctctcgctttccggt

SEQ ID NO: 428646 - DNA, 3230 bp, Homo sapiens
ggcggcggcggcgggaggaggagggccgggcgggcaggggaggaggaggaggcgggcgccgtgtcgcacgcagctccaggcggggcagccccggtagctgagggacgcagctagaccttggcgggacggggctttcgccggggcccaggcccagggaccaggcggaggcgtcgcgggagcctttggggcaccacagagatgcgggtttgcctgcaatgagatttcattctctacatttaaaggacatcctttctgagctgctgtgaataaatttggaatggtactgtatattttcatctaatggagaactagctgtactttgaataaggattgctgcactggacgactttagaacatccctcacaatgtcgtcaacccggagccagaacccccacggcctgaagcagattggcctggaccagatctgggacgacctcagagccggcatccagcaggtgtacacacggcagagcatggccaagtccagatatatggagctctacactcatgtttataactactgtactagtgttcaccagtcaaaccaagcacgaggagctggagttcctccttctaagtcgaaaaaggggcagacacctggaggagctcagtttgttggcctggaattatataaacgacttaaggaatttttgaagaattacttgacaaatcttcttaaggatggagaagatttgatggatgagagtgtactgaaattctacactcaacaatgggaagattatcgattttcaagcaaagtgctgaatggaatttgtgcctacctcaatagacattgggttcgccgtgaatgtgacgaaggacgaaaaggaatatatgaaatctattcgcttgcattggtgacttggagagactgtctgttcaggccactgaataaacaggtaacaaatgctgttttaaagctgattgaaaaggaaaggaatggtgaaaccatcaatacaagattgattagtggagttgtacagtcttacgtggaattggggctgaatgaagatgatgcatttgcaaagggccctacgttaacagtgtataaagaatcctttgaatctcaatttttggctgacacagagagattttataccagagagagtactgaattcttgcagcagaacccagttactgaatatatgaaaaaggcagaggctcgtctgcttgaggaacaacgaagagttcaggtttaccttcatgaaagcacacaagatgaattagcaaggaaatgtgaacaagtcctcattgaaaaacacttggaaattttccacacagaatttcagaatttattggatgctgacaaaaatgaagatttgggacgcatgtataatcttgtatctagaatccaggatggcctaggagaattgaaaaaactgttggagacacacattcataatcagggtcttgcagccattgaaaagtgtggagaagctgctttaaatgaccccaaaatgtatgtacagacagtgcttgatgttcataaaaaatacaatgccctggtaatgtctgcattcaacaatgacgctggctttgtggctgctcttgataaggcttgtggtcgcttcataaacaacaacgcggttaccaagatggcccaatcatccagtaaatcccctgagttgctggctcgatactgtgactccttgttgaagaaaagttccaagaacccagaggaggcagaactagaagacacactcaatcaagtgatggttgtcttcaagtacatagaagacaaagacgtatttcagaagttctatgcgaagatgctcgccaagaggctcgtccaccagaacagtgcaagtgacgatgccgaagccagcatgatctccaagttaaagcaagcttgcgggttcgagtacacctctaaacttcagcgcatgtttcaagacattggcgtgagcaaagatctgaacgagcaattcaaaaagcacttgacaaactcagaacccctagacttggatttcagcattcaagtgctgagctccgggtcctggcccttccagcagtcttgtacatttgccttgccgtcagagttggaacgtagttatcagcgattcacagctttctacgccagccgccacagtggccgaaaattgacgtggttatatcagttgtctaaaggagaattggtaactaactgcttcaaaaacagatatactttgcaggcgtcgacattccagatggctatcctgcttcagtacaacacggaagatgcctacactgtgcagcagctgaccgacagcactcaaattaaaatggacattttggcgcaagttttacagattttattaaagtcgaagctattggtcttggaagatgaaaatgcaaatgttgatgaggtggaattgaagccagataccttaataaaattatatcttggttataaaaataagaaattaagggttaacatcaatgtgccaatgaaaaccgaacagaagcaggaacaagaaaccacacacaaaaacatcgaggaagaccgcaaactactgattcaggcggccatcgtgagaatcatgaagatgaggaaggttctgaaacaccagcagttacttggcgaggtcctcactcagctgtcctccaggttcaaacctcgagtccctgtgatcaagaaatgcattgacattctaattgagaaagaatatttggagcgagtggatggtgaaaaggacacctacagttacttggcttaacccttctggaagggtctgactgtgtgacccgcagcaaatagttcatgttggaaagaatgaaaacaactcaagttcatagcagccagcctgccgccattggacctcccttttaaaaactgagaccaagactcccatcagctggtctcggatttacatcggaactgctcaggattgatacatttcaagtctgtaaatacggacaccaacgccatttaccctaatttaagaacagcggggactgaccctccgtgccgagggctgcatgctaccgcactaagtcaatacatgggctccccgattcgcagctgtcgtcttggcagcacttgtcacgttggcagcactttgagagcaagtctgagtggacccacatgtaacctgctatgaaaaccatttgtatagtgtgtttcattttttaatgtgtgaaaataaagaaaattaaaggatttctgtacaagtcgcattgggttttgttttaagttttactaatttctatatgtaaataaaagatataatgattgtgcaaatttaaaaaaa

SEQ ID NO: 428647 - DNA, 4580 bp, Homo sapiens
ggtaagattggagaagactggttagggaataggaagataagctgttgtctaaaaaacgcagtctccagtaaaaggaagaaattgggacatttttttaaaaccccacataggtacactggaaaacatgggccacagggataaaccttccatttttacttccaaccttaccatgtgctcacaaaaaaaggtgttaaatacatgtaagttttgacgaggttatttaaaagtgtaggatataaaccaagaatttttcacaccccaaaaccccgcacaaattaagggattacatatctgagtgacaagtacatacaaacgcattacttctagagatacttagatgtagataaaagaccacatttcaatagagggatcacacagaccagtgggatgtttcttctgagataacccactttatgcaggaaacagtgtggactctggggacggcctctgctctggctgaggatttctgtcccagagcggtacaggaatctgcgtagtgttttagtttggagaaaacaggaagttacactcatcacatcttttgcccagatgatagaattcgaaatccccccggggttgttcatggaatgagccgctctgttatgttgtgagccgtggtattaatcagccacccctcactaggtgttggggttccaccacgcttcctccaccccccgtcaccacagcagcgggtagtatttaggttgaatattccaaatagtcaattatgacagttaatttcaaatgagatgacttcgaagtacacgtgaaaacaatactattttatatcacgactcatgccatccgtatgtgtaatcaaagccttctaagtcttgatatgtccttacaaagacgaaggatagagtgaatgtcaaaatttgccaaacaggagttactgaaagtctgaaggggaaagcctagttaggttttatcttagaagtgatttttaaaacgaaacacgcagataagctcgagctttctggagccgattcctaaggccttgcaggtggtaagggggtcgagaattggctgaggttcctcggaagtccgcgccgattcggagggccacctctgactttctgatctggggtgcaacccccagtccctgtcccggtcgacaaaggtgtggagtcaggttccaggcaagctgggggtgggggtgcgcacaagggaggggcaggggactgggaccccctcttcttcggggtgcttcgggccgtttctccagaggctggtggtgtccccgacccaagcagctcagccccgctcgcgaggtccgaagtggcgggaacgggtcctccgcggcggtcccaaggcgagggaggctgtaaaacctggcagagaatccggcgcgccgggtcggggatgtctcgggtgccgggggcaggggccgcaggctcgcaggtagaagcttccccacgcgagcgggggcctcggccgcggcaggggcgcccccggggccgccggcagcggcgagcgggcgggagggagctttccgggcccctcccgcgcctcgggctggcggggcgatggcgacgacggtttcccggctcccccgccccggacgccgatggcggtgcgttccggccctcccccaacagcttctcccccgcggtcgccggagccggtttgcctgcaatgagatttcattctctacatttaaaggacatcctttctgagctgctgtgaataaatttggaatggtactgtatattttcatctaatggagaactagctgtactttgaataaggattgctgcactggacgactttagaacatccctcacaatgtcgtcaacccggagccagaacccccacggcctgaagcagattggcctggaccagatctgggacgacctcagagccggcatccagcaggtgtacacacggcagagcatggccaagtccagatatatggagctctacactcatgtttataactactgtactagtgttcaccatttgttggcctggaattatataaacgacttaaggaatttttgaagaattacttgacaaatcttcttaaggatggagaagatttgatggatgagagtgtactgaaattctacactcaacaatgggaagattatcgattttcaagcaaagtgctgaatggaatttgtgcctacctcaatagacattgggttcgccgtgaatgtgacgaaggacgaaaaggaatatatgaaatctattcgcttgcattggtgacttggagagactgtctgttcaggccactgaataaacaggtaacaaatgctgttttaaagctgattgaaaaggaaaggaatggtgaaaccatcaatacaagattgattagtggagttgtacagtcttacgtggaattggggctgaatgaagatgatgcatttgcaaagggccctacgttaacagtgtataaagaatcctttgaatctcaatttttggctgacacagagagattttataccagagagagtactgaattcttgcagcagaacccagttactgaatatatgaaaaaggcagaggctcgtctgcttgaggaacaacgaagagttcaggtttaccttcatgaaagcacacaagatgaattagcaaggaaatgtgaacaagtcctcattgaaaaacacttggaaattttccacacagaatttcagaatttattggatgctgacaaaaatgaagatttgggacgcatgtataatcttgtatctagaatccaggatggcctaggagaattgaaaaaactgttggagacacacattcataatcagggtcttgcagccattgaaaagtgtggagaagctgctttaaatgaccccaaaatgtatgtacagacagtgcttgatgttcataaaaaatacaatgccctggtaatgtctgcattcaacaatgacgctggctttgtggctgctcttgataaggcttgtggtcgcttcataaacaacaacgcggttaccaagatggcccaatcatccagtaaatcccctgagttgctggctcgatactgtgactccttgttgaagaaaagttccaagaacccagaggaggcagaactagaagacacactcaatcaagtgatggttgtcttcaagtacatagaagacaaagacgtatttcagaagttctatgcgaagatgctcgccaagaggctcgtccaccagaacagtgcaagtgacgatgccgaagccagcatgatctccaagttaaagcaagcttgcgggttcgagtacacctctaaacttcagcgcatgtttcaagacattggcgtgagcaaagatctgaacgagcaattcaaaaagcacttgacaaactcagaacccctagacttggatttcagcattcaagtgctgagctccgggtcctggcccttccagcagtcttgtacatttgccttgccgtcagagttggaacgtagttatcagcgattcacagctttctacgccagccgccacagtggccgaaaattgacgtggttatatcagttgtctaaaggagaattggtaactaactgcttcaaaaacagatatactttgcaggcgtcgacattccagatggctatcctgcttcagtacaacacggaagatgcctacactgtgcagcagctgaccgacagcactcaaattaaaatggacattttggcgcaagttttacagattttattaaagtcgaagctattggtcttggaagatgaaaatgcaaatgttgatgaggtggaattgaagccagataccttaataaaattatatcttggttataaaaataagaaattaagggttaacatcaatgtgccaatgaaaaccgaacagaagcaggaacaagaaaccacacacaaaaacatcgaggaagaccgcaaactactgattcaggcggccatcgtgagaatcatgaagatgaggaaggttctgaaacaccagcagttacttggcgaggtcctcactcagctgtcctccaggttcaaacctcgagtccctgtgatcaagaaatgcattgacattctaattgagaaagaatatttggagcgagtggatggtgaaaaggacacctacagttacttggcttaacccttctggaagggtctgactgtgtgacccgcagcaaatagttcatgttggaaagaatgaaaacaactcaagttcatagcagccagcctgccgccattggacctcccttttaaaaactgagaccaagactcccatcagctggtctcggatttacatcggaactgctcaggattgatacatttcaagtctgtaaatacggacaccaacgccatttaccctaatttaagaacagcggggactgaccctccgtgccgagggctgcatgctaccgcactaagtcaatacatgggctccccgattcgcagctgtcgtcttggcagcacttgtcacgttggcagcactttgagagcaagtctgagtggacccacatgtaacctgctatgaaaaccatttgtatagtgtgtttcattttttaatgtgtgaaaataaagaaaattaaaggatttctgtacaagtcgcattgggttttgttttaagttttactaatttctatatgtaaataaaagatataatgattgtgcaaatttaaaaaaa

SEQ ID NO: 428648 - DNA, 4076 bp, Homo sapiens
ggtaagattggagaagactggttagggaataggaagataagctgttgtctaaaaaacgcagtctccagtaaaaggaagaaattgggacatttttttaaaaccccacataggtacactggaaaacatgggccacagggataaaccttccatttttacttccaaccttaccatgtgctcacaaaaaaaggtgttaaatacatgtaagttttgacgaggttatttaaaagtgtaggatataaaccaagaatttttcacaccccaaaaccccgcacaaattaagggattacatatctgagtgacaagtacatacaaacgcattacttctagagatacttagatgtagataaaagaccacatttcaatagagggatcacacagaccagtgggatgtttcttctgagataacccactttatgcaggaaacagtgtggactctggggacggcctctgctctggctgaggatttctgtcccagagcggtacaggaatctgcgtagtgttttagtttggagaaaacaggaagttacactcatcacatcttttgcccagatgatagaattcgaaatccccccggggttgttcatggaatgagccgctctgttatgttgtgagccgtggtattaatcagccacccctcactaggtgttggggttccaccacgcttcctccaccccccgtcaccacagcagcgggtagtatttaggttgaatattccaaatagtcaattatgacagttaatttcaaatgagatgacttcgaagtacacgtgaaaacaatactattttatatcacgactcatgccatccgtatgtgtaatcaaagccttctaagtcttgatatgtccttacaaagacgaaggatagagtgaatgtcaaaatttgccaaacaggagttactgaaagtctgaaggggaaagcctagttaggttttatcttagaagtgatttttaaaacgaaacacgcagataagctcgagctttctggagccgattcctaaggccttgcaggtggtaagggggtcgagaattggctgaggttcctcggaagtccgcgccgattcggagggccacctctgactttctgatctggggtgcaacccccagtccctgtcccggtcgacaaaggtttgcctgcaatgagatttcattctctacatttaaaggacatcctttctgagctgctgtgaataaatttggaatggtactgtatattttcatctaatggagaactagctgtactttgaataaggattgctgcactggacgactttagaacatccctcacaatgtcgtcaacccggagccagaacccccacggcctgaagcagattggcctggaccagatctgggacgacctcagagccggcatccagcaggtgtacacacggcagagcatggccaagtccagatatatggagctctacactcatgtttataactactgtactagtgttcaccatttgttggcctggaattatataaacgacttaaggaatttttgaagaattacttgacaaatcttcttaaggatggagaagatttgatggatgagagtgtactgaaattctacactcaacaatgggaagattatcgattttcaagcaaagtgctgaatggaatttgtgcctacctcaatagacattgggttcgccgtgaatgtgacgaaggacgaaaaggaatatatgaaatctattcgcttgcattggtgacttggagagactgtctgttcaggccactgaataaacaggtaacaaatgctgttttaaagctgattgaaaaggaaaggaatggtgaaaccatcaatacaagattgattagtggagttgtacagtcttacgtggaattggggctgaatgaagatgatgcatttgcaaagggccctacgttaacagtgtataaagaatcctttgaatctcaatttttggctgacacagagagattttataccagagagagtactgaattcttgcagcagaacccagttactgaatatatgaaaaaggcagaggctcgtctgcttgaggaacaacgaagagttcaggtttaccttcatgaaagcacacaagatgaattagcaaggaaatgtgaacaagtcctcattgaaaaacacttggaaattttccacacagaatttcagaatttattggatgctgacaaaaatgaagatttgggacgcatgtataatcttgtatctagaatccaggatggcctaggagaattgaaaaaactgttggagacacacattcataatcagggtcttgcagccattgaaaagtgtggagaagctgctttaaatgaccccaaaatgtatgtacagacagtgcttgatgttcataaaaaatacaatgccctggtaatgtctgcattcaacaatgacgctggctttgtggctgctcttgataaggcttgtggtcgcttcataaacaacaacgcggttaccaagatggcccaatcatccagtaaatcccctgagttgctggctcgatactgtgactccttgttgaagaaaagttccaagaacccagaggaggcagaactagaagacacactcaatcaagtgatggttgtcttcaagtacatagaagacaaagacgtatttcagaagttctatgcgaagatgctcgccaagaggctcgtccaccagaacagtgcaagtgacgatgccgaagccagcatgatctccaagttaaagcaagcttgcgggttcgagtacacctctaaacttcagcgcatgtttcaagacattggcgtgagcaaagatctgaacgagcaattcaaaaagcacttgacaaactcagaacccctagacttggatttcagcattcaagtgctgagctccgggtcctggcccttccagcagtcttgtacatttgccttgccgtcagagttggaacgtagttatcagcgattcacagctttctacgccagccgccacagtggccgaaaattgacgtggttatatcagttgtctaaaggagaattggtaactaactgcttcaaaaacagatatactttgcaggcgtcgacattccagatggctatcctgcttcagtacaacacggaagatgcctacactgtgcagcagctgaccgacagcactcaaattaaaatggacattttggcgcaagttttacagattttattaaagtcgaagctattggtcttggaagatgaaaatgcaaatgttgatgaggtggaattgaagccagataccttaataaaattatatcttggttataaaaataagaaattaagggttaacatcaatgtgccaatgaaaaccgaacagaagcaggaacaagaaaccacacacaaaaacatcgaggaagaccgcaaactactgattcaggcggccatcgtgagaatcatgaagatgaggaaggttctgaaacaccagcagttacttggcgaggtcctcactcagctgtcctccaggttcaaacctcgagtccctgtgatcaagaaatgcattgacattctaattgagaaagaatatttggagcgagtggatggtgaaaaggacacctacagttacttggcttaacccttctggaagggtctgactgtgtgacccgcagcaaatagttcatgttggaaagaatgaaaacaactcaagttcatagcagccagcctgccgccattggacctcccttttaaaaactgagaccaagactcccatcagctggtctcggatttacatcggaactgctcaggattgatacatttcaagtctgtaaatacggacaccaacgccatttaccctaatttaagaacagcggggactgaccctccgtgccgagggctgcatgctaccgcactaagtcaatacatgggctccccgattcgcagctgtcgtcttggcagcacttgtcacgttggcagcactttgagagcaagtctgagtggacccacatgtaacctgctatgaaaaccatttgtatagtgtgtttcattttttaatgtgtgaaaataaagaaaattaaaggatttctgtacaagtcgcattgggttttgttttaagttttactaatttctatatgtaaataaaagatataatgattgtgcaaatttaaaaaaa

SEQ ID NO: 428649 - DNA, 3406 bp, Homo sapiens
tgccccgttctcctgggagagcgggccggggcatgcgcgcagggatgctagcccggcggccgaaccggacagagccccccggcgcccgcctatcgctcgctagtcgggccgggccctgcgctgcggcctcggcgcgcccccggtcccaacgggagcgcgcgccctgaccctgagggtagccgtgcgcccgccaggccgctgggacttggggtccccagactcgggggtcgtcgcttttttttcccttaagatctgaaagacccccgtttctgccacccgtgcagtattgtgtagcgcagacataagataagaaagagaggaatgcttgtagacattccttgaaatgaatccccaaagttagggttttctccctggctggctttgccaaaaagaggattctcttttccgattgggtcactcttggttgcttctggttcgtagtaggggttagtggtttgcctgcaatgagatttcattctctacatttaaaggacatcctttctgagctgctgtgaataaatttggaatggtactgtatattttcatctaatggagaactagctgtactttgaataaggattgctgcactggacgactttagaacatccctcacaatgtcgtcaacccggagccagaacccccacggcctgaagcagattggcctggaccagatctgggacgacctcagagccggcatccagcaggtgtacacacggcagagcatggccaagtccagatatatggagctctacactcatgtttataactactgtactagtgttcaccatttgttggcctggaattatataaacgacttaaggaatttttgaagaattacttgacaaatcttcttaaggatggagaagatttgatggatgagagtgtactgaaattctacactcaacaatgggaagattatcgattttcaagcaaagtgctgaatggaatttgtgcctacctcaatagacattgggttcgccgtgaatgtgacgaaggacgaaaaggaatatatgaaatctattcgcttgcattggtgacttggagagactgtctgttcaggccactgaataaacaggtaacaaatgctgttttaaagctgattgaaaaggaaaggaatggtgaaaccatcaatacaagattgattagtggagttgtacagtcttacgtggaattggggctgaatgaagatgatgcatttgcaaagggccctacgttaacagtgtataaagaatcctttgaatctcaatttttggctgacacagagagattttataccagagagagtactgaattcttgcagcagaacccagttactgaatatatgaaaaaggcagaggctcgtctgcttgaggaacaacgaagagttcaggtttaccttcatgaaagcacacaagatgaattagcaaggaaatgtgaacaagtcctcattgaaaaacacttggaaattttccacacagaatttcagaatttattggatgctgacaaaaatgaagatttgggacgcatgtataatcttgtatctagaatccaggatggcctaggagaattgaaaaaactgttggagacacacattcataatcagggtcttgcagccattgaaaagtgtggagaagctgctttaaatgaccccaaaatgtatgtacagacagtgcttgatgttcataaaaaatacaatgccctggtaatgtctgcattcaacaatgacgctggctttgtggctgctcttgataaggcttgtggtcgcttcataaacaacaacgcggttaccaagatggcccaatcatccagtaaatcccctgagttgctggctcgatactgtgactccttgttgaagaaaagttccaagaacccagaggaggcagaactagaagacacactcaatcaagtgatggttgtcttcaagtacatagaagacaaagacgtatttcagaagttctatgcgaagatgctcgccaagaggctcgtccaccagaacagtgcaagtgacgatgccgaagccagcatgatctccaagttaaagcaagcttgcgggttcgagtacacctctaaacttcagcgcatgtttcaagacattggcgtgagcaaagatctgaacgagcaattcaaaaagcacttgacaaactcagaacccctagacttggatttcagcattcaagtgctgagctccgggtcctggcccttccagcagtcttgtacatttgccttgccgtcagagttggaacgtagttatcagcgattcacagctttctacgccagccgccacagtggccgaaaattgacgtggttatatcagttgtctaaaggagaattggtaactaactgcttcaaaaacagatatactttgcaggcgtcgacattccagatggctatcctgcttcagtacaacacggaagatgcctacactgtgcagcagctgaccgacagcactcaaattaaaatggacattttggcgcaagttttacagattttattaaagtcgaagctattggtcttggaagatgaaaatgcaaatgttgatgaggtggaattgaagccagataccttaataaaattatatcttggttataaaaataagaaattaagggttaacatcaatgtgccaatgaaaaccgaacagaagcaggaacaagaaaccacacacaaaaacatcgaggaagaccgcaaactactgattcaggcggccatcgtgagaatcatgaagatgaggaaggttctgaaacaccagcagttacttggcgaggtcctcactcagctgtcctccaggttcaaacctcgagtccctgtgatcaagaaatgcattgacattctaattgagaaagaatatttggagcgagtggatggtgaaaaggacacctacagttacttggcttaacccttctggaagggtctgactgtgtgacccgcagcaaatagttcatgttggaaagaatgaaaacaactcaagttcatagcagccagcctgccgccattggacctcccttttaaaaactgagaccaagactcccatcagctggtctcggatttacatcggaactgctcaggattgatacatttcaagtctgtaaatacggacaccaacgccatttaccctaatttaagaacagcggggactgaccctccgtgccgagggctgcatgctaccgcactaagtcaatacatgggctccccgattcgcagctgtcgtcttggcagcacttgtcacgttggcagcactttgagagcaagtctgagtggacccacatgtaacctgctatgaaaaccatttgtatagtgtgtttcattttttaatgtgtgaaaataaagaaaattaaaggatttctgtacaagtcgcattgggttttgttttaagttttactaatttctatatgtaaataaaagatataatgattgtgcaaatttaaaaaaa

SEQ ID NO: 428650 - DNA, 4653 bp, Homo sapiens
ggtaagattggagaagactggttagggaataggaagataagctgttgtctaaaaaacgcagtctccagtaaaaggaagaaattgggacatttttttaaaaccccacataggtacactggaaaacatgggccacagggataaaccttccatttttacttccaaccttaccatgtgctcacaaaaaaaggtgttaaatacatgtaagttttgacgaggttatttaaaagtgtaggatataaaccaagaatttttcacaccccaaaaccccgcacaaattaagggattacatatctgagtgacaagtacatacaaacgcattacttctagagatacttagatgtagataaaagaccacatttcaatagagggatcacacagaccagtgggatgtttcttctgagataacccactttatgcaggaaacagtgtggactctggggacggcctctgctctggctgaggatttctgtcccagagcggtacaggaatctgcgtagtgttttagtttggagaaaacaggaagttacactcatcacatcttttgcccagatgatagaattcgaaatccccccggggttgttcatggaatgagccgctctgttatgttgtgagccgtggtattaatcagccacccctcactaggtgttggggttccaccacgcttcctccaccccccgtcaccacagcagcgggtagtatttaggttgaatattccaaatagtcaattatgacagttaatttcaaatgagatgacttcgaagtacacgtgaaaacaatactattttatatcacgactcatgccatccgtatgtgtaatcaaagccttctaagtcttgatatgtccttacaaagacgaaggatagagtgaatgtcaaaatttgccaaacaggagttactgaaagtctgaaggggaaagcctagttaggttttatcttagaagtgatttttaaaacgaaacacgcagataagctcgagctttctggagccgattcctaaggccttgcaggtggtaagggggtcgagaattggctgaggttcctcggaagtccgcgccgattcggagggccacctctgactttctgatctggggtgcaacccccagtccctgtcccggtcgacaaaggtgtggagtcaggttccaggcaagctgggggtgggggtgcgcacaagggaggggcaggggactgggaccccctcttcttcggggtgcttcgggccgtttctccagaggctggtggtgtccccgacccaagcagctcagccccgctcgcgaggtccgaagtggcgggaacgggtcctccgcggcggtcccaaggcgagggaggctgtaaaacctggcagagaatccggcgcgccgggtcggggatgtctcgggtgccgggggcaggggccgcaggctcgcaggtagaagcttccccacgcgagcgggggcctcggccgcggcaggggcgcccccggggccgccggcagcggcgagcgggcgggagggagctttccgggcccctcccgcgcctcgggctggcggggcgatggcgacgacggtttcccggctcccccgccccggacgccgatggcggtgcgttccggccctcccccaacagcttctcccccgcggtcgccggagccggtttgcctgcaatgagatttcattctctacatttaaaggacatcctttctgagctgctgtgaataaatttggaatggtactgtatattttcatctaatggagaactagctgtactttgaataaggattgctgcactggacgactttagaacatccctcacaatgtcgtcaacccggagccagaacccccacggcctgaagcagattggcctggaccagatctgggacgacctcagagccggcatccagcaggtgtacacacggcagagcatggccaagtccagatatatggagctctacactcatgtttataactactgtactagtgttcaccagtcaaaccaagcacgaggagctggagttcctccttctaagtcgaaaaaggggcagacacctggaggagctcagtttgttggcctggaattatataaacgacttaaggaatttttgaagaattacttgacaaatcttcttaaggatggagaagatttgatggatgagagtgtactgaaattctacactcaacaatgggaagattatcgattttcaagcaaagtgctgaatggaatttgtgcctacctcaatagacattgggttcgccgtgaatgtgacgaaggacgaaaaggaatatatgaaatctattcgcttgcattggtgacttggagagactgtctgttcaggccactgaataaacaggtaacaaatgctgttttaaagctgattgaaaaggaaaggaatggtgaaaccatcaatacaagattgattagtggagttgtacagtcttacgtggaattggggctgaatgaagatgatgcatttgcaaagggccctacgttaacagtgtataaagaatcctttgaatctcaatttttggctgacacagagagattttataccagagagagtactgaattcttgcagcagaacccagttactgaatatatgaaaaaggcagaggctcgtctgcttgaggaacaacgaagagttcaggtttaccttcatgaaagcacacaagatgaattagcaaggaaatgtgaacaagtcctcattgaaaaacacttggaaattttccacacagaatttcagaatttattggatgctgacaaaaatgaagatttgggacgcatgtataatcttgtatctagaatccaggatggcctaggagaattgaaaaaactgttggagacacacattcataatcagggtcttgcagccattgaaaagtgtggagaagctgctttaaatgaccccaaaatgtatgtacagacagtgcttgatgttcataaaaaatacaatgccctggtaatgtctgcattcaacaatgacgctggctttgtggctgctcttgataaggcttgtggtcgcttcataaacaacaacgcggttaccaagatggcccaatcatccagtaaatcccctgagttgctggctcgatactgtgactccttgttgaagaaaagttccaagaacccagaggaggcagaactagaagacacactcaatcaagtgatggttgtcttcaagtacatagaagacaaagacgtatttcagaagttctatgcgaagatgctcgccaagaggctcgtccaccagaacagtgcaagtgacgatgccgaagccagcatgatctccaagttaaagcaagcttgcgggttcgagtacacctctaaacttcagcgcatgtttcaagacattggcgtgagcaaagatctgaacgagcaattcaaaaagcacttgacaaactcagaacccctagacttggatttcagcattcaagtgctgagctccgggtcctggcccttccagcagtcttgtacatttgccttgccgtcagagttggaacgtagttatcagcgattcacagctttctacgccagccgccacagtggccgaaaattgacgtggttatatcagttgtctaaaggagaattggtaactaactgcttcaaaaacagatatactttgcaggcgtcgacattccagatggctatcctgcttcagtacaacacggaagatgcctacactgtgcagcagctgaccgacagcactcaaattaaaatggacattttggcgcaagttttacagattttattaaagtcgaagctattggtcttggaagatgaaaatgcaaatgttgatgaggtggaattgaagccagataccttaataaaattatatcttggttataaaaataagaaattaagggttaacatcaatgtgccaatgaaaaccgaacagaagcaggaacaagaaaccacacacaaaaacatcgaggaagaccgcaaactactgattcaggcggccatcgtgagaatcatgaagatgaggaaggttctgaaacaccagcagttacttggcgaggtcctcactcagctgtcctccaggttcaaacctcgagtccctgtgatcaagaaatgcattgacattctaattgagaaagaatatttggagcgagtggatggtgaaaaggacacctacagttacttggcttaacccttctggaagggtctgactgtgtgacccgcagcaaatagttcatgttggaaagaatgaaaacaactcaagttcatagcagccagcctgccgccattggacctcccttttaaaaactgagaccaagactcccatcagctggtctcggatttacatcggaactgctcaggattgatacatttcaagtctgtaaatacggacaccaacgccatttaccctaatttaagaacagcggggactgaccctccgtgccgagggctgcatgctaccgcactaagtcaatacatgggctccccgattcgcagctgtcgtcttggcagcacttgtcacgttggcagcactttgagagcaagtctgagtggacccacatgtaacctgctatgaaaaccatttgtatagtgtgtttcattttttaatgtgtgaaaataaagaaaattaaaggatttctgtacaagtcgcattgggttttgttttaagttttactaatttctatatgtaaataaaagatataatgattgtgcaaatttaaaaaaa

SEQ ID NO: 428651 - DNA, 4149 bp, Homo sapiens
ggtaagattggagaagactggttagggaataggaagataagctgttgtctaaaaaacgcagtctccagtaaaaggaagaaattgggacatttttttaaaaccccacataggtacactggaaaacatgggccacagggataaaccttccatttttacttccaaccttaccatgtgctcacaaaaaaaggtgttaaatacatgtaagttttgacgaggttatttaaaagtgtaggatataaaccaagaatttttcacaccccaaaaccccgcacaaattaagggattacatatctgagtgacaagtacatacaaacgcattacttctagagatacttagatgtagataaaagaccacatttcaatagagggatcacacagaccagtgggatgtttcttctgagataacccactttatgcaggaaacagtgtggactctggggacggcctctgctctggctgaggatttctgtcccagagcggtacaggaatctgcgtagtgttttagtttggagaaaacaggaagttacactcatcacatcttttgcccagatgatagaattcgaaatccccccggggttgttcatggaatgagccgctctgttatgttgtgagccgtggtattaatcagccacccctcactaggtgttggggttccaccacgcttcctccaccccccgtcaccacagcagcgggtagtatttaggttgaatattccaaatagtcaattatgacagttaatttcaaatgagatgacttcgaagtacacgtgaaaacaatactattttatatcacgactcatgccatccgtatgtgtaatcaaagccttctaagtcttgatatgtccttacaaagacgaaggatagagtgaatgtcaaaatttgccaaacaggagttactgaaagtctgaaggggaaagcctagttaggttttatcttagaagtgatttttaaaacgaaacacgcagataagctcgagctttctggagccgattcctaaggccttgcaggtggtaagggggtcgagaattggctgaggttcctcggaagtccgcgccgattcggagggccacctctgactttctgatctggggtgcaacccccagtccctgtcccggtcgacaaaggtttgcctgcaatgagatttcattctctacatttaaaggacatcctttctgagctgctgtgaataaatttggaatggtactgtatattttcatctaatggagaactagctgtactttgaataaggattgctgcactggacgactttagaacatccctcacaatgtcgtcaacccggagccagaacccccacggcctgaagcagattggcctggaccagatctgggacgacctcagagccggcatccagcaggtgtacacacggcagagcatggccaagtccagatatatggagctctacactcatgtttataactactgtactagtgttcaccagtcaaaccaagcacgaggagctggagttcctccttctaagtcgaaaaaggggcagacacctggaggagctcagtttgttggcctggaattatataaacgacttaaggaatttttgaagaattacttgacaaatcttcttaaggatggagaagatttgatggatgagagtgtactgaaattctacactcaacaatgggaagattatcgattttcaagcaaagtgctgaatggaatttgtgcctacctcaatagacattgggttcgccgtgaatgtgacgaaggacgaaaaggaatatatgaaatctattcgcttgcattggtgacttggagagactgtctgttcaggccactgaataaacaggtaacaaatgctgttttaaagctgattgaaaaggaaaggaatggtgaaaccatcaatacaagattgattagtggagttgtacagtcttacgtggaattggggctgaatgaagatgatgcatttgcaaagggccctacgttaacagtgtataaagaatcctttgaatctcaatttttggctgacacagagagattttataccagagagagtactgaattcttgcagcagaacccagttactgaatatatgaaaaaggcagaggctcgtctgcttgaggaacaacgaagagttcaggtttaccttcatgaaagcacacaagatgaattagcaaggaaatgtgaacaagtcctcattgaaaaacacttggaaattttccacacagaatttcagaatttattggatgctgacaaaaatgaagatttgggacgcatgtataatcttgtatctagaatccaggatggcctaggagaattgaaaaaactgttggagacacacattcataatcagggtcttgcagccattgaaaagtgtggagaagctgctttaaatgaccccaaaatgtatgtacagacagtgcttgatgttcataaaaaatacaatgccctggtaatgtctgcattcaacaatgacgctggctttgtggctgctcttgataaggcttgtggtcgcttcataaacaacaacgcggttaccaagatggcccaatcatccagtaaatcccctgagttgctggctcgatactgtgactccttgttgaagaaaagttccaagaacccagaggaggcagaactagaagacacactcaatcaagtgatggttgtcttcaagtacatagaagacaaagacgtatttcagaagttctatgcgaagatgctcgccaagaggctcgtccaccagaacagtgcaagtgacgatgccgaagccagcatgatctccaagttaaagcaagcttgcgggttcgagtacacctctaaacttcagcgcatgtttcaagacattggcgtgagcaaagatctgaacgagcaattcaaaaagcacttgacaaactcagaacccctagacttggatttcagcattcaagtgctgagctccgggtcctggcccttccagcagtcttgtacatttgccttgccgtcagagttggaacgtagttatcagcgattcacagctttctacgccagccgccacagtggccgaaaattgacgtggttatatcagttgtctaaaggagaattggtaactaactgcttcaaaaacagatatactttgcaggcgtcgacattccagatggctatcctgcttcagtacaacacggaagatgcctacactgtgcagcagctgaccgacagcactcaaattaaaatggacattttggcgcaagttttacagattttattaaagtcgaagctattggtcttggaagatgaaaatgcaaatgttgatgaggtggaattgaagccagataccttaataaaattatatcttggttataaaaataagaaattaagggttaacatcaatgtgccaatgaaaaccgaacagaagcaggaacaagaaaccacacacaaaaacatcgaggaagaccgcaaactactgattcaggcggccatcgtgagaatcatgaagatgaggaaggttctgaaacaccagcagttacttggcgaggtcctcactcagctgtcctccaggttcaaacctcgagtccctgtgatcaagaaatgcattgacattctaattgagaaagaatatttggagcgagtggatggtgaaaaggacacctacagttacttggcttaacccttctggaagggtctgactgtgtgacccgcagcaaatagttcatgttggaaagaatgaaaacaactcaagttcatagcagccagcctgccgccattggacctcccttttaaaaactgagaccaagactcccatcagctggtctcggatttacatcggaactgctcaggattgatacatttcaagtctgtaaatacggacaccaacgccatttaccctaatttaagaacagcggggactgaccctccgtgccgagggctgcatgctaccgcactaagtcaatacatgggctccccgattcgcagctgtcgtcttggcagcacttgtcacgttggcagcactttgagagcaagtctgagtggacccacatgtaacctgctatgaaaaccatttgtatagtgtgtttcattttttaatgtgtgaaaataaagaaaattaaaggatttctgtacaagtcgcattgggttttgttttaagttttactaatttctatatgtaaataaaagatataatgattgtgcaaatttaaaaaaa

SEQ ID NO: 428652 - DNA, 4602 bp, Homo sapiens
ggtaagattggagaagactggttagggaataggaagataagctgttgtctaaaaaacgcagtctccagtaaaaggaagaaattgggacatttttttaaaaccccacataggtacactggaaaacatgggccacagggataaaccttccatttttacttccaaccttaccatgtgctcacaaaaaaaggtgttaaatacatgtaagttttgacgaggttatttaaaagtgtaggatataaaccaagaatttttcacaccccaaaaccccgcacaaattaagggattacatatctgagtgacaagtacatacaaacgcattacttctagagatacttagatgtagataaaagaccacatttcaatagagggatcacacagaccagtgggatgtttcttctgagataacccactttatgcaggaaacagtgtggactctggggacggcctctgctctggctgaggatttctgtcccagagcggtacaggaatctgcgtagtgttttagtttggagaaaacaggaagttacactcatcacatcttttgcccagatgatagaattcgaaatccccccggggttgttcatggaatgagccgctctgttatgttgtgagccgtggtattaatcagccacccctcactaggtgttggggttccaccacgcttcctccaccccccgtcaccacagcagcgggtagtatttaggttgaatattccaaatagtcaattatgacagttaatttcaaatgagatgacttcgaagtacacgtgaaaacaatactattttatatcacgactcatgccatccgtatgtgtaatcaaagccttctaagtcttgatatgtccttacaaagacgaaggatagagtgaatgtcaaaatttgccaaacaggagttactgaaagtctgaaggggaaagcctagttaggttttatcttagaagtgatttttaaaacgaaacacgcagataagctcgagctttctggagccgattcctaaggccttgcaggtggtaagggggtcgagaattggctgaggttcctcggaagtccgcgccgattcggagggccacctctgactttctgatctggggtgcaacccccagtccctgtcccggtcgacaaaggtgtggagtcaggttccaggcaagctgggggtgggggtgcgcacaagggaggggcaggggactgggaccccctcttcttcggggtgcttcgggccgtttctccagaggctggtggtgtccccgacccaagcagctcagccccgctcgcgaggtccgaagtggcgggaacgggtcctccgcggcggtcccaaggcgagggaggctgtaaaacctggcagagaatccggcgcgccgggtcggggatgtctcgggtgccgggggcaggggccgcaggctcgcaggtagaagcttccccacgcgagcgggggcctcggccgcggcaggggcgcccccggggccgccggcagcggcgagcgggcgggagggagctttccgggcccctcccgcgcctcgggctggcggggcgatggcgacgacggtttcccggctcccccgccccggacgccgatggcggtttgcctgcaatgagatttcattctctacatttaaaggacatcctttctgagctgctgtgaataaatttggaatggtactgtatattttcatctaatggagaactagctgtactttgaataaggattgctgcactggacgactttagaacatccctcacaatgtcgtcaacccggagccagaacccccacggcctgaagcagattggcctggaccagatctgggacgacctcagagccggcatccagcaggtgtacacacggcagagcatggccaagtccagatatatggagctctacactcatgtttataactactgtactagtgttcaccagtcaaaccaagcacgaggagctggagttcctccttctaagtcgaaaaaggggcagacacctggaggagctcagtttgttggcctggaattatataaacgacttaaggaatttttgaagaattacttgacaaatcttcttaaggatggagaagatttgatggatgagagtgtactgaaattctacactcaacaatgggaagattatcgattttcaagcaaagtgctgaatggaatttgtgcctacctcaatagacattgggttcgccgtgaatgtgacgaaggacgaaaaggaatatatgaaatctattcgcttgcattggtgacttggagagactgtctgttcaggccactgaataaacaggtaacaaatgctgttttaaagctgattgaaaaggaaaggaatggtgaaaccatcaatacaagattgattagtggagttgtacagtcttacgtggaattggggctgaatgaagatgatgcatttgcaaagggccctacgttaacagtgtataaagaatcctttgaatctcaatttttggctgacacagagagattttataccagagagagtactgaattcttgcagcagaacccagttactgaatatatgaaaaaggcagaggctcgtctgcttgaggaacaacgaagagttcaggtttaccttcatgaaagcacacaagatgaattagcaaggaaatgtgaacaagtcctcattgaaaaacacttggaaattttccacacagaatttcagaatttattggatgctgacaaaaatgaagatttgggacgcatgtataatcttgtatctagaatccaggatggcctaggagaattgaaaaaactgttggagacacacattcataatcagggtcttgcagccattgaaaagtgtggagaagctgctttaaatgaccccaaaatgtatgtacagacagtgcttgatgttcataaaaaatacaatgccctggtaatgtctgcattcaacaatgacgctggctttgtggctgctcttgataaggcttgtggtcgcttcataaacaacaacgcggttaccaagatggcccaatcatccagtaaatcccctgagttgctggctcgatactgtgactccttgttgaagaaaagttccaagaacccagaggaggcagaactagaagacacactcaatcaagtgatggttgtcttcaagtacatagaagacaaagacgtatttcagaagttctatgcgaagatgctcgccaagaggctcgtccaccagaacagtgcaagtgacgatgccgaagccagcatgatctccaagttaaagcaagcttgcgggttcgagtacacctctaaacttcagcgcatgtttcaagacattggcgtgagcaaagatctgaacgagcaattcaaaaagcacttgacaaactcagaacccctagacttggatttcagcattcaagtgctgagctccgggtcctggcccttccagcagtcttgtacatttgccttgccgtcagagttggaacgtagttatcagcgattcacagctttctacgccagccgccacagtggccgaaaattgacgtggttatatcagttgtctaaaggagaattggtaactaactgcttcaaaaacagatatactttgcaggcgtcgacattccagatggctatcctgcttcagtacaacacggaagatgcctacactgtgcagcagctgaccgacagcactcaaattaaaatggacattttggcgcaagttttacagattttattaaagtcgaagctattggtcttggaagatgaaaatgcaaatgttgatgaggtggaattgaagccagataccttaataaaattatatcttggttataaaaataagaaattaagggttaacatcaatgtgccaatgaaaaccgaacagaagcaggaacaagaaaccacacacaaaaacatcgaggaagaccgcaaactactgattcaggcggccatcgtgagaatcatgaagatgaggaaggttctgaaacaccagcagttacttggcgaggtcctcactcagctgtcctccaggttcaaacctcgagtccctgtgatcaagaaatgcattgacattctaattgagaaagaatatttggagcgagtggatggtgaaaaggacacctacagttacttggcttaacccttctggaagggtctgactgtgtgacccgcagcaaatagttcatgttggaaagaatgaaaacaactcaagttcatagcagccagcctgccgccattggacctcccttttaaaaactgagaccaagactcccatcagctggtctcggatttacatcggaactgctcaggattgatacatttcaagtctgtaaatacggacaccaacgccatttaccctaatttaagaacagcggggactgaccctccgtgccgagggctgcatgctaccgcactaagtcaatacatgggctccccgattcgcagctgtcgtcttggcagcacttgtcacgttggcagcactttgagagcaagtctgagtggacccacatgtaacctgctatgaaaaccatttgtatagtgtgtttcattttttaatgtgtgaaaataaagaaaattaaaggatttctgtacaagtcgcattgggttttgttttaagttttactaatttctatatgtaaataaaagatataatgattgtgcaaatttaaaaaaa

SEQ ID NO: 428653 - DNA, 3175 bp, Homo sapiens
  misc_feature (3146)..(3146): n is a, c, g, or t
ggcggcggcggcgggaggaggagggccgggcgggcaggggaggaggaggaggcgggcgccgtgtcgcacgcagctccaggcggggcagccccggtagctgagggacgcagctagaccttggcgggacggggctttcgccggggcccaggcccagggaccaggcggaggcgtcgcgggagcctttggggcaccacagagatgcgggtttgcctgcaatgagatttcattctctacatttaaaggacatcctttctgagctgctgtgaataaatttggaatggtactgtatattttcatctaatggagaactagctgtactttgaataaggattgctgcactggacgactttagaacatccctcacaatgtcgtcaacccggagccagaacccccacggcctgaagcagattggcctggaccagatctgggacgacctcagagccggcatccagcaggtgtacacacggcagagcatggccaagtccagatatatggagctctacactcatgtttataactactgtactagtgttcaccagtcaaaccaagcacgaggagctggagttcctccttctaagtcgaaaaaggggcagacacctggaggagctcagtttgttggcctggaattatataaacgacttaaggaatttttgaagaattacttgacaaatcttcttaaggatggagaagatttgatggatgagagtgtactgaaattctacactcaacaatgggaagattatcgattttcaagcaaagtgctgaatggaatttgtgcctacctcaatagacattgggttcgccgtgaatgtgacgaaggacgaaaaggaatatatgaaatctattcgcttgcattggtgacttggagagactgtctgttcaggccactgaataaacaggtaacaaatgctgttttaaagctgattgaaaaggaaaggaatggtgaaaccatcaatacaagattgattagtggagttgtacagtcttacgtggaattggggctgaatgaagatgatgcatttgcaaagggccctacgttaacagtgtataaagaatcctttgaatctcaatttttggctgacacagagagattttataccagagagagtactgaattcttgcagcagaacccagttactgaatatatgaaaaaggcagaggctcgtctgcttgaggaacaacgaagagttcaggtttaccttcatgaaagcacacaagatgaattagcaaggaaatgtgaacaagtcctcattgaaaaacacttggaaattttccacacagaatttcagaatttattggatgctgacaaaaatgaagatttgggacgcatgtataatcttgtatctagaatccaggatggcctaggagaattgaaaaaactgttggagacacacattcataatcagggtcttgcagccattgaaaagtgtggagaagctgctttaaatgaccccaaaatgtatgtacagacagtgcttgatgttcataaaaaatacaatgccctggtaatgtctgcattcaacaatgacgctggctttgtggctgctcttgataaggcttgtggtcgcttcataaacaacaacgcggttaccaagatggcccaatcatccagtaaatcccctgagttgctggctcgatactgtgactccttgttgaagaaaagttccaagaacccagaggaggcagaactagaagacacactcaatcaagtgatggttgtcttcaagtacatagaagacaaagacgtatttcagaagttctatgcgaagatgctcgccaagaggctcgtccaccagaacagtgcaagtgacgatgccgaagccagcatgatctccaagttaaagcaagcttgcgggttcgagtacacctctaaacttcagcgcatgtttcaagacattggcgtgagcaaagatctgaacgagcaattcaaaaagcacttgacaaactcagaacccctagacttggatttcagcattcaagtgctgagctccgggtcctggcccttccagcagtcttgtacatttgccttgccgtcagagttggaacgtagttatcagcgattcacagctttctacgccagccgccacagtggccgaaaattgacgtggttatatcagttgtctaaaggagaattggtaactaactgcttcaaaaacagatatactttgcaggcgtcgacattccagatggctatcctgcttcagtacaacacggaagatgcctacactgtgcagcagctgaccgacagcactcaaattaaaatggacattttggcgcaagttttacagattttattaaagtcgaagctattggtcttggaagatgaaaatgcaaatgttgatgaggtggaattgaagccagataccttaataaaattatatcttggttataaaaataagaaattaagggttaacatcaatgtgccaatgaaaaccgaacagaagcaggaacaagaaaccacacacaaaaacatcgaggaagaccgcaaactactgattcaggcggccatcgtgagaatcatgaagatgaggaaggttctgaaacaccagcagttacttggcgaggtcctcactcagctgtcctccaggttcaaacctcgagtccctgtgatcaagaaatgcattgacattctaattgagaaagaatatttggagcgagtggatggtgaaaaggacacctacagttacttggcttaacccttctggaagggtctgactgtgtgacccgcagcaaatagttcatgttggaaagaatgaaaacaactcaagttcatagcagccagcctgccgccattggacctcccttttaaaaactgagaccaagactcccatcagctggtctcggatttacatcggaactgctcaggattgatacatttcaagtctgtaaatacggacaccaacgccatttaccctaatttaagaacagcggggactgaccctccgtgccgagggctgcatgctaccgcactaagtcaatacatgggctccccgattcgcagctgtcgtcttggcagcacttgtcacgttggcagcactttgagagcaagtctgagtggacccacatgtaacctgctatgaaaaccatttgtatagtgtgtttcattttttaatgtgtgaaaataaagaaaattaaaggaaaaaaanaaaaatactggcctcttgtggcctcagcg

SEQ ID NO: 428654 - DNA, 3179 bp, Homo sapiens
ggcggcggcggcgggaggaggagggccgggcgggcaggggaggaggaggaggcgggcgccgtgtcgcacgcagctccaggcggggcagccccggtagctgagggacgcagctagaccttggcgggacggggctttcgccggggcccaggcccagggaccaggcggaggcgtcgcgggagcctttggggcaccacagagatgcgggtttgcctgcaatgagatttcattctctacatttaaaggacatcctttctgagctgctgtgaataaatttggaatggtactgtatattttcatctaatggagaactagctgtactttgaataaggattgctgcactggacgactttagaacatccctcacaatgtcgtcaacccggagccagaacccccacggcctgaagcagattggcctggaccagatctgggacgacctcagagccggcatccagcaggtgtacacacggcagagcatggccaagtccagatatatggagctctacactcatgtttataactactgtactagtgttcaccagtcaaaccaagcacgaggagctggagttcctccttctaagtcgaaaaaggggcagacacctggaggagctcagtttgttggcctggaattatataaacgacttaaggaatttttgaagaattacttgacaaatcttcttaaggatggagaagatttgatggatgagagtgtactgaaattctacactcaacaatgggaagattatcgattttcaagcaaagtgctgaatggaatttgtgcctacctcaatagacattgggttcgccgtgaatgtgacgaaggacgaaaaggaatatatgaaatctattcggtaacaaatgctgttttaaagctgattgaaaaggaaaggaatggtgaaaccatcaatacaagattgattagtggagttgtacagtcttacgtggaattggggctgaatgaagatgatgcatttgcaaagggccctacgttaacagtgtataaagaatcctttgaatctcaatttttggctgacacagagagattttataccagagagagtactgaattcttgcagcagaacccagttactgaatatatgaaaaaggcagaggctcgtctgcttgaggaacaacgaagagttcaggtttaccttcatgaaagcacacaagatgaattagcaaggaaatgtgaacaagtcctcattgaaaaacacttggaaattttccacacagaatttcagaatttattggatgctgacaaaaatgaagatttgggacgcatgtataatcttgtatctagaatccaggatggcctaggagaattgaaaaaactgttggagacacacattcataatcagggtcttgcagccattgaaaagtgtggagaagctgctttaaatgaccccaaaatgtatgtacagacagtgcttgatgttcataaaaaatacaatgccctggtaatgtctgcattcaacaatgacgctggctttgtggctgctcttgataaggcttgtggtcgcttcataaacaacaacgcggttaccaagatggcccaatcatccagtaaatcccctgagttgctggctcgatactgtgactccttgttgaagaaaagttccaagaacccagaggaggcagaactagaagacacactcaatcaagtgatggttgtcttcaagtacatagaagacaaagacgtatttcagaagttctatgcgaagatgctcgccaagaggctcgtccaccagaacagtgcaagtgacgatgccgaagccagcatgatctccaagttaaagcaagcttgcgggttcgagtacacctctaaacttcagcgcatgtttcaagacattggcgtgagcaaagatctgaacgagcaattcaaaaagcacttgacaaactcagaacccctagacttggatttcagcattcaagtgctgagctccgggtcctggcccttccagcagtcttgtacatttgccttgccgtcagagttggaacgtagttatcagcgattcacagctttctacgccagccgccacagtggccgaaaattgacgtggttatatcagttgtctaaaggagaattggtaactaactgcttcaaaaacagatatactttgcaggcgtcgacattccagatggctatcctgcttcagtacaacacggaagatgcctacactgtgcagcagctgaccgacagcactcaaattaaaatggacattttggcgcaagttttacagattttattaaagtcgaagctattggtcttggaagatgaaaatgcaaatgttgatgaggtggaattgaagccagataccttaataaaattatatcttggttataaaaataagaaattaagggttaacatcaatgtgccaatgaaaaccgaacagaagcaggaacaagaaaccacacacaaaaacatcgaggaagaccgcaaactactgattcaggcggccatcgtgagaatcatgaagatgaggaaggttctgaaacaccagcagttacttggcgaggtcctcactcagctgtcctccaggttcaaacctcgagtccctgtgatcaagaaatgcattgacattctaattgagaaagaatatttggagcgagtggatggtgaaaaggacacctacagttacttggcttaacccttctggaagggtctgactgtgtgacccgcagcaaatagttcatgttggaaagaatgaaaacaactcaagttcatagcagccagcctgccgccattggacctcccttttaaaaactgagaccaagactcccatcagctggtctcggatttacatcggaactgctcaggattgatacatttcaagtctgtaaatacggacaccaacgccatttaccctaatttaagaacagcggggactgaccctccgtgccgagggctgcatgctaccgcactaagtcaatacatgggctccccgattcgcagctgtcgtcttggcagcacttgtcacgttggcagcactttgagagcaagtctgagtggacccacatgtaacctgctatgaaaaccatttgtatagtgtgtttcattttttaatgtgtgaaaataaagaaaattaaaggatttctgtacaagtcgcattgggttttgttttaagttttactaatttctatatgtaaataaaagatataatgattgtgcaaatttaaaaaaa

SEQ ID NO: 428655 - DNA, 3193 bp, Homo sapiens
ggcggcggcggcgggaggaggagggccgggcgggcaggggaggaggaggaggcgggcgccgtgtcgcacgcagctccaggcggggcagccccggtagctgagggacgcagctagaccttggcgggacggggctttcgccggggcccaggcccagggaccaggcggaggcgtcgcgggagcctttggggcaccacagagatgcgggtttgcctgcaatgagatttcattctctacatttaaaggacatcctttctgagctgctgtgaataaatttggaatggtactgtatattttcatctaatggagaactagctgtactttgaataaggattgctgcactggacgactttagaacatccctcacaatgtcgtcaacccggagccagaacccccacggcctgaagcagattggcctggaccagatctgggacgacctcagagccggcatccagcaggtgtacacacggcagagcatggccaagtccagatatatggagctctacactcatgtttataactactgtactagtgttcaccagtcaaaccaagcacgaggagctggagttcctccttctaagtcgaaaaaggggcagacacctggaggagctcagtttgttggcctggaattatataaacgacttaaggaatttttgaagaattacttgacaaatcttcttaaggatggagaagatttgatggatgagagtgtactgaaattctacactcaacaatgggaagattatcgattttcaagcaaagtgctgaatggaatttgtgcctacctcaatagacattgggttcgccgtgaatgtgacgaaggacgaaaaggaatatatgaaatctattcgcttgcattggtgacttggagagactgtctgttcaggccactgaataaacaggtaacaaatgctgttttaaagctgattgaaaaggaaaggaatggtgaaaccatcaatacaagattgattagtggagttgtacagtcttacgtggaattggggctgaatgaagatgatgcatttgcaaagggccctacgttaacagtgtataaagaatcctttgaatctcaatttttggctgacacagagagattttataccagagagagtactgaattcttgcagcagaacccagttactgaatatatgaaaaaggcagaggctcgtctgcttgaggaacaacgaagagttcaggtttaccttcatgaaagcacacaagatgaattagcaaggaaatgtgaacaagtcctcattgaaaaacacttggaaattttccacacagaatttcagaatttattggatgctgacaaaaatgaagatttgggacgcatgtataatcttgtatctagaatccaggatggcctaggagaattgaaaaaactgttggagacacacattcataatcagggtcttgcagccattgaaaagtgtggagaagctgctttaaatgaccccaaaatgtatgtacagacagtgcttgatgttcataaaaaatacaatgccctggtaatgtctgcattcaacaatgacgctggctttgtggctgctcttgataaggcttgtggtcgcttcataaacaacaacgcggttaccaagatggcccaatcatccagtaaatcccctgagttgctggctcgatactgtgactccttgttgaagaaaagttccaagaacccagaggaggcagaactagaagacacactcaatcaagtgatggttgtcttcaagtacatagaagacaaagacgtatttcagaagttctatgcgaagatgctcgccaagaggctcgtccaccagaacagtgcaagtgacgatgccgaagccagcatgatctccaagttaaagcaagcttgcgggttcgagtacacctctaaacttcagcgcatgtttcaagacattggcgtgagcaaagatctgaacgagcaattcaaaaagcacttgacaaactcagaacccctagacttggatttcagcattcaagtgctgagctccgggtcctggcccttccagcagtcttgtacatttgccttgccgtcagagttggaacgtagttatcagcgattcacagctttctacgccagccgccacagtggccgaaaattgacgtggttatatcagttgtctaaaggagaattggtaactaactgcttcaaaaacagatatactttgcaggcgtcgacattccagatggctatcctgcttcagtacaacacggaagatgcctacactgtgcagcagctgaccgacagcactcaaattaaaatggacattttggcgcaagttttacagattttattaaagtcgaagctattggtcttggaagatgaaaatgcaaatgttgatgaggtggaattgaagccagataccttaataaaattatatcttggttataaaaataagaaattaagggttaacatcaatgtgccaatgaaaaccgaacagaagcaggaacaagaaaccacacagcggccatcgtgagaatcatgaagatgaggaaggttctgaaacaccagcagttacttggcgaggtcctcactcagctgtcctccaggttcaaacctcgagtccctgtgatcaagaaatgcattgacattctaattgagaaagaatatttggagcgagtggatggtgaaaaggacacctacagttacttggcttaacccttctggaagggtctgactgtgtgacccgcagcaaatagttcatgttggaaagaatgaaaacaactcaagttcatagcagccagcctgccgccattggacctcccttttaaaaactgagaccaagactcccatcagctggtctcggatttacatcggaactgctcaggattgatacatttcaagtctgtaaatacggacaccaacgccatttaccctaatttaagaacagcggggactgaccctccgtgccgagggctgcatgctaccgcactaagtcaatacatgggctccccgattcgcagctgtcgtcttggcagcacttgtcacgttggcagcactttgagagcaagtctgagtggacccacatgtaacctgctatgaaaaccatttgtatagtgtgtttcattttttaatgtgtgaaaataaagaaaattaaaggatttctgtacaagtcgcattgggttttgttttaagttttactaatttctatatgtaaataaaagatataatgattgtgcaaatttaaaaaaa

SEQ ID NO: 428656 - DNA, 3080 bp, Homo sapiens
ggcggcggcggcgggaggaggagggccgggcgggcaggggaggaggaggaggcgggcgccgtgtcgcacgcagctccaggcggggcagccccggtagctgagggacgcagctagaccttggcgggacggggctttcgccggggcccaggcccagggaccaggcggaggcgtcgcgggagcctttggggcaccacagagatgcgggtttgcctgcaatgagatttcattctctacatttaaaggacatcctttctgagctgctgtgaataaatttggaatggtactgtatattttcatctaatggagaactagctgtactttgaataaggattgctgcactggacgactttagaacatccctcacaatgtcgtcaacccggagccagaacccccacggcctgaagcagattggcctggaccagatctgggacgacctcagagccggcatccagcaggtgtacacacggcagagcatggccaagtccagatatatggagctctacactcatgtttataactactgtactagtgttcaccagtcaaaccaagcacgaggagctggagttcctccttctaagtcgaaaaaggggcagacacctggaggagctcagtttgttggcctggaattatataaacgacttaaggaatttttgaagaattacttgacaaatcttcttaaggatggagaagatttgatggatgagagtgtactgaaattctacactcaacaatgggaagattatcgattttcaagcaaagtgctgaatggaatttgtgcctacctcaatagacattgggttcgccgtgaatgtgacgaaggacgaaaaggaatatatgaaatctattcgcttgcattggtgacttggagagactgtctgttcaggccactgaataaacaggtaacaaatgctgttttaaagctgattgaaaaggaaaggaatggtgaaaccatcaatacaagattgattagtggagttgtacagtcttacgtggaattggggctgaatgaagatgatgcatttgcaaagggccctacgttaacagtgtataaagaatcctttgaatctcaatttttggctgacacagagagattttataccagagagagtactgaattcttgcagcagaacccagttactgaatatatgaaaaaggcagaggctcgtctgcttgaggaacaacgaagagttcaggtttaccttcatgaaagcacacaagatgaattagcaaggaaatgtgaacaagtcctcattgaaaaacacttggaaattttccacacagaatttcagaatttattggatgctgacaaaaatgaagatttgggacgcatgtataatcttgtatctagaatccaggatggcctaggagaattgaaaaaactgttggagacacacattcataatcagggtcttgcagccattgaaaagtgtggagaagctgctttaaatgaccccaaaatgtatgtacagacagtgcttgatgttcataaaaaatacaatgccctggtaatgtctgcattcaacaatgacgctggctttgtggctgctcttgataaggcttgtggtcgcttcataaacaacaacgcggttaccaagatggcccaatcatccagtaaatcccctgagttgctggctcgatactgtgactccttgttgaagaaaagttccaagaacccagaggaggcagaactagaagacacactcaatcaagtgatggttgtcttcaagtacatagaagacaaagacgtatttcagaagttctatgcgaagatgctcgccaagaggctcgtccaccagaacagtgcaagtgacgatgccgaagccagcatgatctccaagttaaagcaagcttgcgggttcgagtacacctctaaacttcagcgcatgtttcaagacattggcgtgagcaaagatctgaacgagcaattcaaaaagcacttgacaaactcagaacccctagacttggatttcagcattcaagtgctgagctccgggtcctggcccttccagcagtcttgtacatttgccttgccgtcagagttggaacgtagttatcagcgattcacagctttctacgccagccgccacagtggccgaaaattgacgtggttatatcagttgtctaaaggagaattggtaactaactgcttcaaaaacagatatactttgcaggcgtcgacattccagatggctatcctgcttcagtacaacacggaagatgcctacactgtgcagcagctgaccgacagcactcaaattaaaatggacattttggcgcaagttttacagattttattaaagtcgaagctattggtcttggaagatgaaaatgcaaatgttgatgaggtggaattgaagccagataccttaataaaattatatcttggttataaaaataagaaattaagggttaacatcaatgtgccaatgaaaaccgaacagaagcaggaacaagaaaccacacacaaaaacatcgaggaagaccgcaaactactgattcaggcggccatcgtgagaatcatgaagatgaggaaggttctgaaacaccagcagttacttggcgaggtcctcactcagctgtcctccaggttcaaacctcgagtccctgtgatcaagaaatgcattgacattctaattgagaaagaatatttggagcgagtggatggtgaaaaggacacctacagttacttggcttaacccttctggaagggtctgactgtgtgacccgcagcaaatagttcatgttggaaagaatgaaaacaactcaagttcatagcagccagcctgccgccattggacctcccttttaaaaactgagaccaagactcccatcagctggtctcggatttacatcggaactgctcaggattgatacatttcaagtctgtaaatacggacaccaacgccatttaccctaatttaagaacagcggggactgaccctccgtgccgagggctgcatgctaccgcactaagtcaatacatgggctccatcagattcagcactctctattaccagcacatcatcacaatcccagcaccttgtaatcacataatgctgacagatactcaccagaatccg

SEQ ID NO: 428657 - DNA, 2760 bp, Homo sapiens
ggcggcggcggcgggaggaggagggccgggcgggcaggggaggaggaggaggcgggcgccgtgtcgcacgcagctccaggcggggcagccccggtagctgagggacgcagctagaccttggcgggacggggctttcgccggggcccaggcccagggaccaggcggaggcgtcgcgggagcctttggggcaccacagagatgcgggtttgcctgcaatgagatttcattctctacatttaaaggacatcctttctgagctgctgtgaataaatttggaatggtactgtatattttcatctaatggagaactagctgtactttgaataaggattgctgcactggacgactttagaacatccctcacaatgtcgtcaacccggagccagaacccccacggcctgaagcagattggcctggaccagatctgggacgacctcagagccggcatccagcaggtgtacacacggcagagcatggccaagtccagatatatggagctctacactcatgtttataactactgtactagtgttcaccagtcaaaccaagcacgaggagctggagttcctccttctaagtcgaaaaaggggcagacacctggaggagctcagtttgttggcctggaattatataaacgacttaaggaatttttgaagaattacttgacaaatcttcttaaggatggagaagatttgatggatgagagtgtactgaaattctacactcaacaatgggaagattatcgattttcaagcaaagtgctgaatggaatttgtgcctacctcaatagacattgggttcgccgtgaatgtgacgaaggacgaaaaggaatatatgaaatctattcgcttgcattggtgacttggagagactgtctgttcaggccactgaataaacaggtaacaaatgctgttttaaagctgattgaaaaggaaaggaatggtgaaaccatcaatacaagattgattagtggagttgtacagtcttacgtggaattggggctgaatgaagatgatgcatttgcaaagggccctacgttaacagtgtataaagaatcctttgaatctcaatttttggctgacacagagagattttataccagagagagtactgaattcttgcagcagaacccagttactgaatatatgaaaaaggcagaggctcgtctgcttgaggaacaacgaagagttcaggtttaccttcatgaaagcacacaagatgaattagcaaggaaatgtgaacaagtcctcattgaaaaacacttggaaattttccacacagaatttcagaatttattggatgctgacaaaaatgaagatttgggacgcatgtataatcttgtatctagaatccaggatggcctaggagaattgaaaaaactgttggagacacacattcataatcagggtcttgcagccattgaaaagtgtggagaagctgctttaaatgaccccaaaatgtatgtacagacagtgcttgatgttcataaaaaatacaatgccctggtaatgtctgcattcaacaatgacgctggctttgtggctgctcttgataaggcttgtggtcgcttcataaacaacaacgcggttaccaagatggcccaatcatccagtaaatcccctgagttgctggctcgatactgtgactccttgttgaagaaaagttccaagaacccagaggaggcagaactagaagacacactcaatcaagtgatggttgtcttcaagtacatagaagacaaagacgtatttcagaagttctatgcgaagatgctcgccaagaggctcgtccaccagaacagtgcaagtgacgatgccgaagccagcatgatctccaagttaaagcaagcttgcgggttcgagtacacctctaaacttcagcgcatgtttcaagacattggcgtgagcaaagatctgaacgagcaattcaaaaagcacttgacaaactcagaacccctagacttggatttcagcattcaagtgctgagctccgggtcctggcccttccagcagtcttgtacatttgccttgccgtcagagttggaacgtagttatcagcgattcacagctttctacgccagccgccacagtggccgaaaattgacgtggttatatcagttgtctaaaggagaattggtaactaactgcttcaaaaacagatatactttgcaggcgtcgacattccagatggctatcctgcttcagtacaacacggaagatgcctacactgtgcagcagctgaccgacagcactcaaattaaaatggacattttggcgcaagttttacagattttattaaagtcgaagctattggtcttggaagatgaaaatgcaaatgttgatgaggtggaattgaagccagataccttaataaaattatatcttggttataaaaataagaaattaagggttaacatcaatgtgccaatgaaaaccgaacagaagcaggaacaagaaaccacacacaaaaacatcgaggaagaccgcaaactactgattcaggcggccatcgtgagaatcatgaagatgaggaaggttctgaaacaccagcagttacttggcgaggtcctcactcagctgtcctccaggttcaaacctcgagtccctgtgatcaagaaatgcattgacattctaattgagaaagaatatttggagcgagtggatggtgaaaaggacacctacagttacttggcttaaccctcttgtaggctacttttacccgaaatgtatttggagaattaacacctcagtcatagcagcc

SEQ ID NO: 428658 - DNA, 2823 bp, Homo sapiens
ggcggcggcggcgggaggaggagggccgggcgggcaggggaggaggaggaggcgggcgccgtgtcgcacgcagctccaggcggggcagccccggtagctgagggacgcagctagaccttggcgggacggggctttcgccggggcccaggcccagggaccaggcggaggcgtcgcgggagcctttggggcaccacagagatgcgggtttgcctgcaatgagatttcattctctacatttaaaggacatcctttctgagctgctgtgaataaatttggaatggtactgtatattttcatctaatggagaactagctgtactttgaataaggattgctgcactggacgactttagaacatccctcacaatgtcgtcaacccggagccagaacccccacggcctgaagcagattggcctggaccagatctgggacgacctcagagccggcatccagcaggtgtacacacggcagagcatggccaagtccagatatatggagctctacactcatgtttataactactgtactagtgttcaccagtcaaaccaagcacgaggagctggagttcctccttctaagtcgaaaaaggggcagacacctggaggagctcagtttgttggcctggaattatataaacgacttaaggaatttttgaagaattacttgacaaatcttcttaaggatggagaagatttgatggatgagagtgtactgaaattctacactcaacaatgggaagattatcgattttcaagcaaagtgctgaatggaatttgtgcctacctcaatagacattgggttcgccgtgaatgtgacgaaggacgaaaaggaatatatgaaatctattcgcttgcattggtgacttggagagactgtctgttcaggccactgaataaacaggtaacaaatgctgttttaaagctgattgaaaaggaaaggaatggtgaaaccatcaatacaagattgattagtggagttgtacagtcttacgtggaattggggctgaatgaagatgatgcatttgcaaagggccctacgttaacagtgtataaagaatcctttgaatctcaatttttggctgacacagagagattttataccagagagagtactgaattcttgcagcagaacccagttactgaatatatgaaaaaggcagaggctcgtctgcttgaggaacaacgaagagttcaggtttaccttcatgaaagcacacaagatgaattagcaaggaaatgtgaacaagtcctcattgaaaaacacttggaaattttccacacagaatttcagaatttattggatgctgacaaaaatgaagatttgggacgcatgtataatcttgtatctagaatccaggatggcctaggagaattgaaaaaactgttggagacacacattcataatcagggtcttgcagccattgaaaagtgtggagaagctgctttaaatgaccccaaaatgtatgtacagacagtgcttgatgttcataaaaaatacaatgccctggtaatgtctgcattcaacaatgacgctggctttgtggctgctcttgataaggcttgtggtcgcttcataaacaacaacgcggttaccaagatggcccaatcatccagtaaatcccctgagttgctggctcgatactgtgactccttgttgaagaaaagttccaagaacccagaggaggcagaactagaagacacactcaatcaagtgatggttgtcttcaagtacatagaagacaaagacgtatttcagaagttctatgcgaagatgctcgccaagaggctcgtccaccagaacagtgcaagtgacgatgccgaagccagcatgatctccaagttaaagcaagcttgcgggttcgagtacacctctaaacttcagcgcatgtttcaagacattggcgtgagcaaagatctgaacgagcaattcaaaaagcacttgacaaactcagaacccctagacttggatttcagcattcaagtgctgagctccgggtcctggcccttccagcagtcttgtacatttgccttgccgtcagagttggaacgtagttatcagcgattcacagctttctacgccagccgccacagtggccgaaaattgacgtggttatatcagttgtctaaaggagaattggtaactaactgcttcaaaaacagatatactttgcaggcgtcgacattccagatggctatcctgcttcagtacaacacggaagatgcctacactgtgcagcagctgaccgacagcactcaaattaaaatggacattttggcgcaagttttacagattttattaaagtcgaagctattggtcttggaagatgaaaatgcaaatgttgatgaggtggaattgaagccagataccttaataaaattatatcttggttataaaaataagaaattaagggttaacatcaatgtgccaatgaaaaccgaacagaagcaggaacaagaaaccacacacaaaaacatcgaggaagaccgcaaactactgattcaggcggccatcgtgagaatcatgaagatgaggaaggttctgaaacaccagcagttacttggcgaggtcctcactcagctgtcctccaggttcaaacctcgagtccctgtgatcaaggtacaggactttacatagcagtcacattcctttcttaatttagaagataaaagatgtagcaaaaagtggattgattgctgtagcatgaaggaggagggagctgacttctttgtatgtagatttctataaaagaaagtcggcttcagtttaactgttgaaacacacatacaaagtgcacagatgatgaagtgccagcttgatgactttc

SEQ ID NO: 428659 - DNA, 1209 bp, Homo sapiens
tcccgtccaagttgatcctctatagtcaaccgtattcagcattcactattgccaactcggccagacgggtcacaacattcgacgtggttatatcagttgtctaaaggagaattggtaactaactgcttcaaaaacagatatactttgcaggcgtcgacattccagatggctatcctgcttcagtacaacacggaagatgcctacactgtgcagcagctgaccgacagcactcaaattaaaatggacattttggcgcaagttttacagattttattaaagtcgaagctattggtcttggaagatgaaaatgcaaatgttgatgaggtggaattgaagccagataccttaataaaattatatcttggttataaaaataagaaattaagggttaacatcaatgtgccaatgaaaaccgaacagaagcaggaacaagaaaccacacacaaaaacatcgaggaagaccgcaaactactgattcaggcggccatcgtgagaatcatgaagatgaggaaggttctgaaacaccagcagttacttggcgaggtcctcactcagctgtcctccaggttcaaacctcgagtccctgtgatcaagaaatgcattgacattctaattgagaaagaatatttggagcgagtggatggtgaaaaggacacctacagttacttggcttaacccttctggaagggtctgactgtgtgacccgcagcaaatagttcatgttggaaagaatgaaaacaactcaagttcatagcagccagcctgccgccattggacctcccttttaaaaactgagaccaagactcccatcagctggtctcggatttacatcggaactgctcaggattgatacatttcaagtctgtaaatacggacaccaacgccatttaccctaatttaagaacagcggggactgaccctccgtgccgagggctgcatgctaccgcactaagtcaatacatgggctccccgattcgcagctgtcgtcttggcagcacttgtcacgttggcagcactttgagagcaagtctgagtggacccacatgtaacctgctatgaaaaccatttgtatagtgtgtttcattttttaatgtgtgaaaataaagaaaattaaaggatttctgtacaagtcgcattgggttttgttttaagttttactaatttctatatgtaaataaaagatataatgattgtgcaaatttaaaaaaa

SEQ ID NO: 428660 - DNA, 1106 bp, Homo sapiens
ggtggttattgcaaagaaaaatgcattttccctttaacttcctctttttctctttaattgcaggacattttggcgcaagttttacagattttattaaagtcgaagctattggtaggtttgcgcccttttatcttacactagaagaagccttttcctgagattgtagagtaacaattgttttcttacaggtcttggaagatgaaaatgcaaatgttgatgaggtggaattgaagccagataccttaataaaattatatcttggttataaaaataagaaattaagggttaacatcaatgtgccaatgaaaaccgaacagaagcaggaacaagaaaccacacacaaaaacatcgaggaagaccgcaaactactgattcaggcggccatcgtgagaatcatgaagatgaggaaggttctgaaacaccagcagttacttggcgaggtcctcactcagctgtcctccaggttcaaacctcgagtccctgtgatcaagaaatgcattgacattctaattgagaaagaatatttggagcgagtggatggtgaaaaggacacctacagttacttggcttaacccttctggaagggtctgactgtgtgacccgcagcaaatagttcatgttggaaagaatgaaaacaactcaagttcatagcagccagcctgccgccattggacctcccttttaaaaactgagaccaagactcccatcagctggtctcggatttacatcggaactgctcaggattgatacatttcaagtctgtaaatacggacaccaacgccatttaccctaatttaagaacagcggggactgaccctccgtgccgagggctgcatgctaccgcactaagtcaatacatgggctccccgattcgcagctgtcgtcttggcagcacttgtcacgttggcagcactttgagagcaagtctgagtggacccacatgtaacctgctatgaaaaccatttgtatagtgtgtttcattttttaatgtgtgaaaataaagaaaattaaaggatttctgtacaagtcgcattgggttttgttttaagttttactaatttctatatgtaaataaaagatataatgattgtgcaaatttaaaaaaa

SEQ ID NO: 428661 - DNA, 1381 bp, Homo sapiens
aaaatctaataagtagatggcccttgaccatagacacgtcccccgggagccctagcacggatctcagtattgttacaaaccaagggagaccggggactcagtgtgaagcgacaggcactaggctgggagtgtgaggtaggcctttgattccattcagcgagcctgatgtttctccaattctgagcttctgggatttttattattttggcaaataagtctccttaaatggctcaccaagaaagtttggacctttgtgtccaagtggcttgattttatctcacttgacaaaatttgggagagcagattagggacctggattttctgtaatgtggatgtccctgttaatggccgagtaggaaactaggccatgatcggactctacccagtgctgggtagaggacattttcacggagagctcacagaaatcaacattctcccctctgtctagggaagcagggcacttcttaaaggttgaaaaatagaaagcagccttcactgcctaccttttaatataatagtgatcggtttcctcatttttcttgatagtaagaaattaagggttaacatcaatgtgccaatgaaaaccgaacagaagcaggaacaagaaaccacacacaaaaacatcgaggaagaccgcaaactactgattcaggcggccatcgtgagaatcatgaagatgaggaaggttctgaaacaccagcagttacttggcgaggtcctcactcagctgtcctccaggttcaaacctcgagtccctgtgatcaagaaatgcattgacattctaattgagaaagaatatttggagcgagtggatggtgaaaaggacacctacagttacttggcttaacccttctggaagggtctgactgtgtgacccgcagcaaatagttcatgttggaaagaatgaaaacaactcaagttcatagcagccagcctgccgccattggacctcccttttaaaaactgagaccaagactcccatcagctggtctcggatttacatcggaactgctcaggattgatacatttcaagtctgtaaatacggacaccaacgccatttaccctaatttaagaacagcggggactgaccctccgtgccgagggctgcatgctaccgcactaagtcaatacatgggctccccgattcgcagctgtcgtcttggcagcacttgtcacgttggcagcactttgagagcaagtctgagtggacccacatgtaacctgctatgaaaaccatttgtatagtgtgtttcattttttaatgtgtgaaaataaagaaaattaaaggatttctgtacaagtcgcattgggttttgttttaagttttactaatttctatatgtaaataaaagatataatgattgtgcaaatttaaaaaaa

SEQ ID NO: 428662 - DNA, 2039 bp, Homo sapiens
ggcggcggcggcgggaggaggagggccgggcgggcaggggaggaggaggaggcgggcgccgtgtcgcacgcagctccaggcggggcagccccggtagctgagggacgcagctagaccttggcgggacggggctttcgccggggcccaggcccagggaccaggcggaggcgtcgcgggagcctttggggcaccacagagatgcgggtttgcctgcaatgagatttcattctctacatttaaaggacatcctttctgagctgctgtgaataaatttggaatggtactgtatattttcatctaatggagaactagctgtactttgaataaggattgctgcactggacgactttagaacatccctcacaatgtcgtcaacccggagccagaacccccacggcctgaagcagattggcctggaccagatctgggacgacctcagagccggcatccagcaggtgtacacacggcagagcatggccaagtccagatatatggagctctacactcatgtttataactactgtactagtgttcaccagtcaaaccaagcacgaggagctggagttcctccttctaagtcgaaaaaggggcagacacctggaggagctcagtttgttggcctggaattatataaacgacttaaggaatttttgaagaattacttgacaaatcttcttaaggatggagaagatttgatggatgagagtgtactgaaattctacactcaacaatgggaagattatcgattttcaagcaaagtgctgaatggaatttgtgcctacctcaatagacattgggttcgccgtgaatgtgacgaaggacgaaaaggaatatatgaaatctattcgcttgcattggtgacttggagagactgtctgttcaggccactgaataaacaggtaacaaatgctgttttaaagctgattgaaaaggaaaggaatggtgaaaccatcaatacaagattgattagtggagttgtacagtcttacgtggaattggggctgaatgaagatgatgcatttgcaaagggccctacgttaacagtgtataaagaatcctttgaatctcaatttttggctgacacagagagattttataccagagagagtactgaattcttgcagcagaacccagttactgaatatatgaaaaaggcagaggctcgtctgcttgaggaacaacgaagagttcaggtttaccttcatgaaagcacacaagatgaattagcaaggaaatgtgaacaagtcctcattgaaaaacacttggaaattttccacacagaatttcagaatttattggatgctgacaaaaatgaagatttgggacgcatgtataatcttgtatctagaatccaggatggcctaggagaattgaaaaaactgttggagacacacattcataatcagggtcttgcagccattgaaaagtgtggagaagctgctttaaatgaccccaaaatgtatgtacagacagtgcttgatgttcataaaaaatacaatgccctggtaatgtctgcattcaacaatgacgctggctttgtggctgctcttgataaggcttgtggtcgcttcataaacaacaacgcggttaccaagatggcccaatcatccagtaaatcccctgagttgctggctcgatactgtgactccttgttgaagaaaagttccaagaacccagaggaggcagaactagaagacacactcaatcaagtgatggttgtcttcaagtacatagaagacacaccgcaccaggagcagaagaaatgcgtataaacagctccaccgagaacagtgatgaaggacttaaagtgagagatggaaaaggaataccgtttactgcaacacttgcgtcatctagtgtgaactctgcagaggagcacgtagccagcactaatgaggggagagagcccacagactcagttccaaaagaacaaatgtcacttgttcacgtggggactgaagcctttccgataagtgatgagtctatgataaaggacagaaaagatcggctgcctctagagagtgcagtggttagaggca

SEQ ID NO: 428663 - DNA, 1076 bp, Homo sapiens
ggtgacttccccaacaggcaggaggcccagtgtccctcctgggttacatttggcacaggtgccagttcgttcatggctgttcagggagttccccacagtcccctgttccctgttcatggcctcttcttgtgagactgagtcctgccgcagaggcaggcagattttggtggtagaaagggagactggcccacggggctcccgaagcacctgactccagttcctagggcgggtgcaggagggactcggagtcaccctcagcaagtgtcagggagctccgtgcatgaaggcttagctgccaggaagtaaaactctatgctaacagatctggggcggggacactgctccccactgagctccgaatcaggggagatttgtggtgggggcagcctctctctgttctgatgataatttgtgtttttcttctctttcactacctcttcctttttaaaaataacacccagaaatgcattgacattctaattgagaaagaatatttggagcgagtggatggtgaaaaggacacctacagttacttggcttaacccttctggaagggtctgactgtgtgacccgcagcaaatagttcatgttggaaagaatgaaaacaactcaagttcatagcagccagcctgccgccattggacctcccttttaaaaactgagaccaagactcccatcagctggtctcggatttacatcggaactgctcaggattgatacatttcaagtctgtaaatacggacaccaacgccatttaccctaatttaagaacagcggggactgaccctccgtgccgagggctgcatgctaccgcactaagtcaatacatgggctccccgattcgcagctgtcgtcttggcagcacttgtcacgttggcagcactttgagagcaagtctgagtggacccacatgtaacctgctatgaaaaccatttgtatagtgtgtttcattttttaatgtgtgaaaataaagaaaattaaaggatttctgtacaagtcgcattgggttttgttttaagttttactaatttctatatgtaaataaaagatataatgattgtgcaaatttaaaaaaa

SEQ ID NO: 428664 - DNA, 967 bp, Homo sapiens
ggcggcggcggcgggaggaggagggccgggcgggcaggggaggaggaggaggcgggcgccgtgtcgcacgcagctccaggcggggcagccccggtagctgagggacgcagctagaccttggcgggacggggctttcgccggggcccaggcccagggaccaggcggaggcgtcgcgggagcctttggggcaccacagagatgcgggtttgcctgcaatgagatttcattctctacatttaaaggacatcctttctgagctgctgtgaataaatttggaatggtactgtatattttcatctaatggagaactagctgtactttgaataaggattgctgcactggacgactttagaacatccctcacaatgtcgtcaacccggagccagaacccccacggcctgaagcagattggcctggaccagatctgggacgacctcagagccggcatccagcaggtgtacacacggcagagcatggccaagtccagatatatggagctctacactcatgtttataactactgtactagtgttcaccagtcaaaccaagcacgaggagctggagttcctccttctaagtcgaaaaaggggcagacacctggaggagctcagtttgttggcctggaattatataaacgacttaaggaatttttgaagaattacttgacaaatcttcttaaggatggagaagatttgatggatgagagtgtactgaaattctacactcaacaatgggaagattatcgattttcaagcaaagtgctgaatggaatttgtgcctacctcaatagacattgggttcgccgtgaatgtgacgaaggacgaaaaggaatatatgaaatctattcgcttgcattggtgacttggagagactgtctgttcaggccactgaataaacagacaaatgctgttttaagctgagttgattgggttggctcagtcgaacgaactgggtatcctctagaaca

SEQ ID NO: 428665 - DNA, 3236 bp, Homo sapiens
ggtaagattggagaagactggttagggaataggaagataagctgttgtctaaaaaacgcagtctccagtaaaaggaagaaattgggacatttttttaaaaccccacataggtacactggaaaacatgggccacagggataaaccttccatttttacttccaaccttaccatgtgctcacaaaaaaaggtgttaaatacatgtaagttttgacgaggttatttaaaagtgtaggatataaaccaagaatttttcacaccccaaaaccccgcacaaattaagggattacatatctgagtgacaagtacatacaaacgcattacttctagagatacttagatgtagataaaagaccacatttcaatagagggatcacacagaccagtgggatgtttcttctgagataacccactttatgcaggaaacagtgtggactctggggacggcctctgctctggctgaggatttctgtcccagagcggtacaggaatctgcgtagtgttttagtttggagaaaacaggaagttacactcatcacatcttttgcccagatgatagaattcgaaatccccccggggttgttcatggaatgagccgctctgttatgttgtgagccgtggtattaatcagccacccctcactaggtgttggggttccaccacgcttcctccaccccccgtcaccacagcagcgggtagtatttaggttgaatattccaaatagtcaattatgacagttaatttcaaatgagatgacttcgaagtacacgtgaaaacaatactattttatatcacgactcatgccatccgtatgtgtaatcaaagccttctaagtcttgatatgtccttacaaagacgaaggatagagtgaatgtcaaaatttgccaaacaggagttactgaaagtctgaaggggaaagcctagttaggttttatcttagaagtgatttttaaaacgaaacacgcagataagctcgagctttctggagccgattcctaaggccttgcaggtggtaagggggtcgagaattggctgaggttcctcggaagtccgcgccgattcggagggccacctctgactttctgatctggggtgcaacccccagtccctgtcccggtcgacaaaggtgtggagtcaggttccaggcaagctgggggtgggggtgcgcacaagggaggggcaggggactgggaccccctcttcttcggggtgcttcgggccgtttctccagaggctggtggtgtccccgacccaagcagctcagccccgctcgcgaggtccgaagtggcgggaacgggtcctccgcggcggtcccaaggcgagggaggctgtaaaacctggcagagaatccggcgcgccgggtcggggatgtctcgggtgccgggggcaggggccgcaggctcgcaggtagaagcttccccacgcgagcgggggcctcggccgcggcaggggcgcccccggggccgccggcagcggcgagcgggcgggagggagctttccgggcccctcccgcgcctcgggctggcggggcgatggcgacgacggtttcccggctcccccgccccggacgccgatggcggtgcgttccggccctcccccaacagcttctcccccgcggtcgccggagccggtttgcctgcaatgagatttcattctctacatttaaaggacatcctttctgagctgctgtgaataaatttggaatggtactgtatattttcatctaatggagaactagctgtactttgaataaggattgctgcactggacgactttagaacatccctcacaatgtcgtcaacccggagccagaacccccacggcctgaagcagattggcctggaccagatctgggacgacctcagagccggcatccagcaggtgtacacacggcagagcatggccaagtccagatatatggagctctacacgtatcctcctgcctagcgcaggttgattgcttagagttttgattatttactagtatgacttatgaattattagaattttatattgttttctcctcccagttcatcatgtaaaataatcgcagggttcatttttagccttaagtttttgaacagagtagaactggttcatttttagtcaaatgcagcactgggcagtacagtcaccactgggcacatgtggctgtttacatttgaaatattttaaagttccttaggcacactagctgtgtgattaataaataaaacatttctgtcatgtagaaggttccgttgggcaaagctggtctaaagcaaggtcctgaggttctcagcagatcatttgttttacgtccatttgtttatatattgtctatgactgccttgtgttatgggaacagagttaagtagttgtgtcagaaacagttttgtccatgaagcctaaaatatttactacctgcccttttacaggaaaagtttgtttacctgatcaaaagggatagaacatcgagcaaaagttttcctgttatggccctatttttttgtgtttttgagacaaggtctcgctctgtcacccaggctggagtgcagtggtatgatcacagctcaccgcagcctcaactacctgcactcaagcaatcctcccatctcagcctcccaagtagctgggaccacagacacgtgccaccacacctggccaattttttttttattgtttatagagacagagtcttgctatgttgcccgggctgtggccctattttttaaagtacagtatttaaaaagaattttattcctttagtttttggtccacgatgtgcatgggggactgtgctgtgtgccacaaaggtgatgagggtggaaaagatgcggctcccactattcgtgtggttggagatgcaccagctaatttggaggctttcttgattccatacaaatatgacattgaaattagagttaagctcactcaggagagaggagattgccactgtttctaggactttaaagttgctgattcaacggagcttcaggtttaaagtcttcaggtttgatagactatatcagttctatcaaactagtttttgtgatattccagtatgttcttgcatgttaatattttagaatcctaaaaaaaatttaagtagatataaaactatgtcaatctctgaattagcataaaatgtgtgtttgcatatttatacatgtatatacacttacatatagaatacttttaaaataatagctttattgagatgtaattatgtaccataaaattcaaccttttaaaaagta

SEQ ID NO: 428666 - DNA, 1813 bp, Homo sapiens
ggcggcggcggcgggaggaggagggccgggcgggcaggggaggaggaggaggcgggcgccgtgtcgcacgcagctccaggcggggcagccccggtagctgagggacgcagctagaccttggcgggacggggctttcgccggggcccaggcccagggaccaggcggaggcgtcgcgggagcctttggggcaccacagagatgcgggtttgcctgcaatgagatttcattctctacatttaaaggacatcctttctgagctgctgtgaataaatttggaatggtactgtatattttcatctaatggagaactagctgtactttgaataaggattgctgcactggacgactttagaacatccctcacaatgtcgtcaacccggagccagaacccccacggcctgaagcagattggcctggaccagatctgggacgacctcagagccggcatccagcaggtgtacacacggcagagcatggccaagtccagatatatggagctctacacgtatcctcctgcctagcgcaggttgattgcttagagttttgattatttactagtatgacttatgaattattagaattttatattgttttctcctcccagttcatcatgtaaaataatcgcagggttcatttttagccttaagtttttgaacagagtagaactggttcatttttagtcaaatgcagcactgggcagtacagtcaccactgggcacatgtggctgtttacatttgaaatattttaaagttccttaggcacactagctgtgtgattaataaataaaacatttctgtcatgtagaaggttccgttgggcaaagctggtctaaagcaaggtcctgaggttctcagcagatcatttgttttacgtccatttgtttatatattgtctatgactgccttgtgttatgggaacagagttaagtagttgtgtcagaaacagttttgtccatgaagcctaaaatatttactacctgcccttttacaggaaaagtttgtttacctgatcaaaagggatagaacatcgagcaaaagttttcctgttatggccctatttttttgtgtttttgagacaaggtctcgctctgtcacccaggctggagtgcagtggtatgatcacagctcaccgcagcctcaactacctgcactcaagcaatcctcccatctcagcctcccaagtagctgggaccacagacacgtgccaccacacctggccaattttttttttattgtttatagagacagagtcttgctatgttgcccgggctgtggccctattttttaaagtacagtatttaaaaagaattttattcctttagtttttggtccacgatgtgcatgggggactgtgctgtgtgccacaaaggtgatgagggtggaaaagatgcggctcccactattcgtgtggttggagatgcaccagctaatttggaggctttcttgattccatacaaatatgacattgaaattagagttaagctcactcaggagagaggagattgccactgtttctaggactttaaagttgctgattcaacggagcttcaggtttaaagtcttcaggtttgatagactatatcagttctatcaaactagtttttgtgatattccagtatgttcttgcatgttaatattttagaatcctaaaaaaaatttaagtagatataaaactatgtcaatctctgaattagcataaaatgtgtgtttgcatatttatacatgtatatacacttacatatagaatacttttaaaataatagctttattgagatgtaattatgtaccataaaattcaaccttttaaaaagta

SEQ ID NO: 428667 - DNA, 2062 bp, Homo sapiens
tgccccgttctcctgggagagcgggccggggcatgcgcgcagggatgctagcccggcggccgaaccggacagagccccccggcgcccgcctatcgctcgctagtcgggccgggccctgcgctgcggcctcggcgcgcccccggtcccaacgggagcgcgcgccctgaccctgagggtagccgtgcgcccgccaggccgctgggacttggggtccccagactcgggggtcgtcgcttttttttcccttaagatctgaaagacccccgtttctgccacccgtgcagtattgtgtagcgcagacataagataagaaagagaggaatgcttgtagacattccttgaaatgaatccccaaagttagggttttctccctggctggctttgccaaaaagaggattctcttttccgattgggtcactcttggttgcttctggttcgtagtaggggttagtggtttgcctgcaatgagatttcattctctacatttaaaggacatcctttctgagctgctgtgaataaatttggaatggtactgtatattttcatctaatggagaactagctgtactttgaataaggattgctgcactggacgactttagaacatccctcacaatgtcgtcaacccggagccagaacccccacggcctgaagcagattggcctggaccagatctgggacgacctcagagccggcatccagcaggtgtacacacggcagagcatggccaagtccagatatatggagctctacacgtatcctcctgcctagcgcaggttgattgcttagagttttgattatttactagtatgacttatgaattattagaattttatattgttttctcctcccagttcatcatgtaaaataatcgcagggttcatttttagccttaagtttttgaacagagtagaactggttcatttttagtcaaatgcagcactgggcagtacagtcaccactgggcacatgtggctgtttacatttgaaatattttaaagttccttaggcacactagctgtgtgattaataaataaaacatttctgtcatgtagaaggttccgttgggcaaagctggtctaaagcaaggtcctgaggttctcagcagatcatttgttttacgtccatttgtttatatattgtctatgactgccttgtgttatgggaacagagttaagtagttgtgtcagaaacagttttgtccatgaagcctaaaatatttactacctgcccttttacaggaaaagtttgtttacctgatcaaaagggatagaacatcgagcaaaagttttcctgttatggccctatttttttgtgtttttgagacaaggtctcgctctgtcacccaggctggagtgcagtggtatgatcacagctcaccgcagcctcaactacctgcactcaagcaatcctcccatctcagcctcccaagtagctgggaccacagacacgtgccaccacacctggccaattttttttttattgtttatagagacagagtcttgctatgttgcccgggctgtggccctattttttaaagtacagtatttaaaaagaattttattcctttagtttttggtccacgatgtgcatgggggactgtgctgtgtgccacaaaggtgatgagggtggaaaagatgcggctcccactattcgtgtggttggagatgcaccagctaatttggaggctttcttgattccatacaaatatgacattgaaattagagttaagctcactcaggagagaggagattgccactgtttctaggactttaaagttgctgattcaacggagcttcaggtttaaagtcttcaggtttgatagactatatcagttctatcaaactagtttttgtgatattccagtatgttcttgcatgttaatattttagaatcctaaaaaaaatttaagtagatataaaactatgtcaatctctgaattagcataaaatgtgtgtttgcatatttatacatgtatatacacttacatatagaatacttttaaaataatagctttattgagatgtaattatgtaccataaaattcaaccttttaaaaagta

SEQ ID NO: 428668 - DNA, 1664 bp, Homo sapiens
ggtaagattggagaagactggttagggaataggaagataagctgttgtctaaaaaacgcagtctccagtaaaaggaagaaattgggacatttttttaaaaccccacataggtacactggaaaacatgggccacagggataaaccttccatttttacttccaaccttaccatgtgctcacaaaaaaaggtgttaaatacatgtaagttttgacgaggttatttaaaagtgtaggatataaaccaagaatttttcacaccccaaaaccccgcacaaattaagggattacatatctgagtgacaagtacatacaaacgcattacttctagagatacttagatgtagataaaagaccacatttcaatagagggatcacacagaccagtgggatgtttcttctgagataacccactttatgcaggaaacagtgtggactctggggacggcctctgctctggctgaggatttctgtcccagagcggtacaggaatctgcgtagtgttttagtttggagaaaacaggaagttacactcatcacatcttttgcccagatgatagaattcgaaatccccccggggttgttcatggaatgagccgctctgttatgttgtgagccgtggtattaatcagccacccctcactaggtgttggggttccaccacgcttcctccaccccccgtcaccacagcagcgggtagtatttaggttgaatattccaaatagtcaattatgacagttaatttcaaatgagatgacttcgaagtacacgtgaaaacaatactattttatatcacgactcatgccatccgtatgtgtaatcaaagccttctaagtcttgatatgtccttacaaagacgaaggatagagtgaatgtcaaaatttgccaaacaggagttactgaaagtctgaaggggaaagcctagttaggttttatcttagaagtgatttttaaaacgaaacacgcagataagctcgagctttctggagccgattcctaaggccttgcaggtggtaagggggtcgagaattggctgaggttcctcggaagtccgcgccgattcggagggccacctctgactttctgatctggggtgcaacccccagtccctgtcccggtcgacaaaggtgtggagtcaggttccaggcaagctgggggtgggggtgcgcacaagggaggggcaggggactgggaccccctcttcttcggggtgcttcgggccgtttctccagaggctggtggtgtccccgacccaagcagctcagccccgctcgcgaggtccgaagtggcgggaacgggtcctccgcggcggtcccaaggcgagggaggctgtaaaacctggcagagaatccggcgcgccgggtcggggatgtctcgggtgccgggggcaggggccgcaggctcgcaggtagaagcttccccacgcgagcgggggcctcggccgcggcaggggcgcccccggggccgccggcagcggcgagcgggcgggagggagctttccgggcccctcccgcgcctcgggctggcggggcgatggcgacgacggtttcccggctcccccgccccggacgccgatggcggtgcgttccggccctcccccaacagcttctcccccgcggtcgccggagccggtgaggccgagagggcggggagccgcgcagggaaggc

SEQ ID NO: 428669 - DNA, 2102 bp, Homo sapiens
ggtaagattggagaagactggttagggaataggaagataagctgttgtctaaaaaacgcagtctccagtaaaaggaagaaattgggacatttttttaaaaccccacataggtacactggaaaacatgggccacagggataaaccttccatttttacttccaaccttaccatgtgctcacaaaaaaaggtgttaaatacatgtaagttttgacgaggttatttaaaagtgtaggatataaaccaagaatttttcacaccccaaaaccccgcacaaattaagggattacatatctgagtgacaagtacatacaaacgcattacttctagagatacttagatgtagataaaagaccacatttcaatagagggatcacacagaccagtgggatgtttcttctgagataacccactttatgcaggaaacagtgtggactctggggacggcctctgctctggctgaggatttctgtcccagagcggtacaggaatctgcgtagtgttttagtttggagaaaacaggaagttacactcatcacatcttttgcccagatgatagaattcgaaatccccccggggttgttcatggaatgagccgctctgttatgttgtgagccgtggtattaatcagccacccctcactaggtgttggggttccaccacgcttcctccaccccccgtcaccacagcagcgggtagtatttaggttgaatattccaaatagtcaattatgacagttaatttcaaatgagatgacttcgaagtacacgtgaaaacaatactattttatatcacgactcatgccatccgtatgtgtaatcaaagccttctaagtcttgatatgtccttacaaagacgaaggatagagtgaatgtcaaaatttgccaaacaggagttactgaaagtctgaaggggaaagcctagttaggttttatcttagaagtgatttttaaaacgaaacacgcagataagctcgagctttctggagccgattcctaaggccttgcaggtggtaagggggtcgagaattggctgaggttcctcggaagtccgcgccgattcggagggccacctctgactttctgatctggggtgcaacccccagtccctgtcccggtcgacaaaggtgtggagtcaggttccaggcaagctgggggtgggggtgcgcacaagggaggggcaggggactgggaccccctcttcttcggggtgcttcgggccgtttctccagaggctggtggtgtccccgacccaagcagctcagccccgctcgcgaggtccgaagtggcgggaacgggtcctccgcggcggtcccaaggcgagggaggctgtaaaacctggcagagaatccggcgcgccgggtcggggatgtctcgggtgccgggggcaggggccgcaggctcgcaggtagaagcttccccacgcgagcgggggcctcggccgcggcaggggcgcccccggggccgccggcagcggcgagcgggcgggagggagctttccgggcccctcccgcgcctcgggctggcggggcgatggcgacgacggtttcccggctcccccgccccggacgccgatggcggtgcgttccggccctcccccaacagcttctcccccgcggtcgccggagccggtttgcctgcaatgagatttcattctctacatttaaaggacatcctttctgagctgctgtgaataaatttggaatggtactgtatattttcatctaatggagaactagctgtactttgaataaggattgctgcactggacgactttagaacatccctcacaatgtcgtcaacccggagccagaacccccacggcctgaagcagattggcctggaccagatctgggacgacctcagagccggcatccagcaggtgtacacacggcagagcatggccaagtccagatatatggagctctacacgtatcctcctgcctagcgcagaggaaaggccatgtgaggacacagtgagaaggtggccgtctgcaaccctggaagagagccctcaccagaaaccaaccctgacagtaccttgagctcggacctctagtctccagaactgtgagaaaataaattcctgttgtttaagccgtcttg

SEQ ID NO: 428670 - DNA, 465 bp, Homo sapiens
caaagttaaattacagcagactagaaagcaattggtaaagtgaatttcctttactgaagtttaagtggattatcttaaaggcaaacttcttcagaatgtttttggaaatgttttataaatatctcctgttggttttcaccttggatattctaaatgactacttcataatctgttcttcagtgttgaggttacagtatgagattgccagtttgctgtaggtaaggaaagtcaaccttccctcttcctctgcactaatctgatgagaactgatcttttgaatgcttgaagctgcattctggctaagtggtgcttgtttaaacgtactgatgttttaaaacatggtatctttttaaaattttcagttccaagaacccagaggaggcagaactagaagacacactcaatcaagtggtaagtgcttcatgagcatacccatttccagtagctgtgtatttcacaagctgt

SEQ ID NO: 428671 - DNA, 3139 bp, Homo sapiens
ggcggcggcggcgggaggaggagggccgggcgggcaggggaggaggaggaggcgggcgccgtgtcgcacgcagctccaggcggggcagccccggtagctgagggacgcagctagaccttggcgggacggggctttcgccggggcccaggcccagggaccaggcggaggcgtcgcgggagcctttggggcaccacagagatgcgggtttgcctgcaatgagatttcattctctacatttaaaggacatcctttctgagctgctgtgaataaatttggaatggtactgtatattttcatctaatggagaactagctgtactttgaataaggattgctgcactggacgactttagaacatccctcacaatgtcgtcaacccggagccagaacccccacggcctgaagcagattggcctggaccagatctgggacgacctcagagccggcatccagcaggtgtacacacggcagagcatggccaagtccagatatatggagctctacactcatgtttataactactgtactagtgttcaccagtcaaaccaagcacgaggagctggagttcctccttctaagtcgaaaaaggggcagacacctggaggagctcagtttgttggcctggaattatataaacgacttaaggaatttttgaagaattacttgacaaatcttcttaaggatggagaagatttgatggatgagagtgtactgaaattctacactcaacaatgggaagattatcgattttcaagcaaagtgctgaatggaatttgtgcctacctcaatagacattgggttcgccgtgaatgtgacgaaggacgaaaaggaatatatgaaatctattcgcttgcattggtgacttggagagactgtctgttcaggccactgaataaacaggtaacaaatgctgttttaaagctgattgaaaaggaaaggaatggtgaaaccatcaatacaagattgattagtggagttgtacagtcttacgtggaattggggctgaatgaagatgatgcatttgcaaagggccctacgttaacagtgtataaagaatcctttgaatctcaatttttggctgacacagagagattttataccagagagagtactgaattcttgcagcagaacccagttactgaatatatgaaaaaggcagaggctcgtctgcttgaggaacaacgaagagttcaggtttaccttcatgaaagcacacaagatgaattagcaaggaaatgtgaacaagtcctcattgaaaaacacttggaaattttccacacagaatttcagaatttattggatgctgacaaaaatgaagatttgggacgcatgtataatcttgtatctagaatccaggatggcctaggagaattgaaaaaactgttggagacacacattcataatcagggtcttgcagccattgaaaagtgtggagaagctgctttaaatgaccccaaaatgtatgtacagacagtgcttgatgttcataaaaaatacaatgccctggtaatgtctgcattcaacaatgacgctggctttgtggctgctcttgataaggcttgtggtcgcttcataaacaacaacgcggttaccaagatggcccaatcatccagtaaatcccctgagttgctggctcgatactgtgactccttgttgaagaaaagttccaagaacccagaggaggcagaactagaagacacactcaatcaagtgatggttgtcttcaagtacatagaagacaaagacgtatttcagaagttctatgcgaagatgctcgccaagaggctcgtccaccagaacagtgcaagtgacgatgccgaagccagcatgatctccaagttaaagcaagcttgcgggttcgagtacacctctaaacttcagcgcatgtttcaagacattggcgtgagcaaagatctgaacgagcaattcaaaaagcacttgacaaactcagaacccctagacttggatttcagcattcaagtgctgagctccgggtcctggcccttccagcagtcttgtacatttgccttgccgtcagagttggaacgtagttatcagcgattcacagctttctacgccagccgccacagtggccgaaaattgacgtggttatatcagttgtctaaaggagaattggtaactaactgcttcaaaaacagatatactttgcaggcgtcgacattccagatggctatcctgcttcagtacaacacggaagatgcctacactgtgcagcagctgaccgacagcactcaaattaaaatggacattttggcgcaagttttacagattttattaaagtcgaagctattggtcttggaagatgaaaatgcaaatgttgatgaggtggaattgaagccagataccttaataaaattatatcttggttataaaaataagaaattaagggttaacatcaatgtgccaatgaaaaccgaacagaagcaggaacaagaaaccacacacaaaaacatcgaggaagaccgcaaactactgattcaggcggccatcgtgagaatcatgaagatgaggaaggttctgaaacaccagcagttacttggcgaggtcctcactcagctgtcctccaggttcaaacctcgagtccctgtgatcaagaaatgcattgacattctaattgagaaagaatatttggagcgagtggatggtgaaaaggacacctacagttacttggcttaacccttctggaagggtctgactgtgtgacccgcagcaaatagttcatgttggaaagaatgaaaacaactcaagttcatagcagccagcctgccgccattggacctcccttttaaaaactgagaccaagactcccatcagctggtctcggatttacatcggaactgctcaggattgatacatttcaagtctgtaaatacggacaccaacgccatttaccctaatttaagaacagcggggactgaccctccgtgccgagggctgcatgctaccgcactaagtcaatacatgggctccccgattcgcagctgtcgtcttggcagcacttgtcacgttggcagcactttgagagcaagtctgagtggacccacatgtaacctgctatgaaaaccatttgtatagtgtgtttcattttttaatgtgtgaaaataaagaaaattaaagga

SEQ ID NO: 428672 - DNA, 4168 bp, Homo sapiens
ggtaagattggagaagactggttagggaataggaagataagctgttgtctaaaaaacgcagtctccagtaaaaggaagaaattgggacatttttttaaaaccccacataggtacactggaaaacatgggccacagggataaaccttccatttttacttccaaccttaccatgtgctcacaaaaaaaggtgttaaatacatgtaagttttgacgaggttatttaaaagtgtaggatataaaccaagaatttttcacaccccaaaaccccgcacaaattaagggattacatatctgagtgacaagtacatacaaacgcattacttctagagatacttagatgtagataaaagaccacatttcaatagagggatcacacagaccagtgggatgtttcttctgagataacccactttatgcaggaaacagtgtggactctggggacggcctctgctctggctgaggatttctgtcccagagcggtacaggaatctgcgtagtgttttagtttggagaaaacaggaagttacactcatcacatcttttgcccagatgatagaattcgaaatccccccggggttgttcatggaatgagccgctctgttatgttgtgagccgtggtattaatcagccacccctcactaggtgttggggttccaccacgcttcctccaccccccgtcaccacagcagcgggtagtatttaggttgaatattccaaatagtcaattatgacagttaatttcaaatgagatgacttcgaagtacacgtgaaaacaatactattttatatcacgactcatgccatccgtatgtgtaatcaaagccttctaagtcttgatatgtccttacaaagacgaaggatagagtgaatgtcaaaatttgccaaacaggagttactgaaagtctgaaggggaaagcctagttaggttttatcttagaagtgatttttaaaacgaaacacgcagataagctcgagctttctggagccgattcctaaggccttgcaggtggtaagggggtcgagaattggctgaggttcctcggaagtccgcgccgattcggagggccacctctgactttctgatctggggtgcaacccccagtccctgtcccggtcgacaaaggtgtggagtcaggttccaggtttgcctgcaatgagatttcattctctacatttaaaggacatcctttctgagctgctgtgaataaatttggaatggtactgtatattttcatctaatggagaactagctgtactttgaataaggattgctgcactggacgactttagaacatccctcacaatgtcgtcaacccggagccagaacccccacggcctgaagcagattggcctggaccagatctgggacgacctcagagccggcatccagcaggtgtacacacggcagagcatggccaagtccagatatatggagctctacactcatgtttataactactgtactagtgttcaccagtcaaaccaagcacgaggagctggagttcctccttctaagtcgaaaaaggggcagacacctggaggagctcagtttgttggcctggaattatataaacgacttaaggaatttttgaagaattacttgacaaatcttcttaaggatggagaagatttgatggatgagagtgtactgaaattctacactcaacaatgggaagattatcgattttcaagcaaagtgctgaatggaatttgtgcctacctcaatagacattgggttcgccgtgaatgtgacgaaggacgaaaaggaatatatgaaatctattcgcttgcattggtgacttggagagactgtctgttcaggccactgaataaacaggtaacaaatgctgttttaaagctgattgaaaaggaaaggaatggtgaaaccatcaatacaagattgattagtggagttgtacagtcttacgtggaattggggctgaatgaagatgatgcatttgcaaagggccctacgttaacagtgtataaagaatcctttgaatctcaatttttggctgacacagagagattttataccagagagagtactgaattcttgcagcagaacccagttactgaatatatgaaaaaggcagaggctcgtctgcttgaggaacaacgaagagttcaggtttaccttcatgaaagcacacaagatgaattagcaaggaaatgtgaacaagtcctcattgaaaaacacttggaaattttccacacagaatttcagaatttattggatgctgacaaaaatgaagatttgggacgcatgtataatcttgtatctagaatccaggatggcctaggagaattgaaaaaactgttggagacacacattcataatcagggtcttgcagccattgaaaagtgtggagaagctgctttaaatgaccccaaaatgtatgtacagacagtgcttgatgttcataaaaaatacaatgccctggtaatgtctgcattcaacaatgacgctggctttgtggctgctcttgataaggcttgtggtcgcttcataaacaacaacgcggttaccaagatggcccaatcatccagtaaatcccctgagttgctggctcgatactgtgactccttgttgaagaaaagttccaagaacccagaggaggcagaactagaagacacactcaatcaagtgatggttgtcttcaagtacatagaagacaaagacgtatttcagaagttctatgcgaagatgctcgccaagaggctcgtccaccagaacagtgcaagtgacgatgccgaagccagcatgatctccaagttaaagcaagcttgcgggttcgagtacacctctaaacttcagcgcatgtttcaagacattggcgtgagcaaagatctgaacgagcaattcaaaaagcacttgacaaactcagaacccctagacttggatttcagcattcaagtgctgagctccgggtcctggcccttccagcagtcttgtacatttgccttgccgtcagagttggaacgtagttatcagcgattcacagctttctacgccagccgccacagtggccgaaaattgacgtggttatatcagttgtctaaaggagaattggtaactaactgcttcaaaaacagatatactttgcaggcgtcgacattccagatggctatcctgcttcagtacaacacggaagatgcctacactgtgcagcagctgaccgacagcactcaaattaaaatggacattttggcgcaagttttacagattttattaaagtcgaagctattggtcttggaagatgaaaatgcaaatgttgatgaggtggaattgaagccagataccttaataaaattatatcttggttataaaaataagaaattaagggttaacatcaatgtgccaatgaaaaccgaacagaagcaggaacaagaaaccacacacaaaaacatcgaggaagaccgcaaactactgattcaggcggccatcgtgagaatcatgaagatgaggaaggttctgaaacaccagcagttacttggcgaggtcctcactcagctgtcctccaggttcaaacctcgagtccctgtgatcaagaaatgcattgacattctaattgagaaagaatatttggagcgagtggatggtgaaaaggacacctacagttacttggcttaacccttctggaagggtctgactgtgtgacccgcagcaaatagttcatgttggaaagaatgaaaacaactcaagttcatagcagccagcctgccgccattggacctcccttttaaaaactgagaccaagactcccatcagctggtctcggatttacatcggaactgctcaggattgatacatttcaagtctgtaaatacggacaccaacgccatttaccctaatttaagaacagcggggactgaccctccgtgccgagggctgcatgctaccgcactaagtcaatacatgggctccccgattcgcagctgtcgtcttggcagcacttgtcacgttggcagcactttgagagcaagtctgagtggacccacatgtaacctgctatgaaaaccatttgtatagtgtgtttcattttttaatgtgtgaaaataaagaaaattaaaggatttctgtacaagtcgcattgggttttgttttaagttttactaatttctatatgtaaataaaagatataatgattgtgcaaatttaaaaaaa

SEQ ID NO: 428673 - DNA, 4430 bp, Homo sapiens
ggtaagattggagaagactggttagggaataggaagataagctgttgtctaaaaaacgcagtctccagtaaaaggaagaaattgggacatttttttaaaaccccacataggtacactggaaaacatgggccacagggataaaccttccatttttacttccaaccttaccatgtgctcacaaaaaaaggtgttaaatacatgtaagttttgacgaggttatttaaaagtgtaggatataaaccaagaatttttcacaccccaaaaccccgcacaaattaagggattacatatctgagtgacaagtacatacaaacgcattacttctagagatacttagatgtagataaaagaccacatttcaatagagggatcacacagaccagtgggatgtttcttctgagataacccactttatgcaggaaacagtgtggactctggggacggcctctgctctggctgaggatttctgtcccagagcggtacaggaatctgcgtagtgttttagtttggagaaaacaggaagttacactcatcacatcttttgcccagatgatagaattcgaaatccccccggggttgttcatggaatgagccgctctgttatgttgtgagccgtggtattaatcagccacccctcactaggtgttggggttccaccacgcttcctccaccccccgtcaccacagcagcgggtagtatttaggttgaatattccaaatagtcaattatgacagttaatttcaaatgagatgacttcgaagtacacgtgaaaacaatactattttatatcacgactcatgccatccgtatgtgtaatcaaagccttctaagtcttgatatgtccttacaaagacgaaggatagagtgaatgtcaaaatttgccaaacaggagttactgaaagtctgaaggggaaagcctagttaggttttatcttagaagtgatttttaaaacgaaacacgcagataagctcgagctttctggagccgattcctaaggccttgcaggtggtaagggggtcgagaattggctgaggttcctcggaagtccgcgccgattcggagggccacctctgactttctgatctggggtgcaacccccagtccctgtcccggtcgacaaaggtgtggagtcaggttccaggcaagctgggggtgggggtgcgcacaagggaggggcaggggactgggaccccctcttcttcggggtgcttcgggccgtttctccagaggctggtggtgtccccgacccaagcagctcagccccgctcgcgaggtccgaagtggcgggaacgggtcctccgcggcggtcccaaggcgagggaggctgtaaaacctggcagagaatccggcgcgccgggtcggggatgtctcgggtgccgggggcaggggccgcaggctcgcaggtttgcctgcaatgagatttcattctctacatttaaaggacatcctttctgagctgctgtgaataaatttggaatggtactgtatattttcatctaatggagaactagctgtactttgaataaggattgctgcactggacgactttagaacatccctcacaatgtcgtcaacccggagccagaacccccacggcctgaagcagattggcctggaccagatctgggacgacctcagagccggcatccagcaggtgtacacacggcagagcatggccaagtccagatatatggagctctacactcatgtttataactactgtactagtgttcaccagtcaaaccaagcacgaggagctggagttcctccttctaagtcgaaaaaggggcagacacctggaggagctcagtttgttggcctggaattatataaacgacttaaggaatttttgaagaattacttgacaaatcttcttaaggatggagaagatttgatggatgagagtgtactgaaattctacactcaacaatgggaagattatcgattttcaagcaaagtgctgaatggaatttgtgcctacctcaatagacattgggttcgccgtgaatgtgacgaaggacgaaaaggaatatatgaaatctattcgcttgcattggtgacttggagagactgtctgttcaggccactgaataaacaggtaacaaatgctgttttaaagctgattgaaaaggaaaggaatggtgaaaccatcaatacaagattgattagtggagttgtacagtcttacgtggaattggggctgaatgaagatgatgcatttgcaaagggccctacgttaacagtgtataaagaatcctttgaatctcaatttttggctgacacagagagattttataccagagagagtactgaattcttgcagcagaacccagttactgaatatatgaaaaaggcagaggctcgtctgcttgaggaacaacgaagagttcaggtttaccttcatgaaagcacacaagatgaattagcaaggaaatgtgaacaagtcctcattgaaaaacacttggaaattttccacacagaatttcagaatttattggatgctgacaaaaatgaagatttgggacgcatgtataatcttgtatctagaatccaggatggcctaggagaattgaaaaaactgttggagacacacattcataatcagggtcttgcagccattgaaaagtgtggagaagctgctttaaatgaccccaaaatgtatgtacagacagtgcttgatgttcataaaaaatacaatgccctggtaatgtctgcattcaacaatgacgctggctttgtggctgctcttgataaggcttgtggtcgcttcataaacaacaacgcggttaccaagatggcccaatcatccagtaaatcccctgagttgctggctcgatactgtgactccttgttgaagaaaagttccaagaacccagaggaggcagaactagaagacacactcaatcaagtgatggttgtcttcaagtacatagaagacaaagacgtatttcagaagttctatgcgaagatgctcgccaagaggctcgtccaccagaacagtgcaagtgacgatgccgaagccagcatgatctccaagttaaagcaagcttgcgggttcgagtacacctctaaacttcagcgcatgtttcaagacattggcgtgagcaaagatctgaacgagcaattcaaaaagcacttgacaaactcagaacccctagacttggatttcagcattcaagtgctgagctccgggtcctggcccttccagcagtcttgtacatttgccttgccgtcagagttggaacgtagttatcagcgattcacagctttctacgccagccgccacagtggccgaaaattgacgtggttatatcagttgtctaaaggagaattggtaactaactgcttcaaaaacagatatactttgcaggcgtcgacattccagatggctatcctgcttcagtacaacacggaagatgcctacactgtgcagcagctgaccgacagcactcaaattaaaatggacattttggcgcaagttttacagattttattaaagtcgaagctattggtcttggaagatgaaaatgcaaatgttgatgaggtggaattgaagccagataccttaataaaattatatcttggttataaaaataagaaattaagggttaacatcaatgtgccaatgaaaaccgaacagaagcaggaacaagaaaccacacacaaaaacatcgaggaagaccgcaaactactgattcaggcggccatcgtgagaatcatgaagatgaggaaggttctgaaacaccagcagttacttggcgaggtcctcactcagctgtcctccaggttcaaacctcgagtccctgtgatcaagaaatgcattgacattctaattgagaaagaatatttggagcgagtggatggtgaaaaggacacctacagttacttggcttaacccttctggaagggtctgactgtgtgacccgcagcaaatagttcatgttggaaagaatgaaaacaactcaagttcatagcagccagcctgccgccattggacctcccttttaaaaactgagaccaagactcccatcagctggtctcggatttacatcggaactgctcaggattgatacatttcaagtctgtaaatacggacaccaacgccatttaccctaatttaagaacagcggggactgaccctccgtgccgagggctgcatgctaccgcactaagtcaatacatgggctccccgattcgcagctgtcgtcttggcagcacttgtcacgttggcagcactttgagagcaagtctgagtggacccacatgtaacctgctatgaaaaccatttgtatagtgtgtttcattttttaatgtgtgaaaataaagaaaattaaaggatttctgtacaagtcgcattgggttttgttttaagttttactaatttctatatgtaaataaaagatataatgattgtgcaaatttaaaaaaa

SEQ ID NO: 428674 - DNA, 3619 bp, Homo sapiens
ggcggcggcggcgggaggaggagggccgggcgggcaggggaggaggaggaggcgggcgccgtgtcgcacgcagctccaggcggggcagccccggtagctgagggacgcagctagaccttggcgggacggggctttcgccggggcccaggcccagggaccaggcggaggcgtcgcgggagcctttggggcaccacagagatgcgggtttgcctgcaatgagatttcattctctacatttaaaggacatcctttctgagctgctgtgaataaatttggaatggtactgtatattttcatctaatggagaactagctgtactttgaataaggattgctgcactggacgactttagaacatccctcacaatgtcgtcaacccggagccagaacccccacggcctgaagcagattggcctggaccagatctgggacgacctcagagccggcatccagcaggtgtacacacggcagagcatggccaagtccagatatatggagctctacactcatgtttataactactgtactagtgttcaccagtcaaaccaagcacgaggagctggagttcctccttctaagtcgaaaaaggggcagacacctggaggagctcagtttgttggcctggaattatataaacgacttaaggaatttttgaagaattacttgacaaatcttcttaaggatggagaagatttgatggatgagagtgtactgaaattctacactcaacaatgggaagattatcgattttcaagcaaagtgctgaatggaatttgtgcctacctcaatagacattgggttcgccgtgaatgtgacgaaggacgaaaaggaatatatgaaatctattcgcttgcattggtgacttggagagactgtctgttcaggccactgaataaacaggtaacaaatgctgttttaaagctgattgaaaaggaaaggaatggtgaaaccatcaatacaagattgattagtggagttgtacagtcttacgtggaattggggctgaatgaagatgatgcatttgcaaagggccctacgttaacagtgtataaagaatcctttgaatctcaatttttggctgacacagagagattttataccagagagagtactgaattcttgcagcagaacccagttactgaatatatgaaaaaggcagaggctcgtctgcttgaggaacaacgaagagttcaggtttaccttcatgaaagcacacaagatgaattagcaaggaaatgtgaacaagtcctcattgaaaaacacttggaaattttccacacagaatttcagaatttattggatgctgacaaaaatgaagatttgggacgcatgtataatcttgtatctagaatccaggatggcctaggagaattgaaaaaactgttggagacacacattcataatcagggtcttgcagccattgaaaagtgtggagaagctgctttaaatgaccccaaaatgtatgtacagacagtgcttgatgttcataaaaaatacaatgccctggtaatgtctgcattcaacaatgacgctggctttgtggctgctcttgataaggcttgtggtcgcttcataaacaacaacgcggttaccaagatggcccaatcatccagtaaatcccctgagttgctggctcgatactgtgactccttgttgaagaaaagttccaagaacccagaggaggcagaactagaagacacactcaatcaagtggtaagtgcttcatgagcatacccatttccagtagctgtgtatttcacaagctgtttgtaatgttatttgtagatggcctctgaaatgtgaaaagtaataatcattgattttattttgaatctctggttttacttcctaaattgagttactacttttagcattcatacttttctcattaatactcagtcagtccaactcactgaattaagggactcacaaaactttcaagactctggagtggagattttgccatcataaacgttggcgtacagacctgcccaaagccaaaggcacatcttggctcctggcttgtggccggtgacagtcagctctgcactgttggcttgtgtgtgtgctggttaagtgtgttgtctcggtggctttgccagatggttgtcttcaagtacatagaagacaaagacgtatttcagaagttctatgcgaagatgctcgccaagaggctcgtccaccagaacagtgcaagtgacgatgccgaagccagcatgatctccaagttaaagcaagcttgcgggttcgagtacacctctaaacttcagcgcatgtttcaagacattggcgtgagcaaagatctgaacgagcaattcaaaaagcacttgacaaactcagaacccctagacttggatttcagcattcaagtgctgagctccgggtcctggcccttccagcagtcttgtacatttgccttgccgtcagagttggaacgtagttatcagcgattcacagctttctacgccagccgccacagtggccgaaaattgacgtggttatatcagttgtctaaaggagaattggtaactaactgcttcaaaaacagatatactttgcaggcgtcgacattccagatggctatcctgcttcagtacaacacggaagatgcctacactgtgcagcagctgaccgacagcactcaaattaaaatggacattttggcgcaagttttacagattttattaaagtcgaagctattggtcttggaagatgaaaatgcaaatgttgatgaggtggaattgaagccagataccttaataaaattatatcttggttataaaaataagaaattaagggttaacatcaatgtgccaatgaaaaccgaacagaagcaggaacaagaaaccacacacaaaaacatcgaggaagaccgcaaactactgattcaggcggccatcgtgagaatcatgaagatgaggaaggttctgaaacaccagcagttacttggcgaggtcctcactcagctgtcctccaggttcaaacctcgagtccctgtgatcaagaaatgcattgacattctaattgagaaagaatatttggagcgagtggatggtgaaaaggacacctacagttacttggcttaacccttctggaagggtctgactgtgtgacccgcagcaaatagttcatgttggaaagaatgaaaacaactcaagttcatagcagccagcctgccgccattggacctcccttttaaaaactgagaccaagactcccatcagctggtctcggatttacatcggaactgctcaggattgatacatttcaagtctgtaaatacggacaccaacgccatttaccctaatttaagaacagcggggactgaccctccgtgccgagggctgcatgctaccgcactaagtcaatacatgggctccccgattcgcagctgtcgtcttggcagcacttgtcacgttggcagcactttgagagcaagtctgagtggacccacatgtaacctgctatgaaaaccatttgtatagtgtgtttcattttttaatgtgtgaaaataaagaaaattaaaggatttctgtacaagtcgcattgggttttgttttaagttttactaatttctatatgtaaataaaagatataatgattgtgcaaatttaaaaaaa

SEQ ID NO: 428675 - DNA, 4551 bp, Homo sapiens
ggtaagattggagaagactggttagggaataggaagataagctgttgtctaaaaaacgcagtctccagtaaaaggaagaaattgggacatttttttaaaaccccacataggtacactggaaaacatgggccacagggataaaccttccatttttacttccaaccttaccatgtgctcacaaaaaaaggtgttaaatacatgtaagttttgacgaggttatttaaaagtgtaggatataaaccaagaatttttcacaccccaaaaccccgcacaaattaagggattacatatctgagtgacaagtacatacaaacgcattacttctagagatacttagatgtagataaaagaccacatttcaatagagggatcacacagaccagtgggatgtttcttctgagataacccactttatgcaggaaacagtgtggactctggggacggcctctgctctggctgaggatttctgtcccagagcggtacaggaatctgcgtagtgttttagtttggagaaaacaggaagttacactcatcacatcttttgcccagatgatagaattcgaaatccccccggggttgttcatggaatgagccgctctgttatgttgtgagccgtggtattaatcagccacccctcactaggtgttggggttccaccacgcttcctccaccccccgtcaccacagcagcgggtagtatttaggttgaatattccaaatagtcaattatgacagttaatttcaaatgagatgacttcgaagtacacgtgaaaacaatactattttatatcacgactcatgccatccgtatgtgtaatcaaagccttctaagtcttgatatgtccttacaaagacgaaggatagagtgaatgtcaaaatttgccaaacaggagttactgaaagtctgaaggggaaagcctagttaggttttatcttagaagtgatttttaaaacgaaacacgcagataagctcgagctttctggagccgattcctaaggccttgcaggtggtaagggggtcgagaattggctgaggttcctcggaagtccgcgccgattcggagggccacctctgactttctgatctggggtgcaacccccagtccctgtcccggtcgacaaaggtgtggagtcaggttccaggcaagctgggggtgggggtgcgcacaagggaggggcaggggactgggaccccctcttcttcggggtgcttcgggccgtttctccagaggctggtggtgtccccgacccaagcagctcagccccgctcgcgaggtccgaagtggcgggaacgggtcctccgcggcggtcccaaggcgagggaggctgtaaaacctggcagagaatccggcgcgccgggtcggggatgtctcgggtgccgggggcaggggccgcaggctcgcaggtagaagcttccccacgcgagcgggggcctcggccgcggcaggggcgcccccggggccgccggcagcggcgagcgggcgggagggagctttccgggcccctcccgcgcctcgggctggcggggcgatggcgacgacggtttcccggctcccccgccccggacgccgatggcggtttgcctgcaatgagatttcattctctacatttaaaggacatcctttctgagctgctgtgaataaatttggaatggtactgtatattttcatctaatggagaactagctgtactttgaataaggattgctgcactggacgactttagaacatccctcacaatgtcgtcaacccggagccagaacccccacggcctgaagcagattggcctggaccagatctgggacgacctcagagccggcatccagcaggtgtacacacggcagagcatggccaagtccagatatatggagctctacactcatgtttataactactgtactagtgttcaccagtcaaaccaagcacgaggagctggagttcctccttctaagtcgaaaaaggggcagacacctggaggagctcagtttgttggcctggaattatataaacgacttaaggaatttttgaagaattacttgacaaatcttcttaaggatggagaagatttgatggatgagagtgtactgaaattctacactcaacaatgggaagattatcgattttcaagcaaagtgctgaatggaatttgtgcctacctcaatagacattgggttcgccgtgaatgtgacgaaggacgaaaaggaatatatgaaatctattcggtaacaaatgctgttttaaagctgattgaaaaggaaaggaatggtgaaaccatcaatacaagattgattagtggagttgtacagtcttacgtggaattggggctgaatgaagatgatgcatttgcaaagggccctacgttaacagtgtataaagaatcctttgaatctcaatttttggctgacacagagagattttataccagagagagtactgaattcttgcagcagaacccagttactgaatatatgaaaaaggcagaggctcgtctgcttgaggaacaacgaagagttcaggtttaccttcatgaaagcacacaagatgaattagcaaggaaatgtgaacaagtcctcattgaaaaacacttggaaattttccacacagaatttcagaatttattggatgctgacaaaaatgaagatttgggacgcatgtataatcttgtatctagaatccaggatggcctaggagaattgaaaaaactgttggagacacacattcataatcagggtcttgcagccattgaaaagtgtggagaagctgctttaaatgaccccaaaatgtatgtacagacagtgcttgatgttcataaaaaatacaatgccctggtaatgtctgcattcaacaatgacgctggctttgtggctgctcttgataaggcttgtggtcgcttcataaacaacaacgcggttaccaagatggcccaatcatccagtaaatcccctgagttgctggctcgatactgtgactccttgttgaagaaaagttccaagaacccagaggaggcagaactagaagacacactcaatcaagtgatggttgtcttcaagtacatagaagacaaagacgtatttcagaagttctatgcgaagatgctcgccaagaggctcgtccaccagaacagtgcaagtgacgatgccgaagccagcatgatctccaagttaaagcaagcttgcgggttcgagtacacctctaaacttcagcgcatgtttcaagacattggcgtgagcaaagatctgaacgagcaattcaaaaagcacttgacaaactcagaacccctagacttggatttcagcattcaagtgctgagctccgggtcctggcccttccagcagtcttgtacatttgccttgccgtcagagttggaacgtagttatcagcgattcacagctttctacgccagccgccacagtggccgaaaattgacgtggttatatcagttgtctaaaggagaattggtaactaactgcttcaaaaacagatatactttgcaggcgtcgacattccagatggctatcctgcttcagtacaacacggaagatgcctacactgtgcagcagctgaccgacagcactcaaattaaaatggacattttggcgcaagttttacagattttattaaagtcgaagctattggtcttggaagatgaaaatgcaaatgttgatgaggtggaattgaagccagataccttaataaaattatatcttggttataaaaataagaaattaagggttaacatcaatgtgccaatgaaaaccgaacagaagcaggaacaagaaaccacacacaaaaacatcgaggaagaccgcaaactactgattcaggcggccatcgtgagaatcatgaagatgaggaaggttctgaaacaccagcagttacttggcgaggtcctcactcagctgtcctccaggttcaaacctcgagtccctgtgatcaagaaatgcattgacattctaattgagaaagaatatttggagcgagtggatggtgaaaaggacacctacagttacttggcttaacccttctggaagggtctgactgtgtgacccgcagcaaatagttcatgttggaaagaatgaaaacaactcaagttcatagcagccagcctgccgccattggacctcccttttaaaaactgagaccaagactcccatcagctggtctcggatttacatcggaactgctcaggattgatacatttcaagtctgtaaatacggacaccaacgccatttaccctaatttaagaacagcggggactgaccctccgtgccgagggctgcatgctaccgcactaagtcaatacatgggctccccgattcgcagctgtcgtcttggcagcacttgtcacgttggcagcactttgagagcaagtctgagtggacccacatgtaacctgctatgaaaaccatttgtatagtgtgtttcattttttaatgtgtgaaaataaagaaaattaaaggatttctgtacaagtcgcattgggttttgttttaagttttactaatttctatatgtaaataaaagatataatgattgtgcaaatttaaaaaaa

SEQ ID NO: 428676 - DNA, 2253 bp, Homo sapiens
ccaaagtggctgagccatcatgcccagccctcccttattttcttaatcgcattttattagagctggcatgtgaatttaatttgccatttttcagtttcctttaatttacatattaaagaattgtaacagttctttaccaatgaatcaaaaccattcacttgaattaattttctccaggcagaggctcgtctgcttgaggaacaacgaagagttcaggtttaccttcatgaaagcacacaagatgaattagcaaggaaatgtgaacaagtcctcattgaaaaacacttggaaattttccacacagaatttcagaatttattggatgctgacaaaaatgaagatttgggacgcatgtataatcttgtatctagaatccaggatggcctaggagaattgaaaaaactgttggagacacacattcataatcagggtcttgcagccattgaaaagtgtggagaagctgctttaaatgaccccaaaatgtatgtacagacagtgcttgatgttcataaaaaatacaatgccctggtaatgtctgcattcaacaatgacgctggctttgtggctgctcttgataaggcttgtggtcgcttcataaacaacaacgcggttaccaagatggcccaatcatccagtaaatcccctgagttgctggctcgatactgtgactccttgttgaagaaaagttccaagaacccagaggaggcagaactagaagacacactcaatcaagtgatggttgtcttcaagtacatagaagacaaagacgtatttcagaagttctatgcgaagatgctcgccaagaggctcgtccaccagaacagtgcaagtgacgatgccgaagccagcatgatctccaagttaaagcaagcttgcgggttcgagtacacctctaaacttcagcgcatgtttcaagacattggcgtgagcaaagatctgaacgagcaattcaaaaagcacttgacaaactcagaacccctagacttggatttcagcattcaagtgctgagctccgggtcctggcccttccagcagtcttgtacatttgccttgccgtcagagttggaacgtagttatcagcgattcacagctttctacgccagccgccacagtggccgaaaattgacgtggttatatcagttgtctaaaggagaattggtaactaactgcttcaaaaacagatatactttgcaggcgtcgacattccagatggctatcctgcttcagtacaacacggaagatgcctacactgtgcagcagctgaccgacagcactcaaattaaaatggacattttggcgcaagttttacagattttattaaagtcgaagctattggtcttggaagatgaaaatgcaaatgttgatgaggtggaattgaagccagataccttaataaaattatatcttggttataaaaataagaaattaagggttaacatcaatgtgccaatgaaaaccgaacagaagcaggaacaagaaaccacacacaaaaacatcgaggaagaccgcaaactactgattcaggcggccatcgtgagaatcatgaagatgaggaaggttctgaaacaccagcagttacttggcgaggtcctcactcagctgtcctccaggttcaaacctcgagtccctgtgatcaagaaatgcattgacattctaattgagaaagaatatttggagcgagtggatggtgaaaaggacacctacagttacttggcttaacccttctggaagggtctgactgtgtgacccgcagcaaatagttcatgttggaaagaatgaaaacaactcaagttcatagcagccagcctgccgccattggacctcccttttaaaaactgagaccaagactcccatcagctggtctcggatttacatcggaactgctcaggattgatacatttcaagtctgtaaatacggacaccaacgccatttaccctaatttaagaacagcggggactgaccctccgtgccgagggctgcatgctaccgcactaagtcaatacatgggctccccgattcgcagctgtcgtcttggcagcacttgtcacgttggcagcactttgagagcaagtctgagtggacccacatgtaacctgctatgaaaaccatttgtatagtgtgtttcattttttaatgtgtgaaaataaagaaaattaaaggatttctgtacaagtcgcattgggttttgttttaagttttactaatttctatatgtaaataaaagatataatgattgtgcaaatttaaaaaaa

SEQ ID NO: 428677 - DNA, 3305 bp, Homo sapiens
ggcggcggcggcgggaggaggagggccgggcgggcaggggaggaggaggaggcgggcgccgtgtcgcacgcagctccaggcggggcagccccggtagctgagggacgcagctagaccttggcgggacggggctttcgccggggcccaggcccagggaccaggcggaggcgtcgcgggagcctttggggcaccacagagatgcgggtttgcctgcaatgagatttcattctctacatttaaaggacatcctttctgagctgctgtgaataaatttggaatggtactgtatattttcatctaatggagaactagctgtactttgaataaggattgctgcactggacgactttagaacatccctcacaatgtcgtcaacccggagccagaacccccacggcctgaagcagattggcctggaccagatctgggacgacctcagagccggcatccagcaggtgtacacacggcagagcatggccaagtccagatatatggagctctacactcatgtttataactactgtactagtgttcaccagtcaaaccaagcacgaggagctggagttcctccttctaagtcgaaaaaggggcagacacctggaggagctcagtttgttggcctggaattatataaacgacttaaggaatttttgaagaattacttgacaaatcttcttaaggatggagaagatttgatggatgagagtgtactgaaattctacactcaacaatgggaagattatcgattttcaagcaaagtgctgaatggaatttgtgcctacctcaatagacattgggttcgccgtgaatgtgacgaaggacgaaaaggaatatatgaaatctattcgcttgcattggtgacttggagagactgtctgttcaggccactgaataaacaggtaacaaatgctgttttaaagctgattgaaaaggaaaggaatggtgaaaccatcaatacaagattgattagtggagttgtacagtcttacgtggaattggggctgaatgaagatgatgcatttgcaaagggccctacgttaacagtgtataaagaatcctttgaatctcaatttttggctgacacagagagattttataccagagagagtactgaattcttgcagcagaacccagttactgaatatatgaaaaaggcagaggctcgtctgcttgaggaacaacgaagagttcaggtttaccttcatgaaagcacacaagatgaattagcaaggaaatgtgaacaagtcctcattgaaaaacacttggaaattttccacacagaatttcagaatttattggatgctgacaaaaatgaagatttgggacgcatgtataatcttgtatctagaatccaggatggcctaggagaattgaaaaaactgttggagacacacattcataatcagggtcttgcagccattgaaaagtgtggagaagctgctttaaatgaccccaaaatgtatgtacagacagtgcttgatgttcataaaaaatacaatgccctggtaatgtctgcattcaacaatgacgctggctttgtggctgctcttgataaggcttgtggtcgcttcataaacaacaacgcggttaccaagatggcccaatcatccagtaaatcccctgagttgctggctcgatactgtgactccttgttgaagaaaagttccaagaacccagaggaggcagaactagaagacacactcaatcaagtgatggttgtcttcaagtacatagaagacaaagacgtatttcagaagttctatgcgaagatgctcgccaagaggctcgtccaccagaacagtgcaagtgacgatgccgaagccagcatgatctccaagttaaagcaagcttgcgggttcgagtacacctctaaacttcagcgcatgtttcaagacattggcgtgagcaaagatctgaacgagcaattcaaaaagcacttgacaaactcagaacccctagacttggatttcagcattcaagtgctgagctccgggtcctggcccttccagcagtcttgtacatttgccttgccgtcagagttggaacgtagttatcagcgattcacagctttctacgccagccgccacagtggccgaaaattgacgtggttatatcagttgtctaaaggagaattggtaactaactgcttcaaaaacagatatactttgcaggtaagatcacatttttatcttaaaatttttctattctaaatgaacataaggcaaattatggaaatcattatcagctgactcagcagcagaatctagaattcagcttctggtgaaatagtggcaggtttaaagcatggagttgtaagaatcagatgaaccaaattccaattctttctggctggggagcaagttatttaatgattgtgagcctcagttttctcctccattaatgggagtgttagtactttatagttgggaattgatgtgaaaattaaataatgtatttagtaagtgtttggcaccgctcctgcctgacacacatcagctgttcaggtagtgacttcaaaagctggagttgcatgcatttcattatatcagctctccaccttacacagagcactttcacattaataacactcagtgctgacaacaatattgagtacaacctaatttatacctatgtaactaagaatatttccatttcttagaggagaaaactgaggcttgggttaatttaagtgaatttctctgaatcctagcttatatgtagctgagccaaaatttcagttaaagtcttttctcttaaagtctaggcttgggctggtgtggtggctcacgcttgtaatcctcacgctttgggaggctgagaccagagaatcacttgaggctaggagtttgagacaagcctggacaacatagcaagaccccatctctagatattttttaaagtaaaaagaaaaaaaagtccaagctctttctacttccacttttgtactgagtggtcttcacaagtaatggcatattttagtctctgagaagttttcaccagtgagtttctaagaagaattgcaaatctgtgtttaagtattaagaaactccagaatgggttgttctgcagactcaagctgctcattaatttaaacttttcgtaaatctactgtgacttaaaattgttaaaatgcatagtattatgctggctccagaggtctttatcaacttgaatgtttcttactatacaattgaaattttgtttcatttatccccaaatatacatagaagaatccatgtgttccactacagtacctggaatttcagtgtccagtttttgacggtggaggctttgcctagggtgtg

SEQ ID NO: 428678 - DNA, 1312 bp, Homo sapiens
gattgtctctataaatgcgtggggacgtatctatagtatgtatccacatagacaatacgttttttaaaaatgttgcattgtagtggcattgccacgttttatattcccttttaaatagatctgtgctttttttgtacttgtttaaagaatttgtttcataaataagttcttcaaacttgggctgtatattttgggaggtgtttccatgcatgtaaattttccttctttttcttttatatggggggccgcaaaggcgtcgacattccagatggctatcctgcttcagtacaacacggaagatgcctacactgtgcagcagctgaccgacagcactcaaattaaaatggacattttggcgcaagttttacagattttattaaagtcgaagctattggtcttggaagatgaaaatgcaaatgttgatgaggtggaattgaagccagataccttaataaaattatatcttggttataaaaataagaaattaagggttaacatcaatgtgccaatgaaaaccgaacagaagcaggaacaagaaaccacacacaaaaacatcgaggaagaccgcaaactactgattcaggcggccatcgtgagaatcatgaagatgaggaaggttctgaaacaccagcagttacttggcgaggtcctcactcagctgtcctccaggttcaaacctcgagtccctgtgatcaagaaatgcattgacattctaattgagaaagaatatttggagcgagtggatggtgaaaaggacacctacagttacttggcttaacccttctggaagggtctgactgtgtgacccgcagcaaatagttcatgttggaaagaatgaaaacaactcaagttcatagcagccagcctgccgccattggacctcccttttaaaaactgagaccaagactcccatcagctggtctcggatttacatcggaactgctcaggattgatacatttcaagtctgtaaatacggacaccaacgccatttaccctaatttaagaacagcggggactgaccctccgtgccgagggctgcatgctaccgcactaagtcaatacatgggctccccgattcgcagctgtcgtcttggcagcacttgtcacgttggcagcactttgagagcaagtctgagtggacccacatgtaacctgctatgaaaaccatttgtatagtgtgtttcattttttaatgtgtgaaaataaagaaaattaaaggatttctgtacaagtcgcattgggttttgttttaagttttactaatttctatatgtaaataaaagatataatgattgtgcaaatttaaaaaaa

SEQ ID NO: 428679 - DNA, 2163 bp, Homo sapiens
ggcggcggcggcgggaggaggagggccgggcgggcaggggaggaggaggaggcgggcgccgtgtcgcacgcagctccaggcggggcagccccggtagctgagggacgcagctagaccttggcgggacggggctttcgccggggcccaggcccagggaccaggcggaggcgtcgcgggagcctttggggcaccacagagatgcgggtttgcctgcaatgagatttcattctctacatttaaaggacatcctttctgagctgctgtgaataaatttggaatggtactgtatattttcatctaatggagaactagctgtactttgaataaggattgctgcactggacgactttagaacatccctcacaatgtcgtcaacccggagccagaacccccacggcctgaagcagattggcctggaccagatctgggacgacctcagagccggcatccagcaggtgtacacacggcagagcatggccaagtccagatatatggagctctacactcatgtttataactactgtactagtgttcaccagtcaaaccaagcacgaggagctggagttcctccttctaagtcgaaaaaggggcagacacctggaggagctcagtttgttggcctggaattatataaacgacttaaggaatttttgaagaattacttgacaaatcttcttaaggatggagaagatttgatggatgagagtgtactgaaattctacactcaacaatgggaagattatcgattttcaagcaaagtgctgaatggaatttgtgcctacctcaatagacattgggttcgccgtgaatgtgacgaaggacgaaaaggaatatatgaaatctattcgcttgcattggtgacttggagagactgtctgttcaggccactgaataaacaggtaacaaatgctgttttaaagctgattgaaaaggaaaggaatggtgaaaccatcaatacaagattgattagtggagttgtacagtcttacgtggaattggggctgaatgaagatgatgcatttgcaaagggccctacgttaacagtgtataaagaatcctttgaatctcaatttttggctgacacagagagattttataccagagagagtactgaattcttgcagcagaacccagttactgaatatatgaaaaaggcagaggctcgtctgcttgaggaacaacgaagagttcaggtttaccttcatgaaagcacacaagatgaattagcaaggaaatgtgaacaagtcctcattgaaaaacacttggaaattttccacacagaatttcagaatttattggatgctgacaaaaatgaagatttgggacgcatgtataatcttgtatctagaatccaggatggcctaggagaattgaaaaaactgttggagacacacattcataatcagggtcttgcagccattgaaaagtgtggagaagctgctttaaatgaccccaaaatgtatgtacagacagtgcttgatgttcataaaaaatacaatgccctggtaatgtctgcattcaacaatgacgctggctttgtggctgctcttgataaggcttgtggtcgcttcataaacaacaacgcggttaccaagatggcccaatcatccagtaaatcccctgagttgctggctcgatactgtgactccttgttgaagaaaagttccaagaacccagaggaggcagaactagaagacacactcaatcaagtggtaagtgcttcatgagcatacccatttccagtagctgtgtatttcacaagctgtttgtaatgttatttgtagatggcctctgaaatgtgaaaagtaataatcattgattttattttgaatctctggttttacttcctaaattgagttactacttttagcattcatacttttctcattaatactcagtcagtccaactcactgaattaagggactcacaaaactttcaagactctggagtggagattttgccatcataaacgttggcgtacagacctgcccaaagccaaaggcacatcttggctcctggcttgtggccggtgacagtcagctctgcactgttggcttgtgtgtgtgctggttaagtgtgttgtctcggtggctttgccagtagaacttctgaaatacgtctttgtcttctatatacttgaagacaaccatctggcagagcca

SEQ ID NO: 428680 - DNA, 2232 bp, Homo sapiens
  misc_feature (2055)..(2055): n is a, c, g, or t
gcccgggctggcgccgctgggcagagccggtgcgacgtttccctttccagctttgttcttccggccctgctgtctgcctccccggctgattggattcgttactgctttgcaacgcgcacctaactccagacggggtctcactctgtcgcccaggctggagtgcagtggcacaatctcagcttgctgtgacctcagctctctgcgacctctgcttgctggactcaagcgatcctcccaccacctcagcctcctgagtagctggaaccatcatatgcaccagcacgcctggctaagctggaatgcaatagcgtggtcttggctcactgcaacctccgcctcccgggttcaagcaattctcctgcctcagcctcctaagtagctgggactacaggggccctcctgctgctccctccatgaggctggtcctgaaggaataggcctgtggctcgtccctcctccccatctcggccctgaggcaaacataccttccacagctctgggagcaccgcctccacccaggtctcacaggatgggacacaaggataggcattaagcaggacttccagggcccgagggaagttggcgcagtgtttcagcatctaggggtcaaaagagggtcttgggcacatgcctcccccacccgagggcagacccaagtcttgcctcacccacatggccaatcctagcctaatctggggggctaaggtctgagtctctcttcccttttttgtgcctctgtctaccccaccctcaagtatgctccaaccttttggccccagttttcctctggggctcttccctcccttggactctctctcccagaatcctctctccccctcccaagctggggacagccccctggccactgagggcaggctttcagtctcttggaccctctgtcttccccagaagcggagcagttccagccgcgggctcccccacacaggagcctcctatgtcagggcctcccagcgcacctcagggcgcactggctgcgccccgtagtccagcagtgcggcgaaaaggacttcaggctcccagttgggggcgtcctggacggcctgcagcgcacagtccatgggcgtgtggcccgccccattggggacctcagcgcgggccccgtaacgcagcagcagctcggccaggcccccgcagccgctggcacaagcgttgtgcagcggcgtgtggcgcttgcgcccggccgcccgggcatcagctccagcctccaggagccggcgcgccgcagcctggtgtcgcctgcagctacctgggccctcggccccagcgcacgccgcgttcagcgcagtctcgccctggctggtgcgcaggcccacgtcggcgccatgctccaggtacagagccacatgttgctccaggccgcgcgccgccgccacgtgcaggggcgtctcctggctctcgcctgctgccaggttcaccgtcgctcctgcttccagcagcaacttggcgcacctggggacaagagagcaaggtcctgaggaaaatcctgaaggcttgggaccccttcagcttgctgtgacactcccttgcctttccacccctctcagcttgaggtcctacctggtgtcctccatgagaatcatacaagccccgctacagacaacagaattggaaggtcctgagagctaccagaagcatcttcagttttcatatgaaaaacttaagcccaggagtgatttgtgcagccaaggacacacagcaagttagtggctgcaccagaaatagtactcactgcctcagacagtccctcccacagtctactctgtctccaccccaaggtctggttctgaatcattcagttgtcagttgtctccttttttttttttttttggagacagggtctctctctgtggcccaggctgaagtgcagtggtgtgattacagctcatgtagcctggacctcccaagctcaagcaatcctcctgcctctgcctcccaagtagctgggaccacaggtgggcagcaccacacctggctaattttttaaatttttttttatagagacagggtcttaccatttgccccagctggtctcanacccctgggctcaagcaagcctcctgccttggcctcccaaagtgctgggattacaggtgtgagccaccacacccggccttatctcctaacattttgatagcacaaaattttgaaaacccacttctgtgtacgttatgaagcatagaaaattaaacagtatgcaccaaaaaaaaataa

SEQ ID NO: 428681 - DNA, 894 bp, Homo sapiens
  misc_feature (717)..(717): n is a, c, g, or t
gcccgggctggcgccgctgggcagagccggtgcgacgtttccctttccagctttgttcttccggccctgctgtctgcctccccggctgattggattcgttactgctttgcaacgcgcacctaactccaggctggaatgcaatagcgtggtcttggctcactgcaacctccgcctcccgggttcaagcaattctcctgcctcagcctcctaagtagctgggactacagcttgaggtcctacctggtgtcctccatgagaatcatacaagccccgctacagacaacagaattggaaggtcctgagagctaccagaagcatcttcagttttcatatgaaaaacttaagcccaggagtgatttgtgcagccaaggacacacagcaagttagtggctgcaccagaaatagtactcactgcctcagacagtccctcccacagtctactctgtctccaccccaaggtctggttctgaatcattcagttgtcagttgtctccttttttttttttttttggagacagggtctctctctgtggcccaggctgaagtgcagtggtgtgattacagctcatgtagcctggacctcccaagctcaagcaatcctcctgcctctgcctcccaagtagctgggaccacaggtgggcagcaccacacctggctaattttttaaatttttttttatagagacagggtcttaccatttgccccagctggtctcanacccctgggctcaagcaagcctcctgccttggcctcccaaagtgctgggattacaggtgtgagccaccacacccggccttatctcctaacattttgatagcacaaaattttgaaaacccacttctgtgtacgttatgaagcatagaaaattaaacagtatgcaccaaaaaaaaataa

SEQ ID NO: 428682 - DNA, 2766 bp, Homo sapiens
  misc_feature (2589)..(2589): n is a, c, g, or t
tgatcctcctgcctcagcctcccttgtaggtgggactacacggcacctggcccttgtgttgttcttgtaacagttgctcaatgcagaaaacttggaaaccacagaacagcaccagggggtggggaatgaacatggaatgatggggacctctgtcccatttaagtcaaacaacatccatactttggttccatggactaatcatttatttgcactcataaaaactggcttgctttgaaaagcttcctccaaaagctgtattgtggtacttttgactctgggacaagaggaagaagttggggaattcgggcagttggtggctgggccctcagagactgtatgtggtgaccactgtttaagacaccattcatcacttggggacggagggagcacatagatggaccccaggctcatggatgttcctccttccgcagtcatttactaaaatacctgttcaaggaatatagttccagtctcagcctagttgagacaaccacaggcacttaaataagtaccaaggaagcctctgcagagatagtgctattggaactgagtcctgagggccagatcagccttgaccaggccaaaaaatgtggaagagtattccaagcggtaggaataacacatgcaaacacctgaaagcaaagaggagcaggtcacatccagcaactggtgacttgtttactaaggctggagatgaaccttggaaggaagaagggaagtcaagaggccagataatttggcagaggctagaggctctgttctactgagttgttttctcgtttgttttgttttgttttttgagacagagttttgctcttgtcacccaggctggaatgcaatagcgtggtcttggctcactgcaacctccgcctcccgggttcaagcaattctcctgcctcagcctcctaagtagctgggactacaggggccctcctgctgctccctccatgaggctggtcctgaaggaataggcctgtggctcgtccctcctccccatctcggccctgaggcaaacataccttccacagctctgggagcaccgcctccacccaggtctcacaggatgggacacaaggataggcattaagcaggacttccagggcccgagggaagttggcgcagtgtttcagcatctaggggtcaaaagagggtcttgggcacatgcctcccccacccgagggcagacccaagtcttgcctcacccacatggccaatcctagcctaatctggggggctaaggtctgagtctctcttcccttttttgtgcctctgtctaccccaccctcaagtatgctccaaccttttggccccagttttcctctggggctcttccctcccttggactctctctcccagaatcctctctccccctcccaagctggggacagccccctggccactgagggcaggctttcagtctcttggaccctctgtcttccccagaagcggagcagttccagccgcgggctcccccacacaggagcctcctatgtcagggcctcccagcgcacctcagggcgcactggctgcgccccgtagtccagcagtgcggcgaaaaggacttcaggctcccagttgggggcgtcctggacggcctgcagcgcacagtccatgggcgtgtggcccgccccattggggacctcagcgcgggccccgtaacgcagcagcagctcggccaggcccccgcagccgctggcacaagcgttgtgcagcggcgtgtggcgcttgcgcccggccgcccgggcatcagctccagcctccaggagccggcgcgccgcagcctggtgtcgcctgcagctacctgggccctcggccccagcgcacgccgcgttcagcgcagtctcgccctggctggtgcgcaggcccacgtcggcgccatgctccaggtacagagccacatgttgctccaggccgcgcgccgccgccacgtgcaggggcgtctcctggctctcgcctgctgccaggttcaccgtcgctcctgcttccagcagcaacttggcgcacctggggacaagagagcaaggtcctgaggaaaatcctgaaggcttgggaccccttcagcttgctgtgacactcccttgcctttccacccctctcagcttgaggtcctacctggtgtcctccatgagaatcatacaagccccgctacagacaacagaattggaaggtcctgagagctaccagaagcatcttcagttttcatatgaaaaacttaagcccaggagtgatttgtgcagccaaggacacacagcaagttagtggctgcaccagaaatagtactcactgcctcagacagtccctcccacagtctactctgtctccaccccaaggtctggttctgaatcattcagttgtcagttgtctccttttttttttttttttggagacagggtctctctctgtggcccaggctgaagtgcagtggtgtgattacagctcatgtagcctggacctcccaagctcaagcaatcctcctgcctctgcctcccaagtagctgggaccacaggtgggcagcaccacacctggctaattttttaaatttttttttatagagacagggtcttaccatttgccccagctggtctcanacccctgggctcaagcaagcctcctgccttggcctcccaaagtgctgggattacaggtgtgagccaccacacccggccttatctcctaacattttgatagcacaaaattttgaaaacccacttctgtgtacgttatgaagcatagaaaattaaacagtatgcaccaaaaaaaaataa

SEQ ID NO: 428683 - DNA, 2068 bp, Homo sapiens
  misc_feature (1891)..(1891): n is a, c, g, or t
gcccgggctggcgccgctgggcagagccggtgcgacgtttccctttccagctttgttcttccggccctgctgtctgcctccccggctgattggattcgttactgctttgcaacgcgcacctaactccaggctggaatgcaatagcgtggtcttggctcactgcaacctccgcctcccgggttcaagcaattctcctgcctcagcctcctaagtagctgggactacaggggccctcctgctgctccctccatgaggctggtcctgaaggaataggcctgtggctcgtccctcctccccatctcggccctgaggcaaacataccttccacagctctgggagcaccgcctccacccaggtctcacaggatgggacacaaggataggcattaagcaggacttccagggcccgagggaagttggcgcagtgtttcagcatctaggggtcaaaagagggtcttgggcacatgcctcccccacccgagggcagacccaagtcttgcctcacccacatggccaatcctagcctaatctggggggctaaggtctgagtctctcttcccttttttgtgcctctgtctaccccaccctcaagtatgctccaaccttttggccccagttttcctctggggctcttccctcccttggactctctctcccagaatcctctctccccctcccaagctggggacagccccctggccactgagggcaggctttcagtctcttggaccctctgtcttccccagaagcggagcagttccagccgcgggctcccccacacaggagcctcctatgtcagggcctcccagcgcacctcagggcgcactggctgcgccccgtagtccagcagtgcggcgaaaaggacttcaggctcccagttgggggcgtcctggacggcctgcagcgcacagtccatgggcgtgtggcccgccccattggggacctcagcgcgggccccgtaacgcagcagcagctcggccaggcccccgcagccgctggcacaagcgttgtgcagcggcgtgtggcgcttgcgcccggccgcccgggcatcagctccagcctccaggagccggcgcgccgcagcctggtgtcgcctgcagctacctgggccctcggccccagcgcacgccgcgttcagcgcagtctcgccctggctggtgcgcaggcccacgtcggcgccatgctccaggtacagagccacatgttgctccaggccgcgcgccgccgccacgtgcaggggcgtctcctggctctcgcctgctgccaggttcaccgtcgctcctgcttccagcagcaacttggcgcacctggggacaagagagcaaggtcctgaggaaaatcctgaaggcttgggaccccttcagcttgctgtgacactcccttgcctttccacccctctcagcttgaggtcctacctggtgtcctccatgagaatcatacaagccccgctacagacaacagaattggaaggtcctgagagctaccagaagcatcttcagttttcatatgaaaaacttaagcccaggagtgatttgtgcagccaaggacacacagcaagttagtggctgcaccagaaatagtactcactgcctcagacagtccctcccacagtctactctgtctccaccccaaggtctggttctgaatcattcagttgtcagttgtctccttttttttttttttttggagacagggtctctctctgtggcccaggctgaagtgcagtggtgtgattacagctcatgtagcctggacctcccaagctcaagcaatcctcctgcctctgcctcccaagtagctgggaccacaggtgggcagcaccacacctggctaattttttaaatttttttttatagagacagggtcttaccatttgccccagctggtctcanacccctgggctcaagcaagcctcctgccttggcctcccaaagtgctgggattacaggtgtgagccaccacacccggccttatctcctaacattttgatagcacaaaattttgaaaacccacttctgtgtacgttatgaagcatagaaaattaaacagtatgcaccaaaaaaaaataa

SEQ ID NO: 428684 - DNA, 962 bp, Homo sapiens
ggcctgaccgctcttcccggcatgtattgttcgggacgaggcgagtcgggcgccaagcgcggggccggagcggccttcccggagtcctttgcgcggcacctggcgacaaaatggctgcccgagggagacgggcggagcctcagggccgggaggctccgggccccgcgggcggtggcggtggcgggagccgttgggctgagtcgggatcggggacgtcgcccgagagcggggacgaggaggtgtcgggcgcgggttcgagcccggtgtcgggcggcgtgaacttgttcgccaacgacggcagcttcctggagctgttcaagcggaagatggaggaggagcagcggcagcggcaggaggagccgcccccgggtccgcagcgacccgaccagtcggccgccgccgctggccccggggatccgaagaggaagggcggtccgggctccacacttagcttcgtgggcaaacgcagaggcgggaacaaactagccctcaagacgggaatagtagccaagaagcagaagacggaggatgaggtattaacaagtaaaggtgacgcgtgggccaagtacatggcagaagtgaaaaagtacaaagctcaccagtgcggtgacgatgataaaactcggcccctggtgaaatgacgcccctcccccacctgcccatggcctgggactctctgcgatgtacataactatttaatgcagcggcagcggcgacagccttccctgagaggacttaaaagcagaaggaaaccgagatgcttcccgcagccgtggacgattctccaggactctttttttaccttgagcacttgcctcgtgagacttcatagaacagtggtttactgtcccccccttctcacctcctcattctctctggctctttctgtcttcctcttctcaccctcctccctccccttagccatcacttctgggaagtaaagaacttgacttagtgccgga

SEQ ID NO: 428685 - DNA, 1561 bp, Homo sapiens
  misc_feature (177)..(177): n is a, c, g, or t
  misc_feature (187)..(187): n is a, c, g, or t
  misc_feature (189)..(191): n is a, c, g, or t
  misc_feature (200)..(200): n is a, c, g, or t
  misc_feature (213)..(213): n is a, c, g, or t
  misc_feature (220)..(223): n is a, c, g, or t
  misc_feature (225)..(225): n is a, c, g, or t
  misc_feature (228)..(228): n is a, c, g, or t
  misc_feature (241)..(241): n is a, c, g, or t
  misc_feature (245)..(246): n is a, c, g, or t
  misc_feature (251)..(251): n is a, c, g, or t
  misc_feature (263)..(263): n is a, c, g, or t
  misc_feature (269)..(269): n is a, c, g, or t
  misc_feature (283)..(285): n is a, c, g, or t
  misc_feature (289)..(289): n is a, c, g, or t
  misc_feature (308)..(308): n is a, c, g, or t
  misc_feature (313)..(313): n is a, c, g, or t
  misc_feature (317)..(317): n is a, c, g, or t
  misc_feature (324)..(324): n is a, c, g, or t
  misc_feature (327)..(327): n is a, c, g, or t
  misc_feature (349)..(350): n is a, c, g, or t
  misc_feature (377)..(377): n is a, c, g, or t
  misc_feature (381)..(381): n is a, c, g, or t
  misc_feature (387)..(387): n is a, c, g, or t
  misc_feature (392)..(392): n is a, c, g, or t
tagagacagtgtctcactctgtctcccaggctagagtacagtgtgcaatcatagctcactgcagccttgaactcctggcctcaagcaatcctcccaccttggcttcccaatgtgctaggtttacaggcgtgaaaacattgtgttgtgtgtgtgtgtgtttttttttttttttttttnagacagagtntnnntcttgttgnccaggctggagtncaatggnnnnanctnggctcactgcaanctcnncctcncaggttcaagcnattctnctgcctcagcctcnnnagtngctgggattacaggcgccnaccancacncccggcnaantttttgtatttttagtagaganngggtttcaccatgttggccaggctggnctcnaactcntgacntcaggtgatctacccgattctacctcccaaagtgctgggattacaggcctgagccaccgcgcctggtcaaaaacatttaaaaaatgactgtccctgctcaaatactgcagtaggaaatgtaatttgacatatatcacttccagaaaaaaactttaaatctttctataaaatgaatttgatacatcatcagcatgaagtgaagttaaaatctcttacaaagtaaattcaggtatatcaacaatgagatccaaaagtatcggttcaagatcaaagactcatatgaggtaaaggcaaataaagcccctcatgctttcagacatttacttgttatccttaaaatgattattgttctaaggtgcaaatcttatcattcagtgacctatttgctatttggctgtttatctcctttaaataaaataccatacaggttataatgtacattttaaaatcaaatatgaaagtacacatatgtgaacaagacattaatttaaatatcaattatattcataatacagaagtctaagaatgctatttggtcatttcaattagatgctgatatatttggtcaagaaaacccacattcctatcagcctaaggcaaatagtaaatgcctctatttttattaagtggactataaacagtagacattattgtttgatactactggaatgctctcaattagaacgtacactgataacaaatatgtctttctaatctgggtgataacctcaatgattacatggaaatctacaagtaacagtctataacttaaagcagtagagcacctggtaattgtcatacagtgcctctctatgaatttagaacattctacttacattggcagtggagagaaaagaccccttcacactgagacttcctgtgcaccgcgcctgccgcctgcctcagcttaggacatggtacagtcttctttgcttttgcccttctcattccctcctctggtatcttctctgctttctggattgaagtgccctggctctcttcctggtgccgacaagtcattgttctctaggctattgctgtctaaagctttcctgacggtctgacttggatgttctgacatctcacatctttctgtcttcctcttctcaccctcctccctccccttagccatcacttctgggaagtaaagaacttgacttagtgccgga

SEQ ID NO: 428686 - DNA, 360 bp, Homo sapiens
gcggccgcctactactactactactgctcgaattcaagcttctaacgatgtacggggccatggcctgggactctctgcgatgtacataactatttaatgcagcggcagcggcgacagccttccctgagaggacttaaaagcagaaggaaaccgagatgcttcccgcagccgtggacgattctccaggactctttttttaccttgagcacttgcctcgtgagacttcatagaacagtggtttactgtcccccccttctcacctcctcattctctctggctctttctgtcttcctcttctcaccctcctccctccccttagccatcacttctgggaagtaaagaacttgacttagtgccgga

SEQ ID NO: 428687 - DNA, 1528 bp, Homo sapiens
  misc_feature (1006)..(1006): n is a, c, g, or t
ggcctgaccgctcttcccggcatgtattgttcgggacgaggcgagtcgggcgccaagcgcggggccggagcggccttcccggagtcctttgcgcggcacctggcgacaaaatggctgcccgagggagacgggcggagcctcagggccgggaggctccgggccccgcgggcggtggcggtggcgggagccgttgggctgagtcgggatcggggacgtcgcccgagagcggggacgaggaggtgtcgggcgcgggttcgagcccggtgtcgggcggcgtgaacttgttcgccaacgacggcagcttcctggagctgttcaagcggaagatggaggaggagcagcggcagcggcaggaggagccgcccccgggtccgcagcgacccgaccagtcggccgccgccgctggccccggggatccgaagaggaagggcggtccgggctccacacttagcttcgtgggcaaacgcagaggcgggaacaaactagccctcaagacgggaatagtagccaagaagcagaagacggaggatgaggtattaacaagtaaaggtgacgcgtgggccaagtacatggcagaagtgaaaaagtacaaagctcaccagtgcggtgacgatgataaaactcggcccctggtgaaatgacgcccctcccccacctgcccatggcctgggactctctgcgatgtacataactatttaatgcagcggcagcggcgacagccttccctgagaggacttaaaagcagaaggaaaccgagatgcttcccgcagccgtggacgattctccaggactctttttttaccttgagcacttgcctcgtgagacttcatagaacagtggtttactgtcccccccttctcacctcctcattctctctggctctttctgtcttcctcttctcaccctcctccctccccttagccatcacttctgggaagtaaagaacttgacttagtgccggaaaaaaaaaaaaaaaaaaaaaaaaaaaaaaaaaaaaaaaaaaaanaaaaaaaaaaaaataaaataataaaagaaaggggggggagcgataataaataatcaccacgggggggcgcccatatatatagaggacacacaggtttttgtatagaaagggggggcacacaataggggcaggcataatataaagagacagagggagcaggggcagatgtatacagcagttgtgggagggagggaagaacaaaaggtgtgagtaagggggggagaaacctattgtgaagaaaaaagaaacacctaaaatatgtgagaggggggggggaaaaaaaaatatgtggtgaagagaacaaatctatctatgctgatgaggagacaatattaaaggagcgcttcgataggcggagtacaaatctatacaacatcgatttaggacgatgttacaatagtagtgtcgtgtgaaacacagccagtagtgtaattaatgtagtgtgcagcgagcagcagaaaaaaatattgtgtgacacaaagcgagggaattgatactatatagagacgaaaatatatagcg

SEQ ID NO: 428688 - DNA, 1503 bp, Homo sapiens
  misc_feature (981)..(981): n is a, c, g, or t
ggcctgaccgctcttcccggcatgtattgttcgggacgaggcgagtcgggcgccaagcgcggggccggagcggccttcccggagtcctttgcgcggcacctggcgacaaaatggctgcccgagggagacgggcggagcctcagggccgggaggctccgggccccgcgggcggtggcggtggcgggagccgttgggctgagtcgggatcggggacgtcgcccgagagcggggacgaggaggtgtcgggcgcgggttcgagcccggtgtcgggcggcgtgaacttgttcgccaacgacggcagcttcctggagctgttcaagcggaagatggaggaggagcagcggcagcggcaggaggagccgcccccgggtccgcagcgacccgaccagtcggccgccgccgctggccccggggatccgaagaggaagggcggtccgggctccacacttagcttcgtgggcaaacgcagaggcgggaacaaactagccctcaagacgggaatagtagccaagaagcagaagacggaggatgaggtattaacaagtaaaggtgacgcgtgggccaagtacatggcagaagtgaaaaagtacaaagctcaccagtgcggtgacgatgataaaactcggcccctggtgaaatgacgcccctcccccacctgcccatggcctgggactctctgcgatgtacataactatttaatgcagcggcagcggcgacagccttccctgagaggacttaaaagcagaaggaaaccgagatgcttcccgcagccgtggacgattctccaggactctttttttaccttgagcacttgcctcgtgagacttcatagaacagtggtttactgtcccccccttctcacctcctcattctctctggctctttctgtcttcctcttctcaccctcctccctccccttagccatcacttctgggaagtaaagaacttgacttagtgccggaaaaaaaaaaaaaaaaaaanaaaaaaaaaaaaataaaataataaaagaaaggggggggagcgataataaataatcaccacgggggggcgcccatatatatagaggacacacaggtttttgtatagaaagggggggcacacaataggggcaggcataatataaagagacagagggagcaggggcagatgtatacagcagttgtgggagggagggaagaacaaaaggtgtgagtaagggggggagaaacctattgtgaagaaaaaagaaacacctaaaatatgtgagaggggggggggaaaaaaaaatatgtggtgaagagaacaaatctatctatgctgatgaggagacaatattaaaggagcgcttcgataggcggagtacaaatctatacaacatcgatttaggacgatgttacaatagtagtgtcgtgtgaaacacagccagtagtgtaattaatgtagtgtgcagcgagcagcagaaaaaaatattgtgtgacacaaagcgagggaattgatactatatagagacgaaaatatatagcg

SEQ ID NO: 428689 - DNA, 1098 bp, Homo sapiens
ggcctgaccgctcttcccggcatgtattgttcgggacgaggcgagtcgggcgccaagcgcggggccggagcggccttcccggagtcctttgcgcggcacctggcgacaaaatggctgcccgagggagacgggcggagcctcagggccgggaggctccgggccccgcgggcggtggcggtggcgggagccgttgggctgagtcgggatcggggacgtcgcccgagagcggggacgaggaggtgtcgggcgcgggttcgagcccggtgtcgggcggcgtgaacttgttcgccaacgacggcagcttcctggagctgttcaagcggaagatggaggaggagcagcggcagcggcaggaggagccgcccccgggtccgcagcgacccgaccagtcggccgccgccgctggccccggggatccgaagaggaagggcggtccgggctccacacttagcttcgtcggccggctggcggagctgggcgcggcgtcaggacgggccaccaggccgggctaggaaggtgtagtgggcctcagcgccgccaagggcggtcccggctcctgtaaccgttgcagtcttctgtcccttcacccaggtgggcaaacgcagaggcgggaacaaactagccctcaagacgggaatagtagccaagaagcagaagacggaggatgaggtattaacaagtaaaggtgacgcgtgggccaagtacatggcagaagtgaaaaagtacaaagctcaccagtgcggtgacgatgataaaactcggcccctggtgaaatgacgcccctcccccacctgcccatggcctgggactctctgcgatgtacataactatttaatgcagcggcagcggcgacagccttccctgagaggacttaaaagcagaaggaaaccgagatgcttcccgcagccgtggacgattctccaggactctttttttaccttgagcacttgcctcgtgagacttcatagaacagtggtttactgtcccccccttctcacctcctcattctctctggctctttctgtcttcctcttctcaccctcctccctccccttagccatcacttctgggaagtaaagaacttgacttagtgccgga

SEQ ID NO: 428690 - DNA, 1387 bp, Homo sapiens
  misc_feature (177)..(177): n is a, c, g, or t
  misc_feature (187)..(187): n is a, c, g, or t
  misc_feature (189)..(191): n is a, c, g, or t
  misc_feature (200)..(200): n is a, c, g, or t
  misc_feature (213)..(213): n is a, c, g, or t
  misc_feature (220)..(223): n is a, c, g, or t
  misc_feature (225)..(225): n is a, c, g, or t
  misc_feature (228)..(228): n is a, c, g, or t
  misc_feature (241)..(241): n is a, c, g, or t
  misc_feature (245)..(246): n is a, c, g, or t
  misc_feature (251)..(251): n is a, c, g, or t
  misc_feature (263)..(263): n is a, c, g, or t
  misc_feature (269)..(269): n is a, c, g, or t
  misc_feature (283)..(285): n is a, c, g, or t
  misc_feature (289)..(289): n is a, c, g, or t
  misc_feature (308)..(308): n is a, c, g, or t
  misc_feature (313)..(313): n is a, c, g, or t
  misc_feature (317)..(317): n is a, c, g, or t
  misc_feature (324)..(324): n is a, c, g, or t
  misc_feature (327)..(327): n is a, c, g, or t
  misc_feature (349)..(350): n is a, c, g, or t
  misc_feature (377)..(377): n is a, c, g, or t
  misc_feature (381)..(381): n is a, c, g, or t
  misc_feature (387)..(387): n is a, c, g, or t
  misc_feature (392)..(392): n is a, c, g, or t
tagagacagtgtctcactctgtctcccaggctagagtacagtgtgcaatcatagctcactgcagccttgaactcctggcctcaagcaatcctcccaccttggcttcccaatgtgctaggtttacaggcgtgaaaacattgtgttgtgtgtgtgtgtgtttttttttttttttttttnagacagagtntnnntcttgttgnccaggctggagtncaatggnnnnanctnggctcactgcaanctcnncctcncaggttcaagcnattctnctgcctcagcctcnnnagtngctgggattacaggcgccnaccancacncccggcnaantttttgtatttttagtagaganngggtttcaccatgttggccaggctggnctcnaactcntgacntcaggtgatctacccgattctacctcccaaagtgctgggattacaggcctgagccaccgcgcctggtcaaaaagggggtggttctaactttcatcttagggtagctgtgaaaatgaaaggagatgatacatccacagcacttggcacagggcttggcatacagtacatgctcaataaagggagctgttgccacctcttgtggtccctgctagggagggtgaggccttggcgtggaaagtgagaacagagctggtccctactgaggtggacactcttcttgctccctgggagggcaccgcgggcccaggggcaggcgctgagtcgcgtgtgctcctctctgattgctgcgcaggtcggccggctggcggagctgggcgcggcgtcaggacgggccaccaggccgggctaggaaggtgtagtgggcctcagcgccgccaagggcggtcccggctcctgtaaccgttgcagtcttctgtcccttcacccaggtgggcaaacgcagaggcgggaacaaactagccctcaagacgggaatagtagccaagaagcagaagacggaggatgaggtattaacaagtaaaggtgacgcgtgggccaagtacatggcagaagtgaaaaagtacaaagctcaccagtgcggtgacgatgataaaactcggcccctggtgaaatgacgcccctcccccacctgcccatggcctgggactctctgcgatgtacataactatttaatgcagcggcagcggcgacagccttccctgagaggacttaaaagcagaaggaaaccgagatgcttcccgcagccgtggacgattctccaggactctttttttaccttgagcacttgcctcgtgagacttcatagaacagtggtttactgtcccccccttctcacctcctcattctctctggctctttctgtcttcctcttctcaccctcctccctccccttagccatcacttctgggaagtaaagaacttgacttagtgccgga

SEQ ID NO: 428691 - DNA, 1664 bp, Homo sapiens
  misc_feature (1142)..(1142): n is a, c, g, or t
ggcctgaccgctcttcccggcatgtattgttcgggacgaggcgagtcgggcgccaagcgcggggccggagcggccttcccggagtcctttgcgcggcacctggcgacaaaatggctgcccgagggagacgggcggagcctcagggccgggaggctccgggccccgcgggcggtggcggtggcgggagccgttgggctgagtcgggatcggggacgtcgcccgagagcggggacgaggaggtgtcgggcgcgggttcgagcccggtgtcgggcggcgtgaacttgttcgccaacgacggcagcttcctggagctgttcaagcggaagatggaggaggagcagcggcagcggcaggaggagccgcccccgggtccgcagcgacccgaccagtcggccgccgccgctggccccggggatccgaagaggaagggcggtccgggctccacacttagcttcgtcggccggctggcggagctgggcgcggcgtcaggacgggccaccaggccgggctaggaaggtgtagtgggcctcagcgccgccaagggcggtcccggctcctgtaaccgttgcagtcttctgtcccttcacccaggtgggcaaacgcagaggcgggaacaaactagccctcaagacgggaatagtagccaagaagcagaagacggaggatgaggtattaacaagtaaaggtgacgcgtgggccaagtacatggcagaagtgaaaaagtacaaagctcaccagtgcggtgacgatgataaaactcggcccctggtgaaatgacgcccctcccccacctgcccatggcctgggactctctgcgatgtacataactatttaatgcagcggcagcggcgacagccttccctgagaggacttaaaagcagaaggaaaccgagatgcttcccgcagccgtggacgattctccaggactctttttttaccttgagcacttgcctcgtgagacttcatagaacagtggtttactgtcccccccttctcacctcctcattctctctggctctttctgtcttcctcttctcaccctcctccctccccttagccatcacttctgggaagtaaagaacttgacttagtgccggaaaaaaaaaaaaaaaaaaaaaaaaaaaaaaaaaaaaaaaaaaaanaaaaaaaaaaaaataaaataataaaagaaaggggggggagcgataataaataatcaccacgggggggcgcccatatatatagaggacacacaggtttttgtatagaaagggggggcacacaataggggcaggcataatataaagagacagagggagcaggggcagatgtatacagcagttgtgggagggagggaagaacaaaaggtgtgagtaagggggggagaaacctattgtgaagaaaaaagaaacacctaaaatatgtgagaggggggggggaaaaaaaaatatgtggtgaagagaacaaatctatctatgctgatgaggagacaatattaaaggagcgcttcgataggcggagtacaaatctatacaacatcgatttaggacgatgttacaatagtagtgtcgtgtgaaacacagccagtagtgtaattaatgtagtgtgcagcgagcagcagaaaaaaatattgtgtgacacaaagcgagggaattgatactatatagagacgaaaatatatagcg

SEQ ID NO: 428692 - DNA, 2159 bp, Homo sapiens
ggcctgaccgctcttcccggcatgtattgttcgggacgaggcgagtcgggcgccaagcgcggggccggagcggccttcccggagtcctttgcgcggcacctggcgacaaaatggctgcccgagggagacgggcggagcctcagggccgggaggctccgggccccgcgggcggtggcggtggcgggagccgttgggctgagtcgggatcggggacgtcgcccgagagcggggacgaggaggtgtcgggcgcgggttcgagcccggtgtcgggcggcgtgaacttgttcgccaacgacggcagcttcctggagctgttcaagcggaagatggaggaggagcagcggcagcggcaggaggagccgcccccgggtccgcagcgacccgaccagtcggccgccgccgctggccccggggatccgaagaggaagggcggtccgggctccacacttagcttcgtaaggagccgtgggggtgggggcgggcgccacggcctgtcttggcagcgggagtcggggcccgtgaagggggatcgggaccgaagtccactttccgttctgaatgaggggcccgtccgggtcacccgctgagggtgtggaacttggattcccgacaactggggtctaggggcgggagtggggactccaggagcttgcccgtgggaacgatgggagctgaggaattgcctaggaatcagcactgtggagaatgaggaaacgtggatatcaggattcctgtttgagtggtacccggaccttgggtcatgggaccaccactaattgtgaggaaagggagtaaatttaagtctggactctgagctatatgtgttagactcagaccacgtactatgtaaggacaattacttatctaggacaattgcttgacttccttgtatcttattcgaccaacctccatttattgagcaatttacctcgtgctaggcattgtgctaggtgctggtatgcagtggtgagcttacagacaagatcgctgctttcctggagcctctgggtttgcctaccctcattttccctagttgcaaaaatagacatcatagcatctcttgatgtggtgagggttttatgaggtgatcctggaaaagtggttagcacaagagcctgtcttccaggaagggctaaactggtggttctcaattggggcagttccctccacccccacatttggcaaagtctggagacatttttggttgtcagaactgcgggagggggtgctagtgacatctatgggtagaggccagggatgctgctcaacttcctaccatgcgtggggcagcgccctcccacccccaaacaaagaataatccagctcaaaatgttattagtgccaggttgagaaactctggattaagtaaatagggcatatattgatttttggctctgagcttgccatgtctgtggtgttaagatcaagtccctgtagtgtggaggaaaaagtgttgagaataacaagactgggggctctagttctggatccagcatgtgattttgggcaaatgatctaacctctgcaagcctcagtttcttcatttgttaaaaatgggcgtgggttgggtgcagtggctcacacctgtaattccaacattttgggaggtcgaggtgggtggatcgcttaagcccaggagttggagaccagcctggacaatatggcaaaaatgcatctctacaaaaaaaaattaaaaaattagctgggcatggtgccacacatgcctggagctccagctacccaggaggctgagacaggaggatcgcttgagcccaggagattcaggctgcagtgagccatgattgcaccactgcgctctagcctggatgacagaacaagagagtatcttaaaaaaaaaatcggtgtgaaataatcccagcaggccaggctctgtggctcatccctgtaatcccagcactttgggaggccgaggcgggcagatcacctgaggtcaggggttcaagaccagcctggccaacgtggtgaaaccctgactctactaaaaatacaaaaattagccaggcatggtggtgcatacctgtaatcccagctactcgggaggctgaggcaggagaatcacttgaacctgggaggtggaggttgcagtgagctgagatcatgccactgcactccagcctcgacagtaagactctgtctcc

SEQ ID NO: 428693 - DNA, 971 bp, Homo sapiens
ggcctgaccgctcttcccggcatgtattgttcgggacgaggcgagtcgggcgccaagcgcggggccggagcggccttcccggagtcctttgcgcggcacctggcgacaaaatggctgcccgagggagacgggcggagcctcagggccgggaggctccgggccccgcgggcggtggcggtggcgggagccgttgggctgagtcgggatcggggacgtcgcccgagagcggggacgaggaggtgtcgggcgcgggttcgagcccggtgtcgggcggcgtgaacttgttcgccaacgacggcagcttcctggagctgttcaagcggaagatggaggaggagcagcggcagcggcaggaggagccgcccccgggtccgcagcgacccgaccagtcggccgccgccgctggccccggggatccgaagaggaagggcggtccgggctccacacttagcttcgtaaggagccgtgggggtgggggcgggcgccacggcctgtcttggcagcgggagtcggggcccgtgaagggggatcgggaccgaagtccactttccgttctgaatgaggggcccgtccgggtcacccgctgagggtgtggaacttggattcccgacaactggggtctaggggcgggagtggggactccaggagcttgcccgtgggaacgatgggagctgaggaattgcctaggaatcagcactgtggagaatgaggaaacgtggatatcaggattcctgtttgagtggtacccggaccttgggtcatgggaccaccactaattgtgagactgtgtgtgctttggctacgcccctggtgctgacataccacatgatcctggaggcctgcagagaggacagtcccagaagcacctggtctccaagctcccacaccccaccgggcaaagccaaagcacacacagtctcacagttagcctctagaccaccagtctccggggcacatgtccccagacctag

SEQ ID NO: 428694 - DNA, 1095 bp, Homo sapiens
  misc_feature (177)..(177): n is a, c, g, or t
  misc_feature (187)..(187): n is a, c, g, or t
  misc_feature (189)..(191): n is a, c, g, or t
  misc_feature (200)..(200): n is a, c, g, or t
  misc_feature (213)..(213): n is a, c, g, or t
  misc_feature (220)..(223): n is a, c, g, or t
  misc_feature (225)..(225): n is a, c, g, or t
  misc_feature (228)..(228): n is a, c, g, or t
  misc_feature (241)..(241): n is a, c, g, or t
  misc_feature (245)..(246): n is a, c, g, or t
  misc_feature (251)..(251): n is a, c, g, or t
  misc_feature (263)..(263): n is a, c, g, or t
  misc_feature (269)..(269): n is a, c, g, or t
  misc_feature (283)..(285): n is a, c, g, or t
  misc_feature (289)..(289): n is a, c, g, or t
  misc_feature (308)..(308): n is a, c, g, or t
  misc_feature (313)..(313): n is a, c, g, or t
  misc_feature (317)..(317): n is a, c, g, or t
  misc_feature (324)..(324): n is a, c, g, or t
  misc_feature (327)..(327): n is a, c, g, or t
  misc_feature (349)..(350): n is a, c, g, or t
  misc_feature (377)..(377): n is a, c, g, or t
  misc_feature (381)..(381): n is a, c, g, or t
  misc_feature (387)..(387): n is a, c, g, or t
  misc_feature (392)..(392): n is a, c, g, or t
tagagacagtgtctcactctgtctcccaggctagagtacagtgtgcaatcatagctcactgcagccttgaactcctggcctcaagcaatcctcccaccttggcttcccaatgtgctaggtttacaggcgtgaaaacattgtgttgtgtgtgtgtgtgtttttttttttttttttttnagacagagtntnnntcttgttgnccaggctggagtncaatggnnnnanctnggctcactgcaanctcnncctcncaggttcaagcnattctnctgcctcagcctcnnnagtngctgggattacaggcgccnaccancacncccggcnaantttttgtatttttagtagaganngggtttcaccatgttggccaggctggnctcnaactcntgacntcaggtgatctacccgattctacctcccaaagtgctgggattacaggcctgagccaccgcgcctggtcaaaaagggggtggttctaactttcatcttagggtagctgtgaaaatgaaaggagatgatacatccacagcacttggcacagggcttggcatacagtacatgctcaataaagggagctgttgccacctcttgtggtccctgctagggagggtgaggccttggcgtggaaagtgagaacagagctggtccctactgaggtggacactcttcttgctccctgggagggcaccgcgggcccaggggcaggcgctgagtcgcgtgtgctcctctctgattgctgcgcaggtcggccggctggcggagctgggcgcggcgtcaggacgggccaccaggccgggctaggaaggtgtagtgggcctcagcgccgccaagggcggtcccggctcctgtaaccgttgcagtcttctgtcccttcacccaggtgggcaaacgcagaggcgggaacaaactagccctcaagacgggaatagtagccaagaagcagaagacggaggatgaggtgagccagcttggtgcagggggtccacccacattgcctttcccttccagcttttgcgcccagccttctccctccctgtctggtatccaggccttttatgagtgtgcctggcagggtaggagggctgtcaatgggtc

SEQ ID NO: 428695 - DNA, 806 bp, Homo sapiens
  misc_feature (177)..(177): n is a, c, g, or t
  misc_feature (187)..(187): n is a, c, g, or t
  misc_feature (189)..(191): n is a, c, g, or t
  misc_feature (200)..(200): n is a, c, g, or t
  misc_feature (213)..(213): n is a, c, g, or t
  misc_feature (220)..(223): n is a, c, g, or t
  misc_feature (225)..(225): n is a, c, g, or t
  misc_feature (228)..(228): n is a, c, g, or t
  misc_feature (241)..(241): n is a, c, g, or t
  misc_feature (245)..(246): n is a, c, g, or t
  misc_feature (251)..(251): n is a, c, g, or t
  misc_feature (263)..(263): n is a, c, g, or t
  misc_feature (269)..(269): n is a, c, g, or t
  misc_feature (283)..(285): n is a, c, g, or t
  misc_feature (289)..(289): n is a, c, g, or t
  misc_feature (308)..(308): n is a, c, g, or t
  misc_feature (313)..(313): n is a, c, g, or t
  misc_feature (317)..(317): n is a, c, g, or t
  misc_feature (324)..(324): n is a, c, g, or t
  misc_feature (327)..(327): n is a, c, g, or t
  misc_feature (349)..(350): n is a, c, g, or t
  misc_feature (377)..(377): n is a, c, g, or t
  misc_feature (381)..(381): n is a, c, g, or t
  misc_feature (387)..(387): n is a, c, g, or t
  misc_feature (392)..(392): n is a, c, g, or t
tagagacagtgtctcactctgtctcccaggctagagtacagtgtgcaatcatagctcactgcagccttgaactcctggcctcaagcaatcctcccaccttggcttcccaatgtgctaggtttacaggcgtgaaaacattgtgttgtgtgtgtgtgtgtttttttttttttttttttnagacagagtntnnntcttgttgnccaggctggagtncaatggnnnnanctnggctcactgcaanctcnncctcncaggttcaagcnattctnctgcctcagcctcnnnagtngctgggattacaggcgccnaccancacncccggcnaantttttgtatttttagtagaganngggtttcaccatgttggccaggctggnctcnaactcntgacntcaggtgatctacccgattctacctcccaaagtgctgggattacaggcctgagccaccgcgcctggtcaaaaagggggtggttctaactttcatcttagggtagctgtgaaaatgaaaggagatgatacatccacagcacttggcacagggcttggcatacagtacatgctcaataaagggagctgttgccacctcttgtggtccctgctagggagggtgaggccttggcgtggaaagtgagaacagagctggtccctactgaggtggacactcttcttgctccctgggagggcaccgcgggcccaggggcaggcgcctgtaatcccagctactcgggaggctgaggcaggagaatcacttgaacccaaggggcagaagctgcagttagtcaagtagcgtgagggtgccgagct

SEQ ID NO: 428696 - DNA, 1068 bp, Homo sapiens
ggcctgaccgctcttcccggcatgtattgttcgggacgaggcgagtcgggcgccaagcgcggggccggagcggccttcccggagtcctttgcgcggcacctggcgacaaaatggctgcccgagggagacgggcggagcctcagggccgggaggctccgggccccgcgggcggtggcggtggcgggagccgttgggctgagtcgggatcggggacgtcgcccgagagcggggacgaggaggtgtcgggcgcgggttcgagcccggtgtcgggcggcgtgaacttgttcgccaacgacggcagcttcctggagctgttcaagcggaagatggaggaggagcagcggcagcggcaggaggagccgcccccgggtccgcagcgacccgaccagtcggccgccgccgctggccccggggatccgaagaggaagggcggtccgggctccacacttagcttcgtgggcaaacgcagaggcgggaacaaactagccctcaagacgggaatagtagccaagaagcagaagacggaggatgaggtattaacaagtaaaggtgacgcgtgggccaagtacatggcagaagtgaaaaagtacaaagctcaccagtgcggtgacgatgataaaactcggcccctggtgaaatgacgcccctcccccacctgcccatggcctgggactctctgcgatgtacataactatttaatgcagcggcagcggcgacagccttccctgagaggacttaaaagcagaaggaaaccgagatgcttcccgcagccgtggacgattctccaggactctttttttaccttgagcacttgcctcgtgagacttcatagaacagtggtttactgtcccccccttctcacctcctcattctctctggctctttctgtcttcctcttctcaccctcctccctccccttagccatcacttctgggaagtaaagaacttgacttagtgccggaaaaaaaaaaaaaaaaaaaaaaaaaaaacaaacccaaagaaaacaagagaaggccacaaaaacaacaaaaaaaaacagcacaggagggggggggccaaaaaaacaca

SEQ ID NO: 428697 - DNA, 1118 bp, Homo sapiens
ggcctgaccgctcttcccggcatgtattgttcgggacgaggcgagtcgggcgccaagcgcggggccggagcggccttcccggagtcctttgcgcggcacctggcgacaaaatggctgcccgagggagacgggcggagcctcagggccgggaggctccgggccccgcgggcggtggcggtggcgggagccgttgggctgagtcgggatcggggacgtcgcccgagagcggggacgaggaggtgtcgggcgcgggttcgagcccggtgtcgggcggcgtgaacttgttcgccaacgacggcagcttcctggagctgttcaagcggaagatggaggaggagcagcggcagcggcaggaggagccgcccccgggtccgcagcgacccgaccagtcggccgccgccgctggccccggggatccgaagaggaagggcggtccgggctccacacttagcttcgtgggcaaacgcagaggcgggaacaaactagccctcaagacgggaatagtagccaagaagcagaagacggaggatgaggtattaacaagtaaaggtgacgcgtgggccaagtacatggcagaagtgaaaaagtacaaagctcaccagtgcggtgacgatgataaaactcggcccctggtgaaatgacgcccctcccccacctgcccatggcctgggactctctgcgatgtacataactatttaatgcagcggcagcggcgacagccttccctgagaggacttaaaagcagaaggaaaccgagatgcttcccgcagccgtggacgattctccaggactctttttttaccttgagcacttgcctcgtgagacttcatagaacagtggtttactgtcccccccttctcacctcctcattctctctggctctttctgtcttcctcttctcaccctcctccctccccttagccatcacttctgggaagtaaagaacttgacttagtgccggaaaaaaaaaaaaaaaaaaaaaaaaaaggggggggtaagaaatccccagagggccaggttacgttcccctttttgtacaagggcccaagggcgcgttataaaaaaggagggcgggttacacgcggggaaacgcgccttggtttggaaggccctctggg

SEQ ID NO: 428698 - DNA, 726 bp, Homo sapiens
tcgctattcatcggcacctcgctattcatcggcacctcgctattgatcggcacctcgctattcatcggcacctcgctattcatcggcacctcgctagtcatccgcacccgaggccctgtaattggaatgagtccactttaaatcctttaacgatcgctattcatcggcacccccggggatccgaagaggaagggcggtccgggctccacacttagcttcgtgggcaaacgcagaggcgggaacaaactagccctcaagacgggaatagtagccaagaagcagaagacggaggatgaggtattaacaagtaaaggtgacgcgtgggccaagtacatggcagaagtgaaaaagtacaaagctcaccagtgcggtgacgatgataaaactcggcccctggtgaaatgacgcccctcccccacctgcccatggcctgggactctctgcgatgtacataactatttaatgcagcggcagcggcgacagccttccctgagaggacttaaaagcagaaggaaaccgagatgcttcccgcagccgtggacgattctccaggactctttttttaccttgagcacttgcctcgtgagacttcatagaacagtggtttactgtcccccccttctcacctcctcattctctctggctctttctgtcttcctcttctcaccctcctccctccccttagccatcacttctgggaagtaaagaacttgacttagtgccgga

SEQ ID NO: 428699 - DNA, 1068 bp, Homo sapiens
ggcctgaccgctcttcccggcatgtattgttcgggacgaggcgagtcgggcgccaagcgcggggccggagcggccttcccggagtcctttgcgcggcacctggcgacaaaatggctgcccgagggagacgggcggagcctcagggccgggaggctccgggccccgcgggcggtggcggtggcgggagccgttgggctgagtcgggatcggggacgtcgcccgagagcggggacgaggaggtgtcgggcgcgggttcgagcccggtgtcgggcggcgtgaacttgttcgccaacgacggcagcttcctggagctgttcaagcggaagatggaggaggagcagcggcagcggcaggaggagccgcccccgggtccgcagcgacccgaccagtcggccgccgccgctggccccggggatccgaagaggaagggcggtccgggctccacacttagcttcgtgggcaaacgcagaggcgggaacaaactagccctcaagacgggaatagtagccaagaagcagaagacggaggatgaggtattaacaagtaaaggtgacgcgtgggccaagtacatggcagaagtgaaaaagtacaaagctcaccagtgcggtgacgatgataaaactcggcccctggtgaaatgacgcccctcccccacctgcccatggcctgggactctctgcgatgtacataactatttaatgcagcggcagcggcgacagccttccctgagaggacttaaaatctttttttaccttgagcacttgcctcgtgagacttcatagaacagtggtttactgtcccccccttctcacctcctcattctctctggctctttctgtcttcctcttctcaccctcctccctccccttagccatcacttctgggaagtaaagaacttgacttagtgccggaaaaaaaaaaaaaaaaaaaaaaaaaaggggggggtaagaaatccccagagggccaggttacgttcccctttttgtacaagggcccaagggcgcgttataaaaaaggagggcgggttacacgcggggaaacgcgccttggtttggaaggccctctggg

SEQ ID NO: 428700 - DNA, 808 bp, Homo sapiens
ggcctgaccgctcttcccggcatgtattgttcgggacgaggcgagtcgggcgccaagcgcggggccggagcggccttcccggagtcctttgcgcggcacctggcgacaaaatggctgcccgagggagacgggcggagcctcagggccgggaggctccgggccccgcgggcggtggcggtggcgggagccgttgggctgagtcgggatcggggacgtcgcccgagagcggggacgaggaggtgtcgggcgcgggttcgagcccggtgtcgggcggcgtgaacttgttcgccaacgacggcagcttcctggagctgttcaagcggaagatggaggaggagcagcggcagcggcaggaggagccgcccccgggtccgcagcgacccgaccagtcggccgccgccgctggccccggggatccgaagaggaagggcggtccgggctccacacttagcttcgtgggcaaacgcagaggcgggaacaaactagccctcaagacgggaatagtagccaagaagcagaagacggaggatgagataactatttaatgcagcggcagcggcgacagccttccctgagaggacttaaaagcagaaggaaaccgagatgcttcccgcagccgtggacgattctccaggactctttttttaccttgagcacttgcctcgtgagacttcatagaacagtggtttactgtcccccccttctcacctcctcattctctctggctctttctgtcttcctcttctcaccctcctccctccccttagccatcacttctgggaagtaaagaacttgacttagtgccgga

SEQ ID NO: 428701 - DNA, 875 bp, Homo sapiens
gtttataaaagggtcagtatatattgagaggaggagagaaagagaaacgggagcaagagagaaggaggcccagacagtgagggcaggagggagagaagagacgcagaaggagagcgagcgagagagaaagggttctggattggaggggagagcaagggagggaggaaggcggtgagagaggcgggggcctcgggagggtgaaaggagggaggagaagggcggggcacggaggcccgagcgagggacaagactccgactccagctctgacttttttcgcggctctcggcttccactgcagccatgtcactcctcttgctggtggtctcagcccttcacatcctcattcttatactgcttttcgtggccactttggacaagtcctggtggactctccctgggaaagagtccctgaatctctggtacgactgcacgtggaacaacgacaccaaaacatgggcctgcagtaatgtcagcgagaatggctggctgaaggcggtgcaggtcctcatggtgctctccctcattctctgctgtctctccttcatcctgttcatgttccagctctacaccatgcgacgaggaggtctcttctatgccaccggcctctgccagctttgcaccagcgtggcggtgtttactggcgccttgatctatgccattcacgccgaggagatcctggagaagcacccgcgagggggcagcttcggatactgcttcgccctggcctgggtggccttccccctcgccctggtcagcggcatcatctacatccacctacggaagcgggagtgagcgccccgcctcgctcggctgcccccgccccttcccggcccccctcgccgcgcgtcctccaaaaaataaaaccttaaccgcg

SEQ ID NO: 428702 - DNA, 1082 bp, Homo sapiens
ggggcttccccgtaaggggcgggcttcgagggtcgcgtttggaaggccttacgaggggcccggtggaagggcggtgaagggcgggctaatcgggaggcgctcaggccttgaaggcctgcgggaggtcgaaatggtcctggggaggtcgaggctgaggtctcactagtaccgcgggcctggaagcggcgggagttgaaagagcctgcggtgacctgtatggaagccctcgaagccaggccgaggtcctacaagacggagcccgagaggtgccggtcttaagctgactgtgaccacgttaaattaaggattcataggaaggaaggcggtgtcgaagccgggagttgcgcggagaaggagcgctcaacacagcctcagcggttcactacgcaagcgcgaccaacggcttcccgggaagcagccaaaaacgcttggccgcctaccacgtccgcgcgctggagggcggaagtgggcttccactgcagccatgtcactcctcttgctggtggtctcagcccttcacatcctcattcttatactgcttttcgtggccactttggacaagtcctggtggactctccctgggaaagagtccctgaatctctggtacgactgcacgtggaacaacgacaccaaaacatgggcctgcagtaatgtcagcgagaatggctggctgaaggcggtgcaggtcctcatggtgctctccctcattctctgctgtctctccttcatcctgttcatgttccagctctacaccatgcgacgaggaggtctcttctatgccaccggcctctgccagctttgcaccagcgtggcggtgtttactggcgccttgatctatgccattcacgccgaggagatcctggagaagcacccgcgagggggcagcttcggatactgcttcgccctggcctgggtggccttccccctcgccctggtcagcggcatcatctacatccacctacggaagcgggagtgagcgccccgcctcgctcggctgcccccgccccttcccggcccccctcgccgcgcgtcctccaaaaaataaaaccttaaccgcggctctgccttgatcttccttcctt

SEQ ID NO: 428703 - DNA, 700 bp, Homo sapiens
gtttataaaagggtcagtatatattgagaggaggagagaaagagaaacgggagcaagagagaaggaggcccagacagtgagggcaggagggagagaagagacgcagaaggagagcgagcgagagagaaagggttctggattggaggggagagcaagggagggaggaaggcggtgagagaggcgggggcctcgggagggtgaaaggagggaggagaagggcggggcacggaggcccgagcgagggacaagactccgactccagctctgacttttttcgcggctctcggcttccactgcagccatgtcactcctcttgctggtggtctcagcccttcacatcctcattcttatactgcttttcgtggccactttggacaagtcctggtggactctccctgggaaagagtccctgaatctctggtacgactgcacgtggaacaacgacaccaaaacatgggcctgcagtaatgtcagcgagaatggctggctgaaggcggtgcaggtcctcatggtgctctccctcattctctgctgtctctccttcatcctgttcatgttccagctctacaccatgcgacgaggaggtctcttctatgccaccggcctctgccagctttgcaccagcgtggcggtgtttactggcgccttgatctatgccattcacgccgcgcgtcctccaaaaaataaaaccttaaccgcg

SEQ ID NO: 428704 - DNA, 504 bp, Homo sapiens
cagagaagggtcacatggtgagcaagcaggtgaagctggaactctggacccacggtgatgtccccctctgtgtcctccttactgcaggctggctgaaggcggtgcaggtcctcatggtgctctccctcattctctgctgtctctccttcatcctgttcatgttccagctctacaccatgcgacgaggaggtctcttctatgccaccggcctctgccagctttgcaccagcgtggcggtgtttactggcgccttgatctatgccattcacgccgaggagatcctggagaagcacccgcgagggggcagcttcggatactgcttcgccctggcctgggtggccttccccctcgccctggtcagcggcatcatctacatccacctacggaagcgggagtgagcgccccgcctcgctcggctgcccccgccccttcccggcccccctcgccgcgcgtcctccaaaaaataaaaccttaaccgcggctctgccttgatcttccttcctt

SEQ ID NO: 428705 - DNA, 703 bp, Homo sapiens
gtttataaaagggtcagtatatattgagaggaggagagaaagagaaacgggagcaagagagaaggaggcccagacagtgagggcaggagggagagaagagacgcagaaggagagcgagcgagagagaaagggttctggattggaggggagagcaagggagggaggaaggcggtgagagaggcgggggcctcgggagggtgaaaggagggaggagaagggcggggcacggaggcccgagcgagggacaagactccgactccagctctgacttttttcgcggctctcggctggctgaaggcggtgcaggtcctcatggtgctctccctcattctctgctgtctctccttcatcctgttcatgttccagctctacaccatgcgacgaggaggtctcttctatgccaccggcctctgccagctttgcaccagcgtggcggtgtttactggcgccttgatctatgccattcacgccgaggagatcctggagaagcacccgcgagggggcagcttcggatactgcttcgccctggcctgggtggccttccccctcgccctggtcagcggcatcatctacatccacctacggaagcgggagtgagcgccccgcctcgctcggctgcccccgccccttcccggcccccctcgccgcgcgtcctccaaaaaataaaaccttaaccgcggctctgccttgatcttccttcctt

SEQ ID NO: 428706 - DNA, 679 bp, Homo sapiens
gtttataaaagggtcagtatatattgagaggaggagagaaagagaaacgggagcaagagagaaggaggcccagacagtgagggcaggagggagagaagagacgcagaaggagagcgagcgagagagaaagggttctggattggaggggagagcaagggagggaggaaggcggtgagagaggcgggggcctcgggagggtgaaaggagggaggagaagggcggggcacggaggcccgagcgagggacaagactccgactccagctctgacttttttcgcggctctcggctggctgaaggcggtgcaggtcctcatggtgctctccctcattctctgctgtctctccttcatcctgttcatgttccagctctacaccatgcgacgaggaggtctcttctatgccaccggcctctgccagctttgcaccagcgtggcggtgtttactggcgccttgatctatgccattcacgccgaggagatcctggagaagcacccgcgagggggcagcttcggatactgcttcgccctggcctgggtggccttccccctcgccctggtcagcggcatcatctacatccacctacggaagcgggagtgagcgccccgcctcgctcggctgcccccgccccttcccggcccccctcgccgcgcgtcctccaaaaaataaaaccttaaccgcg

SEQ ID NO: 428707 - DNA, 878 bp, Homo sapiens
ggggcttccccgtaaggggcgggcttcgagggtcgcgtttggaaggccttacgaggggcccggtggaagggcggtgaagggcgggctaatcgggaggcgctcaggccttgaaggcctgcgggaggtcgaaatggtcctggggaggtcgaggctgaggtctcactagtaccgcgggcctggaagcggcgggagttgaaagagcctgcggtgacctgtatggaagccctcgaagccaggccgaggtcctacaagacggagcccgagaggtgccggtcttaagctgactgtgaccacgttaaattaaggattcataggaaggaaggcggtgtcgaagccgggagttgcgcggagaaggagcgctcaacacagcctcagcggttcactacgcaagcgcgaccaacggcttcccgggaagcagccaaaaacgcttggccgcctaccacgtccgcgcgctggagggcggaagtgggcttccactgcagccatgtcactcctcttgctggtggtctcagcccttcacatcctcattctctgctgtctctccttcatcctgttcatgttccagctctacaccatgcgacgaggaggtctcttctatgccaccggcctctgccagctttgcaccagcgtggcggtgtttactggcgccttgatctatgccattcacgccgaggagatcctggagaagcacccgcgagggggcagcttcggatactgcttcgccctggcctgggtggccttccccctcgccctggtcagcggcatcatctacatccacctacggaagcgggagtgagcgccccgcctcgctcggctgcccccgccccttcccggcccccctcgccgcgcgtcctccaaaaaataaaaccttaaccgcg

SEQ ID NO: 428708 - DNA, 917 bp, Homo sapiens
gtttataaaagggtcagtatatattgagaggaggagagaaagagaaacgggagcaagagagaaggaggcccagacagtgagggcaggagggagagaagagacgcagaaggagagcgagcgagagagaaagggttctggattggaggggagagcaagggagggaggaaggcggtgagagaggcgggggcctcgggagggtgaaaggagggaggagaagggcggggcacggaggcccgagcgagggacaagactccgactccagctctgacttttttcgcggctctcggcttccactgcagccatgtcactcctcttgctggtggtctcagcccttcacatcctcattcttatactgcttttcgtggccactttggacaagtcctggtggactctccctgggaaagagtccctgaatctctggtacgactgcacgtggaacaacgacaccaaaacatgggcctgcagtaatgtcagcgagaatggtgaggggtgagggcggcgggactggtcttcaaaggggaaggtaaacccttcgtgtcctcatgggactgagaattgggaaccctcccccaacaaagttggagtgggcggggtccaggcctgagtggctgagtgcctagggctaatgcatgtcccgcctgtctggatgtacctacctcttgttttttttgtttttgttttttgagaccgagttttccttccagcctgggcaacagagcaagattctgtctcaaaaaaaaaaaaaaaaaaaaagaatagagaaaaatctcccaagattctgagaagacaagagtatttttccaaagctctaaggagatggggctggtgctctgaatggatgcctgggaccatttcatccaaattccaaggggatggggctgaaaccacttaaggttctaaaggggtggggccaggtg

SEQ ID NO: 428709 - DNA, 899 bp, Homo sapiens
gtttataaaagggtcagtatatattgagaggaggagagaaagagaaacgggagcaagagagaaggaggcccagacagtgagggcaggagggagagaagagacgcagaaggagagcgagcgagagagaaagggttctggattggaggggagagcaagggagggaggaaggcggtgagagaggcgggggcctcgggagggtgaaaggagggaggagaagggcggggcacggaggcccgagcgagggacaagactccgactccagctctgacttttttcgcggctctcggcttccactgcagccatgtcactcctcttgctggtggtctcagcccttcacatcctcattcttatactgcttttcgtggccactttggacaagtcctggtggactctccctgggaaagagtccctgaatctctggtacgactgcacgtggaacaacgacaccaaaacatgggcctgcagtaatgtcagcgagaatggctggctgaaggcggtgcaggtcctcatggtgctctccctcattctctgctgtctctccttcatcctgttcatgttccagctctacaccatgcgacgaggaggtctcttctatgccaccggcctctgccagctttgcaccagcgtggcggtgtttactggcgccttgatctatgccattcacgccgaggagatcctggagaagcacccgcgagggggcagcttcggatactgcttcgccctggcctgggtggccttccccctcgccctggtcagcggcatcatctacatccacctacggaagcgggagtgagcgccccgcctcgctcggctgcccccgccccttcccggcccccctcgccgcgcgtcctccaaaaaataaaaccttaaccgcggctctgccttgatcttccttcctt

SEQ ID NO: 428710 - DNA, 940 bp, Homo sapiens
gtttataaaagggtcagtatatattgagaggaggagagaaagagaaacgggagcaagagagaaggaggcccagacagtgagggcaggagggagagaagagacgcagaaggagagcgagcgagagagaaagggttctggattggaggggagagcaagggagggaggaaggcggtgagagaggcgggggcctcgggagggtgaaaggagggaggagaagggcggggcacggaggcccgagcgagggacaagactccgactccagctctgacttttttcgcggctctcggcttccactgcagccatgtcactcctcttgctggtggtctcagcccttcacatcctcattcttatactgcttttcgtggccactttggacaagtcctggtggactctccctgggaaagagtccctgaatctctggtacgactgcacgtggaacaacgacaccaaaacatgggcctgcagtaatgtcagcgagaatggtgaggggtgagggcggcgggactggtcttcaaaggggaaggctggctgaaggcggtgcaggtcctcatggtgctctccctcattctctgctgtctctccttcatcctgttcatgttccagctctacaccatgcgacgaggaggtctcttctatgccaccggcctctgccagctttgcaccagcgtggcggtgtttactggcgccttgatctatgccattcacgccgaggagatcctggagaagcacccgcgagggggcagcttcggatactgcttcgccctggcctgggtggccttccccctcgccctggtcagcggcatcatctacatccacctacggaagcgggagtgagcgccccgcctcgctcggctgcccccgccccttcccggcccccctcgccgcgcgtcctccaaaaaataaaaccttaaccgcggctctgccttgatcttccttcctt

SEQ ID NO: 428711 - DNA, 558 bp, Homo sapiens
tgctgggtgaaggagtgagcataattggactgtgagtggaaccctatactgagaatgggtaaagcagcagtaagaaagaaaatccttactaacatgatgttacactgtccctactggcctgcagtaatgtcagcgagaatggctggctgaaggcggtgcaggtcctcatggtgctctccctcattctctgctgtctctccttcatcctgttcatgttccagctctacaccatgcgacgaggaggtctcttctatgccaccggcctctgccagctttgcaccagcgtggcggtgtttactggcgccttgatctatgccattcacgccgaggagatcctggagaagcacccgcgagggggcagcttcggatactgcttcgccctggcctgggtggccttccccctcgccctggtcagcggcatcatctacatccacctacggaagcgggagtgagcgccccgcctcgctcggctgcccccgccccttcccggcccccctcgccgcgcgtcctccaaaaaataaaaccttaaccgcggctctgccttgatcttccttcctt

SEQ ID NO: 428712 - DNA, 2072 bp, Homo sapiens
ttttccaaatcaaggtaacttgctcccttctgcctacaggccttggtcttggcttgtcctcacccagtcggaactccctaccactttcaggagagtggttttaggcccgtggggctgttctgttccaagcagtgtgagaacatggctggtagaggctctagctgtgtgcggggcctgaaggggagtgggttctcgcccaaagagcatctgcccatttcccaccttcccttctcccaccagaagcttgcctgagctgtttggacaaaaatccaaaccccacttggctactctggcctggcttcagcttggaacccaatacctaggcttacaggccatcctgagccaggggcctctggaaattctcttcctgatggtcctttaggtttgggattacacaaaatataattgcctctcccctctcccattttctctcttgggagcaatggtcacagtccctggtacctgaaaaggtacctaggtctaggcccttcttccctttcccttcctctcccctaccccagaactttggctccctttcccttctctctctggtagctccaggaggcggtctcttcgtgcacccacttgggcgctggaccccctctcagcaatggccaccggccggctgcacacgacttccccctggggcggcagctccccagcaggactaccccgaccctgggtcttgaggaagtgctgagcagcagggactgtcaccctgccctgccgcttcctcccggcttccatccccacccggggcccaattacccatccttcctgcccgatcagatgcagccgcaagtcccgccgctccattaccaagagctcatgccacccggttcctgcatgccagaggagcccaagccaaagaggggaagacgatcgtggccccggaaaaggaccgccacccacacttgtgattacgcgggctgcggcaaaacctacacaaagagttcccatctcaaggcacacctgcgaacccacacaggtgagaaaccttaccactgtgactgggacggctgtggatggaaattcgcccgctcagatgaactgaccaggcactaccgtaaacacacggggcaccgcccgttccagtgccaaaaatgcgaccgagcattttccaggtcggaccacctcgccttacacatgaagaggcatttttaaatcccagacagtggatatgacccacactgccagaagagaattcagtattttttacttttcacactgtcttcccgatgagggaaggagcccagccagaaagcactacaatcatggtcaagttcccaactgagtcatcttgtgagtggataatcaggaaaaatgaggaatccaaaagacaaaaatcaaagaacagatggggtctgtgactggatcttctatcattccaattctaaatccgacttgaatattcctggacttacaaaatgccaagggggtgactggaagttgtggatatcagggtataaattatatccgtgagttgggggagggaagaccagaattcccttgaattgtgtattgatgcaatataagcataaaagatcaccttgtattctctttaccttctaaaagccattattatgatgttagaagaagaggaagaaattcaggtacagaaaacatgtttaaatagcctaaatgatggtgcttggtgagtcttggttctaaaggtaccaaacaaggaagccaaagttttcaaactgctgcatactttgacaaggaaaatctatatttgtcttccgatcaacatttatgacctaagtcaggtaatatacctggtttacttctttagcatttttatgcagacagtctgttatgcactgtggtttcagatgtgcaataatttgtacaatggtttattcccaagtatgccttaagcagaacaaatgtgtttttctatatagttccttgccttaataaatatgtaatataaatttaagcaaacgtctattttgtatatttgtaaactacaaagtaaaatgaacattttgtggagtttgtattttgcatactcaaggtgagaattaagttttaaataaacctataatattttatctgaaaaaaaattt

SEQ ID NO: 428713 - DNA, 2770 bp, Homo sapiens
cgctcccacccgcccgtggcccgcgcccatggccgcgcgcgctccacacaactcaccggagtccgcgccctgcgccgccgaccagttcgcagctccgcgccacggcagccagtctcacctggcggcaccgcccgcccaccgccccggccacagcccctgcgcccacggcagcaatcgaggcgaccgcgacagtggtgggggacgctgctgagtggaagagagcgcagcccggccaccggacctacttactcgccttgctgattgtctatttttgcgtttacaacttttctaagaacttttgtatacaaaggaactttttaaaaaagacgcttccaagttatatttaatccaaagaagaaggatctcggccaatttggggttttgggttttggcttcgtttcttctcttcgttgactttggggttcaggtgccccagctgcttcgggctgccgaggaccttctgggcccccacattaatgaggcagccacctggcgagtctgacatggctgtcagcgacgcgctgctcccatctttctccacgttcgcgtctggcccggcgggaagggagaagacactgcgtcaagcaggtgccccgaataaccgctggcgggaggagctctcccacatgaagcgacttcccccagtgcttcccggccgcccctatgacctggcggcggcgaccgtggccacagacctggagagcggcggagccggtgcggcttgcggcggtagcaacctggcgcccctacctcggagagagaccgaggagttcaacgatctcctggacctggactttattctctccaattcgctgacccatcctccggagtcagtggccgccaccgtgtcctcgtcagcgtcagcctcctcttcgtcgtcgccgtcgagcagcggccctgccagcgcgccctccacctgcagcttcacctatccgatccgggccgggaacgacccgggcgtggcgccgggcggcacgggcggaggcctcctctatggcagggagtccgctccccctccgacggctcccttcaacctggcggacatcaacgacgtgagcccctcgggcggcttcgtggccgagctcctgcggccagaattggacccggtgtacattccgccgcagcagccgcagccgccaggtggcgggctgatgggcaagttcgtgctgaaggcgtcgctgagcgcccctggcagcgagtacggcagcccgtcggtcatcagcgtcagcaaaggcagccctgacggcagccacccggtggtggtggcgccctacaacggcgggccgccgcgcacgtgccccaagatcaagcaggaggcggtctcttcgtgcacccacttgggcgctggaccccctctcagcaatggccaccggccggctgcacacgacttccccctggggcggcagctccccagcaggactaccccgaccctgggtcttgaggaagtgctgagcagcagggactgtcaccctgccctgccgcttcctcccggcttccatccccacccggggcccaattacccatccttcctgcccgatcagatgcagccgcaagtcccgccgctccattaccaagagctcatgccacccggttcctgcatgccagaggagcccaagccaaagaggggaagacgatcgtggccccggaaaaggaccgccacccacacttgtgattacgcgggctgcggcaaaacctacacaaagagttcccatctcaaggcacacctgcgaacccacacaggtgagaaaccttaccactgtgactgggacggctgtggatggaaattcgcccgctcagatgaactgaccaggcactaccgtaaacacacggggcaccgcccgttccagtgccaaaaatgcgaccgagcattttccaggtcggaccacctcgccttacacatgaagaggcatttttaaatcccagacagtggatatgacccacactgccagaagagaattcagtattttttacttttcacactgtcttcccgatgagggaaggagcccagccagaaagcactacaatcatggtcaagttcccaactgagtcatcttgtgagtggataatcaggaaaaatgaggaatccaaaagacaaatccgacttgaatattcctggacttacaaaatgccaagggggtgactggaagttgtggatatcagggtataaattatatccgtgagttgggggagggaagaccagaattcccttgaattgtgtattgatgcaatataagcataaaagatcaccttgtattctctttaccttctaaaagccattattatgatgttagaagaagaggaagaaattcaggtacagaaaacatgtttaaatagcctaaatgatggtgcttggtgagtcttggttctaaaggtaccaaacaaggaagccaaagttttcaaactgctgcatactttgacaaggaaaatctatatttgtcttccgatcaacatttatgacctaagtcaggtaatatacctggtttacttctttagcatttttatgcagacagtctgttatgcactgtggtttcagatgtgcaataatttgtacaatggtttattcccaagtatgccttaagcagaacaaatgtgtttttctatatagttccttgccttaataaatatgtaatataaatttaagcaaacgtctattttgtatatttgtaaactacaaagtaaaatgaacattttgtggagtttgtattttgcatactcaaggtgagaattaagttttaaataaacctataatattttatctgaaaaaaaattt

SEQ ID NO: 428714 - DNA, 2770 bp, Homo sapiens
cgctcccacccgcccgtggcccgcgcccatggccgcgcgcgctccacacaactcaccggagtccgcgccctgcgccgccgaccagttcgcagctccgcgccacggcagccagtctcacctggcggcaccgcccgcccaccgccccggccacagcccctgcgcccacggcagcaatcgaggcgaccgcgacagtggtgggggacgctgctgagtggaagagagcgcagcccggccaccggacctacttactcgccttgctgattgtctatttttgcgtttacaacttttctaagaacttttgtatacaaaggaactttttaaaaaagacgcttccaagttatatttaatccaaagaagaaggatctcggccaatttggggttttgggttttggcttcgtttcttctcttcgttgactttggggttcaggtgccccagctgcttcgggctgccgaggaccttctgggcccccacattaatgaggcagccacctggcgagtctgacatggctgtcagcgacgcgctgctcccatctttctccacgttcgcgtctggcccggcgggaagggagaagacactgcgtcaagcaggtgccccgaataaccgctggcgggaggagctctcccacatgaagcgacttcccccagtgcttcccggccgcccctatgacctggcggcggcgaccgtggccacagacctggagagcggcggagccggtgcggcttgcggcggtagcaacctggcgcccctacctcggagagagaccgaggagttcaacgatctcctggacctggactttattctctccaattcgctgacccatcctccggagtcagtggccgccaccgtgtcctcgtcagcgtcagcctcctcttcgtcgtcgccgtcgagcagcggccctgccagcgcgccctccacctgcagcttcacctatccgatccgggccgggaacgacccgggcgtggcgccgggcggcacgggcggaggcctcctctatggcagggagtccgctccccctccgacggctcccttcaacctggcggacatcaacgacgtgagcccctcgggcggcttcgtggccgagctcctgcggccagaattggacccggtgtacattccgccgcagcagccgcagccgccaggtggcgggctgatgggcaagttcgtgctgaaggcgtcgctgagcgcccctggcagcgagtacggcagcccgtcggtcatcagcgtcagcaaaggcagccctgacggcagccacccggtggtggtggcgccctacaacggcgggccgccgcgcacgtgccccaagatcaagcaggaggcggtctcttcgtgcacccacttgggcgctggaccccctctcagcaatggccaccggccggctgcacacgacttccccctggggcggcagctccccagcaggactaccccgaccctgggtcttgaggaagtgctgagcagcagggactgtcaccctgccctgccgcttcctcccggcttccatccccacccggggcccaattacccatccttcctgcccgatcagatgcagccgcaagtcccgccgctccattaccaagagctcatgccacccggttcctgcatgccagaggagcccaagccaaagaggggaagacgatcgtggccccggaaaaggaccgccacccacacttgtgattacgcgggctgcggcaaaacctacacaaagagttcccatctcaaggcacacctgcgaacccacacaggtgagaaaccttaccactgtgactgggacggctgtggatggaaattcgcccgctcagatgaactgaccaggcactaccgtaaacacacggggcaccgcccgttccagtgccaaaaatgcgaccgagcattttccaggtcggaccacctcgccttacacatgaagaggcatttttaaatcccagacagtggatatgacccacactgccagaagagaattcagtattttttacttttcacactgtcttcccgatgagggaaggagcccagccagaaagcactacaatcatggtcaagttcccaactgagtcatcttgtgagtggataatcaggaaaaatgaggaatccaaaagacaaaaatcaaagaacagatggggtctgtgactggatcttctatcattccaattctaaatccgacttgaatattcctggacttacaaaatgccaagggggtgactggaagttgtggatatcagggtataaattatatccgtgagttgggggagggaagaccagaattcccttgaattgtgtattgatgcaatataagcataaaagatcaccttgtattctctttaccttctaaaagccattattatgatgttagaagaagaggaagaaattcaggtacagaaaacatgtttaaatagcctaaatgacaaactgctgcatactttgacaaggaaaatctatatttgtcttccgatcaacatttatgacctaagtcaggtaatatacctggtttacttctttagcatttttatgcagacagtctgttatgcactgtggtttcagatgtgcaataatttgtacaatggtttattcccaagtatgccttaagcagaacaaatgtgtttttctatatagttccttgccttaataaatatgtaatataaatttaagcaaacgtctattttgtatatttgtaaactacaaagtaaaatgaacattttgtggagtttgtattttgcatactcaaggtgagaattaagttttaaataaacctataatattttatctgaaaaaaaattt

SEQ ID NO: 428715 - DNA, 2381 bp, Homo sapiens
cgagattgcagcgctggcgccctgggttcccgggtgcttcctgcctgaccagtccccatgtctgggcggtgcagtcgcgcgtggcccgccagcacgtcagtatgtcgggtggcaacaggggaccaccactgacaggtctctcccgccctgtccccgcagcgctggcgggaggagctctcccacatgaagcgacttcccccagtgcttcccggccgcccctatgacctggcggcggcgaccgtggccacagacctggagagcggcggagccggtgcggcttgcggcggtagcaacctggcgcccctacctcggagagagaccgaggagttcaacgatctcctggacctggactttattctctccaattcgctgacccatcctccggagtcagtggccgccaccgtgtcctcgtcagcgtcagcctcctcttcgtcgtcgccgtcgagcagcggccctgccagcgcgccctccacctgcagcttcacctatccgatccgggccgggaacgacccgggcgtggcgccgggcggcacgggcggaggcctcctctatggcagggagtccgctccccctccgacggctcccttcaacctggcggacatcaacgacgtgagcccctcgggcggcttcgtggccgagctcctgcggccagaattggacccggtgtacattccgccgcagcagccgcagccgccaggtggcgggctgatgggcaagttcgtgctgaaggcgtcgctgagcgcccctggcagcgagtacggcagcccgtcggtcatcagcgtcagcaaaggcagccctgacggcagccacccggtggtggtggcgccctacaacggcgggccgccgcgcacgtgccccaagatcaagcaggaggcggtctcttcgtgcacccacttgggcgctggaccccctctcagcaatggccaccggccggctgcacacgacttccccctggggcggcagctccccagcaggactaccccgaccctgggtcttgaggaagtgctgagcagcagggactgtcaccctgccctgccgcttcctcccggcttccatccccacccggggcccaattacccatccttcctgcccgatcagatgcagccgcaagtcccgccgctccattaccaagagctcatgccacccggttcctgcatgccagaggagcccaagccaaagaggggaagacgatcgtggccccggaaaaggaccgccacccacacttgtgattacgcgggctgcggcaaaacctacacaaagagttcccatctcaaggcacacctgcgaacccacacaggtgagaaaccttaccactgtgactgggacggctgtggatggaaattcgcccgctcagatgaactgaccaggcactaccgtaaacacacggggcaccgcccgttccagtgccaaaaatgcgaccgagcattttccaggtcggaccacctcgccttacacatgaagaggcatttttaaatcccagacagtggatatgacccacactgccagaagagaattcagtattttttacttttcacactgtcttcccgatgagggaaggagcccagccagaaagcactacaatcatggtcaagttcccaactgagtcatcttgtgagtggataatcaggaaaaatgaggaatccaaaagacaaaaatcaaagaacagatggggtctgtgactggatcttctatcattccaattctaaatccgacttgaatattcctggacttacaaaatgccaagggggtgactggaagttgtggatatcagggtataaattatatccgtgagttgggggagggaagaccagaattcccttgaattgtgtattgatgcaatataagcataaaagatcaccttgtattctctttaccttctaaaagccattattatgatgttagaagaagaggaagaaattcaggtacagaaaacatgtttaaatagcctaaatgatggtgcttggtgagtcttggttctaaaggtaccaaacaaggaagccaaagttttcaaactgctgcatactttgacaaggaaaatctatatttgtcttccgatcaacatttatgacctaagtcaggtaatatacctggtttacttctttagcatttttatgcagacagtctgttatgcactgtggtttcagatgtgcaataatttgtacaatggtttattcccaagtatgccttaagcagaacaaatgtgtttttctatatagttccttgccttaataaatatgtaatataaatttaagcaaacgtctattttgtatatttgtaaactacaaagtaaaatgaacattttgtggagtttgtattttgcatactcaaggtgagaattaagttttaaataaacctataatattttatctgaaaaaaaattt

SEQ ID NO: 428716 - DNA, 1225 bp, Homo sapiens
ccggccgactctctctctgtggggggggaagacgatcgtggccccggaaaaggaccgccacccacacttgtgattacgcgggctgcggcaaaacctacacaaagagttcccatctcaaggcacacctgcgaacccacacaggtgagaaaccttaccactgtgactgggacggctgtggatggaaattcgcccgctcagatgaactgaccaggcactaccgtaaacacacggggcaccgcccgttccagtgccaaaaatgcgaccgagcattttccaggtcggaccacctcgccttacacatgaagaggcatttttaaatcccagacagtggatatgacccacactgccagaagagaattcagtattttttacttttcacactgtcttcccgatgagggaaggagcccagccagaaagcactacaatcatggtcaagttcccaactgagtcatcttgtgagtggataatcaggaaaaatgaggaatccaaaagacaaaaatcaaagaacagatggggtctgtgactggatcttctatcattccaattctaaatccgacttgaatattcctggacttacaaaatgccaagggggtgactggaagttgtggatatcagggtataaattatatccgtgagttgggggagggaagaccagaattcccttgaattgtgtattgatgcaatataagcataaaagatcaccttgtattctctttaccttctaaaagccattattatgatgttagaagaagaggaagaaattcaggtacagaaaacatgtttaaatagcctaaatgatggtgcttggtgagtcttggttctaaaggtaccaaacaaggaagccaaagttttcaaactgctgcatactttgacaaggaaaatctatatttgtcttccgatcaacatttatgacctaagtcaggtaatatacctggtttacttctttagcatttttatgcagacagtctgttatgcactgtggtttcagatgtgcaataatttgtacaatggtttattcccaagtatgccttaagcagaacaaatgtgtttttctatatagttccttgccttaataaatatgtaatataaatttaagcaaacgtctattttgtatatttgtaaactacaaagtaaaatgaacattttgtggagtttgtattttgcatactcaaggtgagaattaagttttaaataaacctataatattttatctgaaaaaaaattt

SEQ ID NO: 428717 - DNA, 331 bp, Homo sapiens
aagaccaaatacttaagcacggaatgtatttctgtttatgatatggaattcaatacaccccttcagtggtataaagacattcctggatttctttaggatagggtcagagttggtttactatctggccttcagtttttaaaaggggcgattctttgatatagcaatagcgtcaattttttttttcttttacctttacaggtgagaaaccttaccactgtgactgggacggctgtggatggaaattcgcccgctcagatgaactgaccaggcactaccgtaaacacacggggcaccgcccgttccagtgccaaaaatgcgaccgagcattttc

SEQ ID NO: 428718 - DNA, 735 bp, Homo sapiens
ccacttcgggacacacgggatgatgctcaccccaccttcttcacccctagagctcatgccacccggttcctgcatgccagaggagcccaagccaaagaggggaagacgatcgtggccccggaaaaggaccgccacccacacttgtgattacgcgggctgcggcaaaacctacacaaagagttcccatctcaaggcacacctgcgaacccacacaggtagggggacaaactgcagaagggaggggggttagcttccagccccataggctaccagtggacactcctcagtgcctccttgacttcccaggttagcttccagccccataggctaccagtggacactcctcagtgcctccttggcttcccagggcagtctatcgccttgatctccgggatcactggagagaacagcaaaccggcgcctacttttctgcccaggagccttttgcttgatggatggtatctgtgtttgaatgtgcaattttgttaggcttttaaaaggcaggagattccccgcggtctgtgggcctctcctagcttggcattataatcaagaaattatactttgctatgcaaaagcatgatggcttttttaaaaaaatcgttttttaatgttcccttcccaggttcaccctccctttttgttattttgaattctggtcgtaacaattcggtcttacttttttattttttattttttgttcgttttgatttacatttttattttttttccccc

SEQ ID NO: 428719 - DNA, 2824 bp, Homo sapiens
cgctcccacccgcccgtggcccgcgcccatggccgcgcgcgctccacacaactcaccggagtccgcgccctgcgccgccgaccagttcgcagctccgcgccacggcagccagtctcacctggcggcaccgcccgcccaccgccccggccacagcccctgcgcccacggcagcaatcgaggcgaccgcgacagtggtgggggacgctgctgagtggaagagagcgcagcccggccaccggacctacttactcgccttgctgattgtctatttttgcgtttacaacttttctaagaacttttgtatacaaaggaactttttaaaaaagacgcttccaagttatatttaatccaaagaagaaggatctcggccaatttggggttttgggttttggcttcgtttcttctcttcgttgactttggggttcaggtgccccagctgcttcgggctgccgaggaccttctgggcccccacattaatgaggcagccacctggcgagtctgacatggctgtcagcgacgcgctgctcccatctttctccacgttcgcgtctggcccggcgggaagggagaagacactgcgtcaagcaggtgccccgaataaccgctggcgggaggagctctcccacatgaagcgacttcccccagtgcttcccggccgcccctatgacctggcggcggcgaccgtggccacagacctggagagcggcggagccggtgcggcttgcggcggtagcaacctggcgcccctacctcggagagagaccgaggagttcaacgatctcctggacctggactttattctctccaattcgctgacccatcctccggagtcagtggccgccaccgtgtcctcgtcagcgtcagcctcctcttcgtcgtcgccgtcgagcagcggccctgccagcgcgccctccacctgcagcttcacctatccgatccgggccgggaacgacccgggcgtggcgccgggcggcacgggcggaggcctcctctatggcagggagtccgctccccctccgacggctcccttcaacctggcggacatcaacgacgtgagcccctcgggcggcttcgtggccgagctcctgcggccagaattggacccggtgtacattccgccgcagcagccgcagccgccaggtggcgggctgatgggcaagttcgtgctgaaggcgtcgctgagcgcccctggcagcgagtacggcagcccgtcggtcatcagcgtcagcaaaggcagccctgacggcagccacccggtggtggtggcgccctacaacggcgggccgccgcgcacgtgccccaagatcaagcaggaggcggtctcttcgtgcacccacttgggcgctggaccccctctcagcaatggccaccggccggctgcacacgacttccccctggggcggcagctccccagcaggactaccccgaccctgggtcttgaggaagtgctgagcagcagggactgtcaccctgccctgccgcttcctcccggcttccatccccacccggggcccaattacccatccttcctgcccgatcagatgcagccgcaagtcccgccgctccattaccaagagctcatgccacccggttcctgcatgccagaggagcccaagccaaagaggggaagacgatcgtggccccggaaaaggaccgccacccacacttgtgattacgcgggctgcggcaaaacctacacaaagagttcccatctcaaggcacacctgcgaacccacacaggtgagaaaccttaccactgtgactgggacggctgtggatggaaattcgcccgctcagatgaactgaccaggcactaccgtaaacacacggggcaccgcccgttccagtgccaaaaatgcgaccgagcattttccaggtcggaccacctcgccttacacatgaagaggcatttttaaatcccagacagtggatatgacccacactgccagaagagaattcagtattttttacttttcacactgtcttcccgatgagggaaggagcccagccagaaagcactacaatcatggtcaagttcccaactgagtcatcttgtgagtggataatcaggaaaaatgaggaatccaaaagacaaaaatcaaagaacagatggggtctgtgactggatcttctatcattccaattctaaatccgacttgaatattcctggacttacaaaatgccaagggggtgactggaagttgtggatatcagggtataaattatatccgtgagttgggggagggaagaccagaattcccttgaattgtgtattgatgcaatataagcataaaagatcaccttgtattctctttaccttctaaaagccattattatgatgttagaagaagaggaagaaattcaggtacagaaaacatgtttaaatagcctaaatgatggtgcttggtgagtcttggttctaaaggtaccaaacaaggaagccaaagttttcaaactgctgcatactttgacaaggaaaatctatatttgtcttccgatcaacatttatgacctaagtcaggtaatatacctggtttacttctttagcatttttatgcagacagtctgttatgcactgtggtttcagatgtgcaataatttgtacaatggtttattcccaagtatgccttaagcagaacaaatgtgtttttctatatagttccttgccttaataaatatgtaatataaatttaagcaaacgtctattttgtatatttgtaaactacaaagtaaaatgaacattttgtggagtttgtattttgcatactcaaggtgagaattaagttttaaataaacctataatattttatctgaaaaaaaattt

SEQ ID NO: 428720 - DNA, 1081 bp, Homo sapiens
  misc_feature (1069)..(1069): n is a, c, g, or t
  misc_feature (1076)..(1076): n is a, c, g, or t
  misc_feature (1081)..(1081): n is a, c, g, or t
cgctcccacccgcccgtggcccgcgcccatggccgcgcgcgctccacacaactcaccggagtccgcgccctgcgccgccgaccagttcgcagctccgcgccacggcagccagtctcacctggcggcaccgcccgcccaccgccccggccacagcccctgcgcccacggcagcaatcgaggcgaccgcgacagtggtgggggacgctgctgagtggaagagagcgcagcccggccaccggacctacttactcgccttgctgattgtctatttttgcgtttacaacttttctaagaacttttgtatacaaaggaactttttaaaaaagacgcttccaagttatatttaatccaaagaagaaggatctcggccaatttggggttttgggttttggcttcgtttcttctcttcgttgactttggggttcaggtgccccagctgcttcgggctgccgaggaccttctgggcccccacattaatgaggcagccacctggcgagtctgacatggctgtcagcgacgcgctgctcccatctttctccacgttcgcgtctggcccggcgggaagggagaagacactgcgtcaagcaggtgccccgaataaccgctggcgggaggagctctcccacatgaagcgacttcccccagtgcttcccggccgcccctatgacctggcggcggcgaccgtggccacagacctggagagcggcggagccggtgcggcttgcggcggtagcaacctggcgcccctacctcggagagagaccgaggagttcaacgatctcctggacctggactttattctctccaattcgctgacccatcctccggagtcagtggccgccaccgtgtcctcgtcagcgtcagcctcctcttcgtcgtcgccgtcgagcagcggccctgccagcgcgccctccacctgcagcttcacctatccgatccgggccgggaacgacccgggcgtggcgccgggcggcacgggcggaggcctcctctatggcagggagtcgtccctcgcggtcttaactgcgctacatagctcgcgtctgcacttggcgatgacggctcgcgnacgacgngggtn

SEQ ID NO: 428721 - DNA, 2693 bp, Homo sapiens
cgctcccacccgcccgtggcccgcgcccatggccgcgcgcgctccacacaactcaccggagtccgcgccctgcgccgccgaccagttcgcagctccgcgccacggcagccagtctcacctggcggcaccgcccgcccaccgccccggccacagcccctgcgcccacggcagcaatcgaggcgaccgcgacagtggtgggggacgctgctgagtggaagagagcgcagcccggccaccggacctacttactcgccttgctgattgtctatttttgcgtttacaacttttctaagaacttttgtatacaaaggaactttttaaaaaagacgcttccaagttatatttaatccaaagaagaaggatctcggccaatttggggttttgggttttggcttcgtttcttctcttcgttgactttggggttcaggtgccccagctgcttcgggctgccgaggaccttctgggcccccacattaatgaggcagccacctggcgagtctgacatggctgtcagcgacgcgctgctcccatctttctccacgttcgcgtctggcccggcgggaagggagaagacactgcgtcaagcaggtgccccgaataaccgctggcgggaggagctctcccacatgaagcgacttcccccagtgcttcccggccgcccctatgacctggcggcggcgaccgtggccacagacctggagagcggcggagccggtgcggcttgcggcggtagcaacctggcgcccctacctcggagagagaccgaggagttcaacgatctcctggacctggactttattctctccaattcgctgacccatcctccggagtcagtggccgccaccgtgtcctcgtcagcgtcagcctcctcttcgtcgtcgccgtcgagcagcggccctgccagcgcgccctccacctgcagcttcacctatccgatccgggccgggaacgacccgggcgtggcgccgggcggcacgggcggaggcctcctctatggcagggagtccgctccccctccgacggctcccttcaacctggcggacatcaacgacgtgagcccctcgggcggcttcgtggccgagctcctgcggccagaattggacccggtgtacattccgccgcagcagccgcagccgccaggtggcgggctgatgggcaagttcgtgctgaaggcgtcgctgagcgcccctggcagcgagtacggcagcccgtcggtcatcagcgtcagcaaaggcagccctgacggcagccacccggtggtggtggcgccctacaacggcgggccgccgcgcacgtgccccaagatcaagcaggaggcggtctcttcgtgcacccacttgggcgctggaccccctctcagcaatggccaccggccggctgcacacgacttccccctggggcggcagctccccagcaggactaccccgaccctgggtcttgaggaagtgctgagcagcagggactgtcaccctgccctgccgcttcctcccggcttccatccccacccggggcccaattacccatccttcctgcccgatcagatgcagccgcaagtcccgccgctccattaccaagagctcatgccacccggttcctgcatgccagaggagcccaagccaaagaggggaagacgatcgtggccccggaaaaggaccgccacccacacttgtgattacgcgggctgcggcaaaacctacacaaagagttcccatctcaaggcacacctgcgaacccacacaggtgagaaaccttaccactgtgactgggacggctgtggatggaaattcgcccgctcagatgaactgaccaggcactaccgtaaacacacggggcaccgcccgttccagtgccaaaaatgcgaccgagcattttccaggtcggaccacctcgccttacacatgaagaggcatttttaaatcccagacagtggatatgacccacactgccagaagagaattcagtattttttacttttcacactgtcttcccgatgagggaaggagcccagccagaaagcactacaatcatggtcaagttcccaactgagtcatcttgtgagtggataatcaggaaaaatgaggaatccaaaagacaaaaatcaaagaacagatggggtctgtgactggatcttctatcattccaattctaaatccgacttgaatattcctggacttacaaaatgccaagggggtgactggaagttgtggatatcagggtataaattatatccgtgagttgggggagggaagaccagaattcccttgaattgtgtattgatgcaatataagcataaaagatcaccttgtattctctttaccttctaaaagccattattatgatgttagaagaagaggaagaaattcaggtacagaaaacatgtttaaatagcctaaatgatggtgcttggtgagtcttggttctaaaggtaccaaacaaggaagccaaagttttcaaactgctgcatactttgacaaggaaaatctatatttgtcttccgatcaacatttatgacctaagtcaggtaatatacctggtttacttctttagcatttttatgcagacagtctgttatgcactgtggtttcagatgtgcaataatttgtacaatggtttattcccaagtatgccttaagcagaacaaatgtgtttttctatatagttccttgccttaataaatatgtaatataaattta

SEQ ID NO: 428722 - DNA, 2941 bp, Homo sapiens
cgctcccacccgcccgtggcccgcgcccatggccgcgcgcgctccacacaactcaccggagtccgcgccctgcgccgccgaccagttcgcagctccgcgccacggcagccagtctcacctggcggcaccgcccgcccaccgccccggccacagcccctgcgcccacggcagcaatcgaggcgaccgcgacagtggtgggggacgctgctgagtggaagagagcgcagcccggccaccggacctacttactcgccttgctgattgtctatttttgcgtttacaacttttctaagaacttttgtatacaaaggaactttttaaaaaagacgcttccaagttatatttaatccaaagaagaaggatctcggccaatttggggttttgggttttggcttcgtttcttctcttcgttgactttggggttcaggtgccccagctgcttcgggctgccgaggaccttctgggcccccacattaatgaggtaggtgaggcgcgcggcgctgggagcagggaggggtgaggaccggtgggacgcgccggaacgacggccgaaagccgcccctgactctcctgtctccgctccctgccttgctcgcaggcagccacctggcgagtctgacatggctgtcagcgacgcgctgctcccatctttctccacgttcgcgtctggcccggcgggaagggagaagacactgcgtcaagcaggtgccccgaataaccgctggcgggaggagctctcccacatgaagcgacttcccccagtgcttcccggccgcccctatgacctggcggcggcgaccgtggccacagacctggagagcggcggagccggtgcggcttgcggcggtagcaacctggcgcccctacctcggagagagaccgaggagttcaacgatctcctggacctggactttattctctccaattcgctgacccatcctccggagtcagtggccgccaccgtgtcctcgtcagcgtcagcctcctcttcgtcgtcgccgtcgagcagcggccctgccagcgcgccctccacctgcagcttcacctatccgatccgggccgggaacgacccgggcgtggcgccgggcggcacgggcggaggcctcctctatggcagggagtccgctccccctccgacggctcccttcaacctggcggacatcaacgacgtgagcccctcgggcggcttcgtggccgagctcctgcggccagaattggacccggtgtacattccgccgcagcagccgcagccgccaggtggcgggctgatgggcaagttcgtgctgaaggcgtcgctgagcgcccctggcagcgagtacggcagcccgtcggtcatcagcgtcagcaaaggcagccctgacggcagccacccggtggtggtggcgccctacaacggcgggccgccgcgcacgtgccccaagatcaagcaggaggcggtctcttcgtgcacccacttgggcgctggaccccctctcagcaatggccaccggccggctgcacacgacttccccctggggcggcagctccccagcaggactaccccgaccctgggtcttgaggaagtgctgagcagcagggactgtcaccctgccctgccgcttcctcccggcttccatccccacccggggcccaattacccatccttcctgcccgatcagatgcagccgcaagtcccgccgctccattaccaagagctcatgccacccggttcctgcatgccagaggagcccaagccaaagaggggaagacgatcgtggccccggaaaaggaccgccacccacacttgtgattacgcgggctgcggcaaaacctacacaaagagttcccatctcaaggcacacctgcgaacccacacaggtgagaaaccttaccactgtgactgggacggctgtggatggaaattcgcccgctcagatgaactgaccaggcactaccgtaaacacacggggcaccgcccgttccagtgccaaaaatgcgaccgagcattttccaggtcggaccacctcgccttacacatgaagaggcatttttaaatcccagacagtggatatgacccacactgccagaagagaattcagtattttttacttttcacactgtcttcccgatgagggaaggagcccagccagaaagcactacaatcatggtcaagttcccaactgagtcatcttgtgagtggataatcaggaaaaatgaggaatccaaaagacaaaaatcaaagaacagatggggtctgtgactggatcttctatcattccaattctaaatccgacttgaatattcctggacttacaaaatgccaagggggtgactggaagttgtggatatcagggtataaattatatccgtgagttgggggagggaagaccagaattcccttgaattgtgtattgatgcaatataagcataaaagatcaccttgtattctctttaccttctaaaagccattattatgatgttagaagaagaggaagaaattcaggtacagaaaacatgtttaaatagcctaaatgatggtgcttggtgagtcttggttctaaaggtaccaaacaaggaagccaaagttttcaaactgctgcatactttgacaaggaaaatctatatttgtcttccgatcaacatttatgacctaagtcaggtaatatacctggtttacttctttagcatttttatgcagacagtctgttatgcactgtggtttcagatgtgcaataatttgtacaatggtttattcccaagtatgccttaagcagaacaaatgtgtttttctatatagttccttgccttaataaatatgtaatataaatttaagcaaacgtctattttgtatatttgtaaactacaaagtaaaatgaacattttgtggagtttgtattttgcatactcaaggtgagaattaagttttaaataaacctataatattttatctgaaaaaaaattt

SEQ ID NO: 428723 - DNA, 1184 bp, Homo sapiens
cgctcccacccgcccgtggcccgcgcccatggccgcgcgcgctccacacaactcaccggagtccgcgccctgcgccgccgaccagttcgcagctccgcgccacggcagccagtctcacctggcggcaccgcccgcccaccgccccggccacagcccctgcgcccacggcagcaatcgaggcgaccgcgacagtggtgggggacgctgctgagtggaagagagcgcagcccggccaccggacctacttactcgccttgctgattgtctatttttgcgtttacaacttttctaagaacttttgtatacaaaggaactttttaaaaaagacgcttccaagttatatttaatccaaagaagaaggatcccagccagaaagcactacaatcatggtcaagttcccaactgagtcatcttgtgagtggataatcaggaaaaatgaggaatccaaaagacaaaaatcaaagaacagatggggtctgtgactggatcttctatcattccaattctaaatccgacttgaatattcctggacttacaaaatgccaagggggtgactggaagttgtggatatcagggtataaattatatccgtgagttgggggagggaagaccagaattcccttgaattgtgtattgatgcaatataagcataaaagatcaccttgtattctctttaccttctaaaagccattattatgatgttagaagaagaggaagaaattcaggtacagaaaacatgtttaaatagcctaaatgatggtgcttggtgagtcttggttctaaaggtaccaaacaaggaagccaaagttttcaaactgctgcatactttgacaaggaaaatctatatttgtcttccgatcaacatttatgacctaagtcaggtaatatacctggtttacttctttagcatttttatgcagacagtctgttatgcactgtggtttcagatgtgcaataatttgtacaatggtttattcccaagtatgccttaagcagaacaaatgtgtttttctatatagttccttgccttaataaatatgtaatataaatttaagcaaacgtctattttgtatatttgtaaactacaaagtaaaatgaacattttgtggagtttgtattttgcatactcaaggtgagaattaagttttaaataaacctataatattttatctgaaaaaaaattt

SEQ ID NO: 428724 - DNA, 1337 bp, Homo sapiens
aaaataaataaataagtaacttgcaacagtcgggttcttattgctcagtggacatttatcagcgactactaccatgggccaaggtcatgtggaattattgaaaacacagtggactgaatttaatggcattagagattatcacaagagaggaagtatgtgcaacacccttttttcagatgccattctggaatataaactttatgaagctttaaagttcatcatgctgtatcaagtcactgaagtttatgaacaaatgaagactaaaaaggtcattcccagtctttttagactcctgttttccagggagacatcctctgatcctttgagcttcatgatgaatcacctgaattctgtaggcgacacatgtggactagagcagattgatatgtttatacttggatactcccttgaagtaaagataaaagtgttcagactgttcaagtttaactccagagactttgaagtctgctacccagaggagcctctcagggactggccggagatctccctgctgaccgagaacgaccgccactaccacattccagtcttttaagtccgctgggggccgaacagcagtgctcaccagtgacggtggtcacagttgcaataaagtctctctctgaaaccaaagctagcatttcagcatggaaggaattaggaccttttcttcaggattacaggtacactggatgcagccatgcatggatggtttttctttatttttcagtgatttcctctgaagcagctgcactgatacatttgggagttggtggcttgactttgtccataaggggcgtggccacttcacatgatggcgggcctttaagagcacaaagaagtttaatatggacaacaacaggaaaaagcaagaagaaaacaagtagggaaaaacagctaacctggagagaaagaatttctttaacctttatgttcttcattaaaaatcttatcttggactgatttgagggatttttagaaacatggccttattttatataagcattaccttcccaggaatctttgttgtatattaatttttgataaccatttgattaactttaaaattaagtatatgtgtgtatatatacatatgtatgtttatatacacacatgtatctgtatagttttatatatacatatatacacatagacatacagagaaccactactttgtaatagtgtacagtttgttttatatctctttactttttttgttactattttatctggccagcgtaatagttttatttagattttttaaaattctgtagattaaagcaaatgacagttattgaactatcacaaaactattaaactgtggtacatttaatgtgtaa

SEQ ID NO: 428725 - DNA, 2854 bp, Homo sapiens
gcggccgtcgcgtctgacagaccactgcagaccacgggccgaggcccagcgcccgtccgcagcgcggccggcatggcggcgacaaggagccccacgcgggcaagggagcgggagcggtctggcgctcccgccgcaggaagtgaccaagttcactcctggatgctagctacaagccaagccttagacactgtctggagaatggcaaaaggctttgtgatgttggcagtttcatttctggtggctgccatctgctacttccggaggctacatttatattcagggcacaagctgaaatggtggattggatatctgcagagaaaattcaaaaggaacctcagtgtggaggcagaggttgatttactcagttattgtgcaagagaatggaaaggagagacaccccgtaacaagctgatgaggaaggcttatgaggagctattttggcggcatcacattaaatgtgttcgacaagtaaggagagataactatgatgctctcagatcagtgttatttcagatattcagccagggcatctcttttccatcatggatgaaagaaaaggacattgttaagcttcctgaaaaactgctgttttcacaaggttgtaattggattcagcagtacagttttggtcctgagaagtatacaggctcgaatgtgtttggaaaactacggaaatatgtggaattattgaaaacacagtggactgaatttaatggcattagagattatcacaagagaggaagtatgtgcaacacccttttttcagatgccattctggaatataaactttatgaagctttaaagttcatcatgctgtatcaagtcactgaagtttatgaacaaatgaagactaaaaaggtcattcccagtctttttagactcctgttttccagggagacatcctctgatcctttgagcttcatgatgaatcacctgaattctgtaggcgacacatgtggactagagcagattgatatgtttatacttggatactcccttgaagtaaagataaaagtgttcagactgttcaagtttaactccagagactttgaagtctgctacccagaggagcctctcagggactggccggagatctccctgctgaccgagaacgaccgccactaccacattccagtcttttaagtccgctgggggccgaacagcagtgctcaccagtgacggtggtcacagttgcaataaagtctctctctgaaaccaaagctagcatttcagcatggaaggaattaggaccttttcttcaggattacaggtacactggatgcagccatgcatggatggtttttctttatttttcagtgatttcctctgaagcagctgcactgatacatttgggagttggtggcttgactttgtccataaggggcgtggccacttcacatgatggcgggcctttaagagcacaaagaagtttaatatggacaacaacaggaaaaagcaagaagaaaacaagtagggaaaaacagctaacctggagagaaagaatttctttaacctttatgttcttcattaaaaatcttatcttggactgatttgagggatttttagaaacatggccttattttatataagcattaccttcccaggaatctttgttgtatattaatttttgataaccatttgattaactttaaaattaagtatatgtgtgtatatatacatatgtatgtttatatacacacatgtatctgtatagttttatatatacatatatacacatagacatacagagaaccactactttgtaatagtgtacagtttgttttatatctctttactttttttgttactattttatctggccagcgtaatagttttatttagattttttaaaattctgtagattaaagcaaatgacagttattgaactatcacaaaactattaaactgtggtacatttaatgtgtaatttaatgtgtggaatctcattatggtaggcagaataatgccctatgctccccaaagatgtctgtgtctgaatcctcagagccgtaaagggctaaatgggttaaatgggaaaggagaattaaggttgcaggtggaactgagatgctaatccaatgatgctgaaatagggagatttttctagattctccaggtggacgcagtgtaatcagaatggttcttaaaagtggaagagggaattggaagagtgtcagagtcagaggggaatgtgaaatatggaagaacggttagagagagatgcaccattgctggctttgaagatggaggaaggggccataagccagggagttgcaggcagcctgtagaattgagactggaaaggaaacagaaacttccccatagcctccagaaggaacgcagccctgccaacaccttgattttagcccagtgaagcctgtgttggacctctaatctgcagaactgtaagataatagatttgtgtttaagccactaagtttgtggtaatgtgttgtagcaacagaaaactagtattctcaggctagtttttggtcgtctttattttggaaatacttttctagtttaatttgatagttttttttttggaggtactttgctagtctgttttgagtttcagtacataagaataatttttaaaatcttgctaattatatattacttcaaagtcacaaatccctttctaagaatgacttacttcacgagatatttagcactatcattttcccagatgttcatattatttctgcaataaattaaaagggagtgtgtcaaatgctgtcatgtctgaaattagcattcatattcttttgcaatggggatgatcagtcgtgtgtactacatgaaccatgtctgatggtagcttgttcccactgtcattttgttttctggttga

SEQ ID NO: 428726 - DNA, 1927 bp, Homo sapiens
gcggccgtcgcgtctgacagaccactgcagaccacgggccgaggcccagcgcccgtccgcagcgcggccggcatggcggcgacaaggagccccacgcgggcaagggagcgggagcggtctggcgctcccgccgcaggaagtgaccaagttcactcctggatgctagctacaagccaagccttagacactgtctggagaatggcaaaaggctttgtgatgttggcagtttcatttctggtggctgccatctgctacttccggaggctacatttatattcagggcacaagctgaaatggtggattggatatctgcagagaaaattcaaaaggaacctcagtgtggaggcagaggttgatttactcagttattgtgcaagagaatggaaaggagagacaccccgtaacaagctgatgaggaaggcttatgaggagctattttggcggcatcacattaaatgtgttcgacaagtaaggagagataactatgatgctctcagatcagtgttatttcagatattcagccagggcatctcttttccatcatggatgaaagaaaaggacattgttaagcttcctgaaaaactgctgttttcacaaggttgtaattggattcagcagtacagttttggtcctgagaagtatacaggctcgaatgtgtttggaaaactacggaaatatgtggaattattgaaaacacagtggactgaatttaatggcattagagattatcacaagagaggaagtatgtgcaacacccttttttcagatgccattctggaatataaactttatgaagctttaaagttcatcatgctgtatcaagtcactgaagtttatgaacaaatgaagactaaaaaggtcattcccagtctttttagactcctgttttccagggagacatcctctgatcctttgagcttcatgatgaatcacctgaattctgtaggcgacacatgtggactagagcagattgatatgtttatacttggatactcccttgaagtaaagataaaagtgttcagactgttcaagtttaactccagagactttgaagtctgctacccagaggagcctctcagggactggccggagatctccctgctgaccgagaacgaccgccactaccacattccagtcttttaagtccgctgggggccgaacagcagtgctcaccagtgacggtggtcacagttgcaataaagtctctctctgaaaccaaagctagcatttcagcatggaaggaattaggaccttttcttcaggattacaggtacactggatgcagccatgcatggatggtttttctttatttttcagtgatttcctctgaagcagctgcactgatacatttgggagttggtggcttgactttgtccataaggggcgtggccacttcacatgatggcgggcctttaagagcacaaagaagtttaatatggacaacaacaggaaaaagcaagaagaaaacaagtagggaaaaacagctaacctggagagaaagaatttctttaacctttatgttcttcattaaaaatcttatcttggactgatttgagggatttttagaaacatggccttattttatataagcattaccttcccaggaatctttgttgtatattaatttttgataaccatttgattaactttaaaattaagtatatgtgtgtatatatacatatgtatgtttatatacacacatgtatctgtatagttttatatatacatatatacacatagacatacagagaaccactactttgtaatagtgtacagtttgttttatatctctttactttttttgttactattttatctggccagcgtaatagttttatttagattttttaaaattctgtagattaaagcaaatgacagttattgaactatcacaaaactattaaactgtggtacatttaatgtgtaa

SEQ ID NO: 428727 - DNA, 675 bp, Homo sapiens
gacgtggcgggttgctttccaaaatggcgcgggtgctgaaggctgcagccgcgaatgccgtagggcttttttccagacttcaagctcccattccaacagtaagagcttcttccacatcacagcccttggatcaagtgacaggttctgtgtggaacctgggtcgactcaaccatgtagccatagcagtgccagatttggaaaaggctgcagcattttataagaatattctgggggcccaggtggataatattaatgcagctgtgatggatttgaaaaaaaagaagatccgcagtctaagtgaagaggtcaaaataggagcacatggaaaaccagtgatttttctccatcctaaagactgtggtggagtccttgtggaactggagcaagcttgatttatatttgcaagcaactaaattaattgacctgaaaaagcctatcaaatactatcaaaatgtactatgacattgagtccttcactgcttccatcatgtaaaagttcacagttaaagactgaattacagaaagattaaaatatatacatatataaatacataaatatgtatattatttagattaacaaacatatttgttaatttgaatttgaagaaaatcttgattactaattacttagggaacattattaaaatcatatagaaataaattattcctcttcta

SEQ ID NO: 428728 - DNA, 837 bp, Homo sapiens
gacgtggcgggttgctttccaaaatggcgcgggtgctgaaggctgcagccgcgaatgccgtagggcttttttccagacttcaagctcccattccaacagtaagagcttcttccacatcacagcccttggatcaagtgacaggttctgtgtggaacctgggtcgactcaaccatgtagccatagcagtgccagatttggaaaaggctgcagcattttataagaatattctgggggcccaggtaagtgaagcggtccctcttcctgaacatggagtatctgttgtttttgtcaacctgggaaataccaagatggaactgcttcatccattgggacgtgacagtccaattgcaggttttctgcagaaaaacaaggctggaggaatgcatcacatctgcatcgaggtggataatattaatgcagctgtgatggatttgaaaaaaaagaagatccgcagtctaagtgaagaggtcaaaataggagcacatggaaaaccagtgatttttctccatcctaaagactgtggtggagtccttgtggaactggagcaagcttgatttatatttgcaagcaactaaattaattgacctgaaaaagcctatcaaatactatcaaaatgtactatgacattgagtccttcactgcttccatcatgtaaaagttcacagttaaagactgaattacagaaagattaaaatatatacatatataaatacataaatatgtatattatttagattaacaaacatatttgttaatttgaatttgaagaaaatcttgattactaattacttagggaacattattaaaatcatatagaaataaattattcctcttcta

SEQ ID NO: 428729 - DNA, 484 bp, Homo sapiens
cccccggactgcaggaattcggcacgagatttatttccctttcttaaggtggataatattaatgcagctgtgatggatttgaaaaaaaagaagatccgcagtctaagtgaagaggtcaaaataggagcacatggaaaaccagtgatttttctccatcctaaagactgtggtggagtccttgtggaactggagcaagcttgatttatatttgcaagcaactaaattaattgacctgaaaaagcctatcaaatactatcaaaatgtactatgacattgagtccttcactgcttccatcatgtaaaagttcacagttaaagactgaattacagaaagattaaaatatatacatatataaatacataaatatgtatattatttagattaacaaacatatttgttaatttgaatttgaagaaaatcttgattactaattacttagggaacattattaaaatcatatagaaataaattattcctcttcta

SEQ ID NO: 428730 - DNA, 514 bp, Homo sapiens
  misc_feature (492)..(492): n is a, c, g, or t
cccccggactgcaggaattcggcacgagatttatttccctttcttaaggtggataatattaatgcagctgtgatggatttgaaaaaaaagaagatccgcagtctaagtgaagaggtcaaaataggagcacatggaaaaccagtgatttttctccatcctaaagactgtggtggagtccttgtggaactggagcaagcttgatttatatttgcaagcaactaaattaattgacctgaaaaagcctatcaaatactatcaaaatgtactatgacattgagtccttcactgcttccatcatgtaaaagttcacagttaaagactgaattacagaaagattaaaatatatacatatataaatacataaatatgtatattatttagattaacaaacatatttgttaatttgaatttgaagaaaatcttgattactaattacttagggaacattattaaaatcatatagaaataaattattcctcttctaaaaaaaanaaacaactcgaggaggggccgc

SEQ ID NO: 428731 - DNA, 1300 bp, Homo sapiens
gacgtggcgggttgctttccaaaatggcgcgggtgctgaaggctgcagccgcgaatgccgtaggtgaataccgggcaccggcgaccttcgccatgggacagggagcgtgggaacggcggtcgggggcggaggaggcctcggcgtggccaaagcaccttgatctaatgtcctcccccgggggcgcgttccacagcagctgctgtcacttaggcagagggtgccttccagaagcgccaccgcttagtagcggggattgccttgtgcatgagtcccatttccatccgagagctgtgcgccttgggctctgcaccttccagtatgtgggcgggagagtcgagggaacttgcccggcaggtcaggcagggcagggacagaagtaaatagaagcggatcggtaagttattttaccgcgcaccaataaagagactggggagaaaccagaaaggagagcacgttccgtaaaaacaacaactactagtcggccgaactccaagcgtgaccagctttctgttgggaacactcaaagggcttttttccagacttcaagctcccattccaacagtaagagcttcttccacatcacagcccttggatcaagtgacaggttctgtgtggaacctgggtcgactcaaccatgtagccatagcagtgccagatttggaaaaggctgcagcattttataagaatattctgggggcccaggtaagtgaagcggtccctcttcctgaacatggagtatctgttgtttttgtcaacctgggaaataccaagatggaactgcttcatccattgggacgtgacagtccaattgcaggttttctgcagaaaaacaaggctggaggaatgcatcacatctgcatcgaggtggataatattaatgcagctgtgatggatttgaaaaaaaagaagatccgcagtctaagtgaagaggtcaaaataggagcacatggaaaaccagtgatttttctccatcctaaagactgtggtggagtccttgtggaactggagcaagcttgatttatatttgcaagcaactaaattaattgacctgaaaaagcctatcaaatactatcaaaatgtactatgacattgagtccttcactgcttccatcatgtaaaagttcacagttaaagactgaattacagaaagattaaaatatatacatatataaatacataaatatgtatattatttagattaacaaacatatttgttaatttgaatttgaagaaaatcttgattactaattacttagggaacattattaaaatcatatagaaataaattattcctcttcta

SEQ ID NO: 428732 - DNA, 867 bp, Homo sapiens
  misc_feature (845)..(845): n is a, c, g, or t
gacgtggcgggttgctttccaaaatggcgcgggtgctgaaggctgcagccgcgaatgccgtagggcttttttccagacttcaagctcccattccaacagtaagagcttcttccacatcacagcccttggatcaagtgacaggttctgtgtggaacctgggtcgactcaaccatgtagccatagcagtgccagatttggaaaaggctgcagcattttataagaatattctgggggcccaggtaagtgaagcggtccctcttcctgaacatggagtatctgttgtttttgtcaacctgggaaataccaagatggaactgcttcatccattgggacgtgacagtccaattgcaggttttctgcagaaaaacaaggctggaggaatgcatcacatctgcatcgaggtggataatattaatgcagctgtgatggatttgaaaaaaaagaagatccgcagtctaagtgaagaggtcaaaataggagcacatggaaaaccagtgatttttctccatcctaaagactgtggtggagtccttgtggaactggagcaagcttgatttatatttgcaagcaactaaattaattgacctgaaaaagcctatcaaatactatcaaaatgtactatgacattgagtccttcactgcttccatcatgtaaaagttcacagttaaagactgaattacagaaagattaaaatatatacatatataaatacataaatatgtatattatttagattaacaaacatatttgttaatttgaatttgaagaaaatcttgattactaattacttagggaacattattaaaatcatatagaaataaattattcctcttctaaaaaaaanaaacaactcgaggaggggccgc

SEQ ID NO: 428733 - DNA, 869 bp, Homo sapiens
gacgtggcgggttgctttccaaaatggcgcgggtgctgaaggctgcagccgcgaatgccgtagggcttttttccagacttcaagctcccattccaacagtaagagcttcttccacatcacagcccttggatcaagtgacaggttctgtgtggaacctgggtcgactcaaccatgtagccatagcagtgccagatttggaaaaggctgcagcattttataagaatattctgggggcccaggtaagtgaagcggtccctcttcctgaacatggagtatctgttgtttttgtcaacctgggaaataccaagatggaactgcttcatccattgggacgtgacagtccaattgcaggttttctgcagaaaaacaaggctggaggaatgcatcacatctgcatcgaggtggataatattaatgcagctgtgatggatttgaaaaaaaagaagatccgcagtctaagtgaagaggtcaaaataggagcacatggaaaaccagtgatttttctccatcctaaagactgtggtggagtccttgtggaactggagcaagcttgatttatatttgcaagcaactaaattaattgacctgaaaaagcctatcaaatactatcaaaatgtactatgacattgagtccttcactgcttccatcatgtaaaagttcacagttaaagactgaattacagaaagattaaaatatatacatatataaatacataaatatgtatattatttagattaacaaacatatttgttaatttgaatttgaagaaaatcttgattactaattacttagggaacattattaaaatcatatagaaataaattattcctcttctaccaaaaaaaacaaaacaaacaaaaaaccaaaa

SEQ ID NO: 428734 - DNA, 1332 bp, Homo sapiens
gacgtggcgggttgctttccaaaatggcgcgggtgctgaaggctgcagccgcgaatgccgtaggtgaataccgggcaccggcgaccttcgccatgggacagggagcgtgggaacggcggtcgggggcggaggaggcctcggcgtggccaaagcaccttgatctaatgtcctcccccgggggcgcgttccacagcagctgctgtcacttaggcagagggtgccttccagaagcgccaccgcttagtagcggggattgccttgtgcatgagtcccatttccatccgagagctgtgcgccttgggctctgcaccttccagtatgtgggcgggagagtcgagggaacttgcccggcaggtcaggcagggcagggacagaagtaaatagaagcggatcggtaagttattttaccgcgcaccaataaagagactggggagaaaccagaaaggagagcacgttccgtaaaaacaacaactactagtcggccgaactccaagcgtgaccagctttctgttgggaacactcaaagggcttttttccagacttcaagctcccattccaacagtaagagcttcttccacatcacagcccttggatcaagtgacaggttctgtgtggaacctgggtcgactcaaccatgtagccatagcagtgccagatttggaaaaggctgcagcattttataagaatattctgggggcccaggtaagtgaagcggtccctcttcctgaacatggagtatctgttgtttttgtcaacctgggaaataccaagatggaactgcttcatccattgggacgtgacagtccaattgcaggttttctgcagaaaaacaaggctggaggaatgcatcacatctgcatcgaggtggataatattaatgcagctgtgatggatttgaaaaaaaagaagatccgcagtctaagtgaagaggtcaaaataggagcacatggaaaaccagtgatttttctccatcctaaagactgtggtggagtccttgtggaactggagcaagcttgatttatatttgcaagcaactaaattaattgacctgaaaaagcctatcaaatactatcaaaatgtactatgacattgagtccttcactgcttccatcatgtaaaagttcacagttaaagactgaattacagaaagattaaaatatatacatatataaatacataaatatgtatattatttagattaacaaacatatttgttaatttgaatttgaagaaaatcttgattactaattacttagggaacattattaaaatcatatagaaataaattattcctcttctaccaaaaaaaacaaaacaaacaaaaaaccaaaa

SEQ ID NO: 428735 - DNA, 781 bp, Homo sapiens
gacgtggcgggttgctttccaaaatggcgcgggtgctgaaggctgcagccgcgaatgccgtagggcttttttccagacttcaagctcccattccaacagtaagagcttcttccacatcacagcccttggatcaagtgacaggttctgtgtggaacctgggtcgactcaaccatgtagccatagcagtgccagatttggaaaaggctgcagcattttataagaatattctgggggcccaggtaagtgaagcggtccctcttcctgaacatggagtatctgttgtttttgtcaacctgggaaataccaagatggaactgcttcatccattgggacgtgacagtccaattgcaggttttctgcagaaaaacaaggctggaggaatgcatcacatctgcatcgaggtggataatattaatgcagctgtgatggatttgaaaaaaaagaagatccgcagtctaagtgaagaggtcaaaataggagcacatggaaaaccagtgatttttctccatcctaaagactgtggtggagtccttgtggaactggagcaagcttgatttatatttgcaagcaactaaattaattgacctgaaaaagcctatcaaatactatcaaaatgtactatgacattgagtccttcactgcttccatcatgtaaaagttcacaggtatattatttagattaacaaacatatttgttaatttgaatttgaagaaaatcttgattactaattacttagggaacattattaaaatcatatagaaataaattattcctcttcta

SEQ ID NO: 428736 - DNA, 417 bp, Homo sapiens
cagaggagatagactgcatgagctctcaaagttttttctaagtcttatgatactataagttggtatttttatgatctcaaatgtgttcaatttatttccctttcttaaggtggataatattaatgcagctgtgatggatttgaaaaaaaagaagatccgcagtctaagtgaagaggtcaaaataggagcacatggaaaaccagtgatttttctccatcctaaagactgtggtggagtccttgtggaactggagcaagcttgatttatatttgcaagcaactaaattaattgacctgaaaaagcctatcaaatactatcaaaatgtactatgacattgagtccttcactgcttccatcatgtaaaagttcacagttaaagactgaattacagaaagattaaaatatatacatatataa

SEQ ID NO: 428737 - DNA, 3463 bp, Homo sapiens
gtcaaaccagaaccgagacacttaaaaagtacttcattttttgaatggaaaatattggagaaaagtatgggagatgcaggtagcatgtgagtaaatactacggtctagccttcgagcatcccaaattccgggggtaacttgacagtgctgtgctctcctttgtcatttatatctggcttaggaatggaatagtaataacaagatgccagtgatttggaatagtttgttatagaacattcagtgcaaaatagtgaaaatgtttggtcttcagaagtgctgtagttgttggtcattgccttaaagcagtctgcttgacgctaggagcactgaagcagtccagctccatcaagagcactgttgaagggagaagaacccttgttcaggaagccttagaaagggatccttaaaatagtactctacgcagacaagtgaaaattcttttaaactggatattactcaacatgttttcagatgtttccactacattgaggcaaactttttaaaagtggaatgcaaatagcattttactttagtatttctgcttttttctttctgtttctttggtaattgaaagtttgttgatgaatatttgtgtaaaacgcattcaagtctataacctttccaattacctgtggcccttagtcccacaggagtccctgttggaagggggtaaacactggatattaatgttgctgagtgagtctttctagccaggacaagctgattggaatttttgaatggtagagaagaaacagcacaaaggcacttgccattttaagtgtttggagaaagagaaccttttaagtttggattgggtgagctttcttctaaaaggagcttctgaagtaattgcaaaggaatagaatcgactatttttatagtatatttaatatatttgtatataactataataggaaccctctacatgcctcccacttttctaatttacttccccttttgccatagcactagtatagcctcatccgcatgggtaatgtgcctattgtcagcctaccaaaagatagtgctgctgctttatgagacaggtgagaagacccaactctcatgcctggggatcctttacggaaggaatagcacacacttttaaaacaacataccacagtctaaaagcatcattttgaaatgtaacaagcactttattgcaattactcatttgataaagtttattcttaggcgttaaccatttctaaaggatccccaaatcatcacttacttaggtgaaattatataaaatgacacatttctgagaaatgtttaggtccagtgaaccgtagttggtttatgggagtgatttcaagatagccaaatgaactttgatttttgttttgaatgtggtggagtcaagagattgtagatgcctagtttgatttaaacactattgtaaacctatcttgcctattgtgtggacaccaaaagagaccaatgagcctgtttatttttcagaggtctaggaaaattgcatccgtgtgagtagatgtacagaactaatctaaaagtgattgctagtaacattttagaatataataatttcaagaattattctgagtgttttaaatgtgccctgaaatgttggcatgtcatttcagcatttccatttgaattgctcttgtaatatttttgcacaaaaaggactgagaaaaagaatactttggttaaaggaaaaaaatagtataatttggtctttaattttaatgtctcctgtggaaacactggggatgaattttgttggcacagttattcaggatatttaaaacagtgttgaacagttcacaagaaattaagcaaacttggattttaaaaattaaaatactttctttccatgtgactgttttgcatagttttttccccctatgtcataacactacattccttgtttttcttaaataaaatactctgcaggttttgttgtgagtgtttataacagtattttgtaagctgcctgggtttcctcagggaaacattatttagtggaataggatatagtttatggagagacaactaagtgaaattccatcaccaccaccagcaaacactgaggtgctgcattaagtgacaatcaaactagtaagtatttatgaaagaatttagaaaggggttcaaagaagcaattgcttttaaagcagttctctggggttcttgaataaaaatggctaaatgtatttatttatattttaaaatacctgtgtgttctgttttctcatcaaagtgatttcggtgtcatgtatttaatgtgtggtttgttttgttttgcaccatattcttcttagggaactggctctgatttggggtgcagtcaccaactctcatgataatctttacggacagtctgaatctactttacttcaggacggcagtggaggggccaactccagatgcccctgcacttccctcctcaagtcatctaagaaagaattttagaaataactcctttcaaatctgattcatacagttccaacctttttctagtttcacttgctgccttctttggttttatgggcactttttgtgtgattacttccccaacacagtcaaaggccagtatgacagaaccaatggcacatgatgcctctattttgcccatttggggaaatgttagtaaaagaaatagcatcttttaatggctgtcattatcatatccatattaaaatccatttaaagttcttaaatttggcggaataatgtatacaggctgtaaacttctacaaaaaatgtttgctgtctttaatatggtgtcaagttacttggtcctttgaaaacaaaacaaaacttccatacacagcactgcccagtaaagcagtgttggaatattggaaacctagacattcgaggatccttcttgctcacaagcattggaacagaatcctccactttaggactcagagaagctatggagtcccacaggctaggtatagcacacaacttagagaacggtagttaaagcacgtcaaccacaattgaatttaatgatctaaaaaatatttcttaactctgagggttaaactgaagatacgttttcaaataaaagcttttaaatttcttaggaaacaaactgtgacatcgcttttaaaaatgacattcaaatgtttataatgtgtgtttttgagttggcttggactagtgcaagttcactgctggcaatggttatgccagtagttaagttaaaataagttgttaccttcagattgatgtcttgtataaccagacaatcatcttcaagcaaaaaaattggccaggaaatgtctttttaaaaaaaaaaaaaaaaaaaaagatgtgtcagccagaacagttaccattcagaccatactggaatgattttgaaatctttactatggtttaagttggggaaggcctcagtatggcattttcatattcactctatgtaaagattgaagcccaaagatgagttaaattcagtgctgtattgaaaccagtcagtgcaaaa

SEQ ID NO: 428738 - DNA, 783 bp, Homo sapiens
ctcaagtgatccacccgcctcggcctcccagagtgctgggattacagatgtgagccgccgcgcctagccagttcactttcttaatgatgtcttttgatgatggaaagtcctaactgtaatggagttcgctttcccaatgctgactcttatggttagtgcctttggagtttaagaagcatttcctgctccaagatcatgaagatactctcctctgtcttatggaagcttggttatttttgccttcacatttagatctttcatctaccccagatgaatgctacctgcttttaccctgagaactgtgtttggggggaccatgtacccctgaggggctcttcggggcacacagctcttctcttaccatgggcctcagaggcaggcccggagtgagtttcagactttgtgagtgaagcccttcaaaacacgaaatattcccagaaacccagtaagtgcagcagacctactctaactgggggcagtgggaggacgcccacatcctgccccctcagcccctctctgacaccccagggtggccctgaatccaggggccctaggagcccagctttagaatcaccgcgctgggtactcgatggagcttgtctctgatgcagaacactcctagcattctctctcagggctcttttcatttgaatgacctagaggattgagctcatgtaggcactgaaggcttccacctctcccatacccgcaaggccgatctgccttcagctcccagcaagtgtggggcagcgcgggccacagagtagggtgcagggatggggc

SEQ ID NO: 428739 - DNA, 2809 bp, Homo sapiens
  misc_feature (1)..(2): n is a, c, g, or t
  misc_feature (4)..(4): n is a, c, g, or t
  misc_feature (6)..(7): n is a, c, g, or t
nncncnnggcttctggccttctcctgtcagcagttcctcagtcaacatgtacttcagatcttcctgggcttatgtgcagaaaatcacttccatccagggaattctagcccagggcattggaaacagcaggggcagcagtattcccatgtaagctgttggtttgaaaatgcagaaggtcaggagagaggaggtggctccaaaccctggtctgcaaggacagaggagagagaaacctcaagggcattccccagcccactccaaagacagtcagcaagtcctagaaaaggcaacatggtggtagaaacagagcccagctcagcccaaagaccaaaccctgtgcagctagacaaaggcttgaaggaattagaaaccttgagatttggagcaatcaactgtagagagtatgaaccggaccataacctggaatcaaactttattacaaacccgaggaccctcttagggaagaagccctacatttgcagtgattgtgggcgaagctttaaagatagatcaaccctcatcagacaccatcgtatacactcgatggagaagccttatgtgtgcagtgagtgcgggcgaggttttagccagaagtccaacctcagcagacaccagagaacacattcagaagagaagccttatttgtgcagggagtgtgggcaaagctttagaagtaagtccatcctcaatagacatcagtggactcactcagaggagaagccctatgtttgcagcgagtgtgggcgaggctttagcgagaagtcatccttcatcagacaccagaggacacactccggtgagaaaccctatgtgtgcctggagtgtggacgaagctttgtgataagtcaaccctcagaaaacaccagaggatacactcaggggagaagccttatgtttgcagggagtgtgggcgaggctttagccagaactcagatctcatcaaacaccagaggacacacttggatgagaagccttatgtttgcagggagtgtgggcgaggcttttgtgacaagtcaaccctcatcatacacgagcggacgcactctggagagaagccttatgtgtgtggtgagtgtggccgaggctttagtcggaaatcactcctccttgtccaccagaggacacactcaggggagaagcattatgtctgcagggagtgtaggcgaggttttagccagaagtcaaatctcatcagacaccagaggacgcactcaaatgagaagccttatatttgcagggaatgtgggcgaggcttttgtgacaagtcaaccctcattgtacatgagaggacacactcaggagagaagccttacgtgtgcagtgagtgtggccgaggctttagccggaaatcactcctccttgtccaccagaggacacactcaggggagaagcattatgtttgtagggagtgtgggcgaggctttagtcataagtcaaatctcatcagacaccagaggacacactgacgggagaaacctgtgtatgcaggggtcatgaacaagacctgagtgaccagtcaagcctcatgttaccccagagagacacatggggagtagaccctgtgtacacagattgtgagtgaagttccagagatgtgtcagcccttatcaggcatgggagggacacgttcaggagaggagccttatgagtatagagtacgggcaactgtagccatcagtcagccttgagcatgcacggacacacttaggagagaagtttatgtgtagggactgtgggaaggctttagcaataatcaacatttaccagacatccaatgacagcctcaggggaaagcacccttgtctggggagtgttggggagcatcagtaaaagaatggacactcaggcacagagtggccctcaggaaggaggtctttgtttgtaggatgtatgggcaaagcttttgtgatcacacaccacagggagaatctgcatgtggggacactgtggagctctgcccagatgaccttttcaggggtaacaccccagctgcttgagagaacagtgttgctgctggcagagatgcattccagagatgcactccgctctggaactcactctcagccacagggagctgcatgcaccacaggggcaatgcacctttgcaggggtaccttctggccccaacccttgactcaacggggacaactccagaaggtcattccagatccagagatccccatcgaactgaaggatcactgggttgcagacacattgcaggtcagcttcttcctctgcccagtcctgccctcactccccagtgaatcctcaattttctgtctcgttgtctgtccagataattgattctaagacatgttaggtatataaggagtgtagataaggcttcagccatgagtcaccccccagtaagccccagagtatattgaatagaaattctgcatgtgtggggagaatggacaaggacttaggaaaaagtcctcatcaaagaacagcttttttgggacaagctttacatgggtggggagggaaaatgtgaaacacattagcaataagttaaacctcatcttgtactaaaggaggacacactcagggagaagacctctgtgggcagggcttgtgggtggagcttcatcccgatgtcactcctcaactgacttaggaggacagtcttgctaccccaagtcactacctcactcacctctgagggattttcaggaaatgtcttgactcccccatgtactctgtatgtgagcgaagatggcagtaactgttaaataagcattcttttctacttcttggaatcagatgaaataaaaaagcaggctttatttaagtaatcaaaaaaaga

SEQ ID NO: 428740 - DNA, 1843 bp, Homo sapiens
  misc_feature (1)..(2): n is a, c, g, or t
  misc_feature (4)..(4): n is a, c, g, or t
  misc_feature (6)..(7): n is a, c, g, or t
nncncnnggcttctggccttctcctgtcagcagttcctcagtcaacatgtacttcagatcttcctgggcttatgtgcagaaaatcacttccatccagggaattctagcccagggcattggaaacagcaggggcagcagtattcccatgtaagctgttggtttgaaaatgcagaaggtcaggagagaggaggtggctccaaaccctggtctgcaaggacagaggagagagaaacctcaagggcattccccagcccactccaaagacagtcagcaagtcctagaaaaggcaacatggtggtagaaacagagcccagctcagcccaaagaccaaaccctgtgcagctagacaaaggcttgaaggaattagaaaccttgagatttggagcaatcaactgtagagagtatgaaccggaccataacctggaatcaaactttattacaaacccgaggaccctcttagggaagaagccctacatttgcagtgattgtgggcgaagctttaaagatagatcaaccctcatcagacaccatcgtatacactcgatggagaagccttatgtgtgcagtgagtgcgggcgaggttttagccagaagtccaacctcagcagacaccagagaacacattcagaagagaagccttatttgtgcagggagtgtgggcaaagctttagaagtaagtccatcctcaatagacatcagtggactcactcagaggagaagccctatgtttgcagcgagtgtgggcgaggctttagcgagaagtcatccttcatcagacaccagaggacacactccggtgagaaaccctatgtgtgcctggagtgtggacgaagctttgtgataagtcaaccctcagaaaacaccagaggatacactcaggggagaagccttatgtttgcagggagtgtgggcgaggctttagccagaactcagatctcatcaaacaccagaggacacacttggatgagaagccttatgtttgcagggagtgtgggcgaggcttttgtgacaagtcaaccctcatcatacacgagcggacgcactctggagagaagccttatgtgtgtggtgagtgtggccgaggctttagtcggaaatcactcctccttgtccaccagaggacacactcaggggagaagcattatgtctgcagggagtgtaggcgaggttttagccagaagtcaaatctcatcagacaccagaggacgcactcaaatgagaagccttatatttgcagggaatgtgggcgaggcttttgtgacaagtcaaccctcattgtacatgagaggacacactcaggagagaagccttacgtgtgcagtgagtgtggccgaggctttagccggaaatcactcctccttgtccaccagaggacacactcaggggagaagcattatgtttgtagggagtgtgggcgaggctttagtcataagtcaaatctcatcagacaccagaggacacactgacgggagaaacctgtgtatgcaggggtcatgaacaagacctgagtgaccagtcaagcctcatgttaccccagagagacacatggggagtagaccctgtgtacacagattgtgagtgaagttccagagatgtgtcagcccttatcaggcatgggagggacacgttcaggagaggagccttatgagtatagagtacgggcaactgtagccatcagtcagccttgagcatgcacggacacacttaggagagaagtttatgtgtagggactgtgggaaggctttagcaataatcaacatttaccagacatccaatgacagcctcaggggacacccttgtacctgggtcagatctgccgggatcctctagaacgccgcacacc

SEQ ID NO: 428741 - DNA, 2755 bp, Homo sapiens
  misc_feature (1)..(2): n is a, c, g, or t
  misc_feature (4)..(4): n is a, c, g, or t
  misc_feature (6)..(7): n is a, c, g, or t
nncncnnggcttctggccttctcctgtcagcagttcctcagtcaacatgtacttcagatcttcctgggcttatgtgcagaaaatcacttccatccagggaattctagcccagggcattggaaacagcaggggcagcagtattcccatgtaagctgttggtttgaaaatgcagaaggtcaggagagaggaggtggctccaaaccctggtctgcaaggacagaggagagagaaacctcaagggcattccccagcccactccaaagacagtcagcaagtcctagaaaaggcaacatggtggtagaaacagagcccagctcagcccaaagaccaaaccctgtgcagctagacaaaggcttgaaggaattagaaaccttgagatttggagcaatcaactgtagagagtatgaaccggaccataacctggaatcaaactttattacaaacccgaggaccctcttagggaagaagccctacatttgcagtgattgtgggcgaagctttaaagatagatcaaccctcatcagacaccatcgtatacactcgatggagaagccttatgtgtgcagtgagtgcgggcgaggttttagccagaagtccaacctcagcagacaccagagaacacattcagaagagaagccttatttgtgcagggagtgtgggcaaagctttagaagtaagtccatcctcaatagacatcagtggactcactcagaggagaagccctatgtttgcagcgagtgtgggcgaggctttagcgagaagtcatccttcatcagacaccagaggacacactccggtgagaaaccctatgtgtgcctggagtgtggacgaagctttgtgataagtcaaccctcagaaaacaccagaggatacactcaggggagaagccttatgtttgcagggagtgtgggcgaggctttagccagaactcagatctcatcaaacaccagaggacacacttggatgagaagccttatgtttgcagggagtgtgggcgaggcttttgtgacaagtcaaccctcatcatacacgagcggacgcactctggagagaagccttatgtgtgtggtgagtgtggccgaggctttagtcggaaatcactcctccttgtccaccagaggacacactcaggggagaagcattatgtctgcagggagtgtaggcgaggttttagccagaagtcaaatctcatcagacaccagaggacgcactcaaatgagaagccttatatttgcagggaatgtgggcgaggcttttgtgacaagtcaaccctcattgtacatgagaggacacactcaggagagaagccttacgtgtgcagtgagtgtggccgaggctttagccggaaatcactcctccttgtccaccagaggacacactcaggggagaagcattatgtttgtagggagtgtgggcgaggctttagtcataagtcaaatctcatcagacaccagaggacacactgacgggagaaacctgtgtatgcaggggtcatgaacaagacctgagtgaccagtcaagcctcatgttaccccagagagacacatggggagtagaccctgtgtacacagattgtgagtgaagttccagagatgtgtcagcccttatcaggcatgggagggacacgttcaggagaggagccttatgagtatagagtacgggcaactgtagccatcagtcagccttgagcatgcacggacacacttaggagagaagtttatgtgtagggactgtgggaaggctttagcaataatcaacatttaccagacatccaatgacagcctcaggggaaagcacccttgtctggggagtgttggggagcatcagttaggatgtatgggcaaagcttttgtgatcacacaccacagggagaatctgcatgtggggacactgtggagctctgcccagatgaccttttcaggggtaacaccccagctgcttgagagaacagtgttgctgctggcagagatgcattccagagatgcactccgctctggaactcactctcagccacagggagctgcatgcaccacaggggcaatgcacctttgcaggggtaccttctggccccaacccttgactcaacggggacaactccagaaggtcattccagatccagagatccccatcgaactgaaggatcactgggttgcagacacattgcaggtcagcttcttcctctgcccagtcctgccctcactccccagtgaatcctcaattttctgtctcgttgtctgtccagataattgattctaagacatgttaggtatataaggagtgtagataaggcttcagccatgagtcaccccccagtaagccccagagtatattgaatagaaattctgcatgtgtggggagaatggacaaggacttaggaaaaagtcctcatcaaagaacagcttttttgggacaagctttacatgggtggggagggaaaatgtgaaacacattagcaataagttaaacctcatcttgtactaaaggaggacacactcagggagaagacctctgtgggcagggcttgtgggtggagcttcatcccgatgtcactcctcaactgacttaggaggacagtcttgctaccccaagtcactacctcactcacctctgagggattttcaggaaatgtcttgactcccccatgtactctgtatgtgagcgaagatggcagtaactgttaaataagcattcttttctacttcttggaatcagatgaaataaaaaagcaggctttatttaagtaatcaaaaaaaga

SEQ ID NO: 428742 - DNA, 642 bp, Homo sapiens
  misc_feature (19)..(19): n is a, c, g, or t
ggcgggatctaaggcgacnctagccctgctcccagttcaggaagcctctacagctccagagcctagcagggtagtggcccaaggctttgggtcctggctcttgaacaaaaaccttccttgcacagatgcatacactggggcccagcagctgcctcctgaggtgacacagcctgtaggaacatacacagctgggatcagcctgcagccatcccccgaccctgctgctaggccacggtctgcgccctggggcctcatctcccccagcccacttgttttccccccttttattccctaggcccttttcagactcctgggcccttggatactcttctcccatctcccttcacaggatgacaccctcccataccccatagctggggccagcaggttctgctgagggtggggctggtgtagggacccccaagagacccctgtcctgtcccttcaccagtcctggggaggctgggactccccctgccacaagcctgggccacagctcacattccactgctgggagaagaaacaggccgaggcccagagtggcctgcccccgggagccaaagaccccagtggccacactgggatagggtggggaggctggcagccctcttttataaatattatacataagaccagctgtgt

SEQ ID NO: 428743 - DNA, 2751 bp, Homo sapiens
ttgcaggcgagttcagccgggagcagagcgaaccgcaccggcccgagcggagcgccgcacgttcccaaccgcgaggccagacatctgactgttggtgtgagaccagtgctcctggtggtgtgccctgagccatggaggcgcctttgcagacagagatggtggagctggtgcccaatggcaaacactcagaggggctgctcccggtcatcacccccatggcaggcaaccagagggtcgaggaccctgcacggagctgtatggagggcaagagcttcctacagaaaagtcccagcaaggagccacacttcactgacttcgaggggaagacatcattcgggatgtcagtgttcaacctcagcaatgccatcatgggcagcggcatcctgggactcgcctatgccatggccaatacgggcattatccttttcctgttcctgttgacagctgtcgccttgctctccagctactccatccacctgctactcaagtcctcaggggtcgtgggcatccgtgcctatgagcagctgggctaccgtgcctttgggaccccaggaaagctggcagcagccctggccatcacgctccagaacatcggagccatgtccagctacctgtacatcatcaagtctgagctgccacttgtcatacagaccttcctgaacctggaggagaaaacctcggactggtacatgaacgggaactacctggtaatccttgtctctgtcaccatcattctgcccctggcactgatgcggcagcttggctacctgggctactccagcggcttctctcttagctgcatggtgttcttcctaattgcagtcatctacaaaaagttccacgtgccctgcccactgccccccaacttcaacaacaccacaggcaacttcagccacgtggagatcgtgaaggagaaggtgcagctgcaggtcgagcctgaggcttcagccttctgcactcccagctacttcacgctcaactcacaggttctgacaggtcagggcaaggcgggggcccaatgagagtggcagactgccttgacacagccccgtgtttccccagacagcatacaccatccccatcatggccttcgccttcgtctgccaccccgaggtgctgcccatctatactgagctcaaggacccctccaagaagaagatgcagcacatctccaacctgtccatcgctgtcatgtacatcatgtacttcctggctgccctcttcggctacctcaccttctacagtacggtggcaccggtgggcagaggcctaggctaggctggggggaaggggctggttgtggccatggtgccctccataccgaggcgtgtggtgcctggctgtgccttgccgctgtggaggtgagtctgcatgccaatccccacagtgttggggtcccctaggcagctcagatcccacctccttcctggggccacctactgaccaccctccctgcctgccacagacggggtggagtcggagctgctgcacacctacagcaaggtggacccgtttgacgtcctgatcctgtgtgtgcgcgtggccgtgctgacagcagtcacgctcacagtgcccatcgttctgttcccggtgcgccgcgccatccagcagatgctgtttccaaaccaggagttcagctggctgcggcatgtgcttattgccgttggcctgctcacttgtatcaacctgctggtcatctttgcccccaacatcctgggcatctttggggtcatcggtgccacatctgccccattcctcatcttcatcttccctgccatcttctacttccgaatcatgcccacggagaaggagcctgcaagatccacccccaaaatcctggccctgtgttttgctatgcttggcttcttgctgatgaccatgagcttgagcttcatcatcattgactgggcctcagggaccagccggcatggaggaaaccactagggtgaccctcatcctgttctgtctactcaccctagcagccctgcccagactcttcagcccctgctcccatccagtggccagtcgggggaggagaaagacgcgattaacactgtggcattcagccaggccccatgtcctctctgtggaaggtttttgttcaagagccaggaccaaggcccttgggccactaccctgctaggctctggagctgtagaggcttcctgaactgggagcagggtagggctgtcgccttagatcccgcccaagcccctcattccctccttgcacagatgcatacactggggcccagcagctgcctcctgaggtgacacagcctgtaggaacatacacagctgggatcagcctgcagccatcccccgaccctgctgctaggccacggtctgcgccctggggcctcatctcccccagcccacttgttttccccccttttattccctaggcccttttcagactcctgggcccttggatactcttctcccatctcccttcacaggatgacaccctcccataccccatagctggggccagcaggttctgctgagggtggggctggtgtagggacccccaagagacccctgtcctgtcccttcaccagtcctggggaggctgggactccccctgccacaagcctgggccacagctcacattccactgctgggagaagaaacaggccgaggcccagagtggcctgcccccgggagccaaagaccccagtggccacactgggatagggtggggaggctggcagccctcttttataaatattatacataagaccagctgtgt

SEQ ID NO: 428744 - DNA, 2440 bp, Homo sapiens
gtccagacacccaggtcacagaccctccacccccaggcctcccagagcccctcaccctctgccagccacggtagccccccagtggcctctttttcttccatcttcccatgtgtccccaggttcctgttgacagctgtcgccttgctctccagctactccatccacctgctactcaagtcctcaggggtcgtgggcatccgtgcctatgagcagctgggctaccgtgcctttgggaccccaggaaagctggcagcagccctggccatcacgctccagaacatcggagccatgtccagctacctgtacatcatcaagtctgagctgccacttgtcatacagaccttcctgaacctggaggagaaaacctcggactggtacatgaacgggaactacctggtaatccttgtctctgtcaccatcattctgcccctggcactgatgcggcagcttggctacctgggctactccagcggcttctctcttagctgcatggtgttcttcctaattgcagtcatctacaaaaagttccacgtgccctgcccactgccccccaacttcaacaacaccacaggcaacttcagccacgtggagatcgtgaaggagaaggtgcagctgcaggtcgagcctgaggcttcagccttctgcactcccagctacttcacgctcaactcacaggttctgacaggtcagggcaaggcgggggcccaatgagagtggcagactgccttgacacagccccgtgtttccccagacagcatacaccatccccatcatggccttcgccttcgtctgccaccccgaggtgctgcccatctatactgagctcaaggacccctccaagaagaagatgcagcacatctccaacctgtccatcgctgtcatgtacatcatgtacttcctggctgccctcttcggctacctcaccttctacagtacggtggcaccggtgggcagaggcctaggctaggctggggggaaggggctggttgtggccatggtgccctccataccgaggcgtgtggtgcctggctgtgccttgccgctgtggaggtgagtctgcatgccaatccccacagtgttggggtcccctaggcagctcagatcccacctccttcctggggccacctactgaccaccctccctgcctgccacagacggggtggagtcggagctgctgcacacctacagcaaggtggacccgtttgacgtcctgatcctgtgtgtgcgcgtggccgtgctgacagcagtcacgctcacagtgcccatcgttctgttcccggtgcgccgcgccatccagcagatgctgtttccaaaccaggagttcagctggctgcggcatgtgcttattgccgttggcctgctcacttgtatcaacctgctggtcatctttgcccccaacatcctgggcatctttggggtcatcggtgccacatctgccccattcctcatcttcatcttccctgccatcttctacttccgaatcatgcccacggagaaggagcctgcaagatccacccccaaaatcctggccctgtgttttgctatgcttggcttcttgctgatgaccatgagcttgagcttcatcatcattgactgggcctcagggaccagccggcatggaggaaaccactagggtgaccctcatcctgttctgtctactcaccctagcagccctgcccagactcttcagcccctgctcccatccagtggccagtcgggggaggagaaagacgcgattaacactgtggcattcagccaggccccatgtcctctctgtggaaggtttttgttcaagagccaggaccaaggcccttgggccactaccctgctaggctctggagctgtagaggcttcctgaactgggagcagggtagggctgtcgccttagatcccgcccaagcccctcattccctccttgcacagatgcatacactggggcccagcagctgcctcctgaggtgacacagcctgtaggaacatacacagctgggatcagcctgcagccatcccccgaccctgctgctaggccacggtctgcgccctggggcctcatctcccccagcccacttgttttccccccttttattccctaggcccttttcagactcctgggcccttggatactcttctcccatctcccttcacaggatgacaccctcccataccccatagctggggccagcaggttctgctgagggtggggctggtgtagggacccccaagagacccctgtcctgtcccttcaccagtcctggggaggctgggactccccctgccacaagcctgggccacagctcacattccactgctgggagaagaaacaggccgaggcccagagtggcctgcccccgggagccaaagaccccagtggccacactgggatagggtggggaggctggcagccctcttttataaatattatacataagaccagctgtgt

SEQ ID NO: 428745 - DNA, 995 bp, Homo sapiens
  misc_feature (982)..(982): n is a, c, g, or t
  misc_feature (984)..(985): n is a, c, g, or t
ttgcaggcgagttcagccgggagcagagcgaaccgcaccggcccgagcggagcgccgcacgttcccaaccgcgaggccagacatctgactgttggtgtgagaccagtgctcctggtggtgtgccctgagccatggaggcgcctttgcagacagagatggtggagctggtgcccaatggcaaacactcagaggggctgctcccggtcatcacccccatggcaggcaaccagagggtcgaggaccctgcacggagctgtatggagggcaagagcttcctacagaaaagtcccagcaaggagccacacttcactgacttcgaggggaagacatcattcgggatgtcagtgttcaacctcagcaatgccatcatgggcagcggcatcctgggactcgcctatgccatggccaatacgggcattatccttttcctgttcctgttgacagctgtcgccttgctctccagctactccatccacctgctactcaagtcctcaggggtcgtgggcatccgtgcctatgagcagctgggctaccgtgcctttgggaccccaggaaagctggcagcagccctggccatcacgctccagaacatcggagccatgtccagctacctgtacatcatcaagtctgagctgccacttgtcatacagaccttcctgaacctggaggagaaaacctcggactggtacatgaacgggaactacctggtaatccttgtctctgtcaccatcattctgcccctggcactgatgcggcagcttggctacctgggctactccagcggcttctctcttagctgcatggtgttcttcctaattgcagtcatctacaaaaagttccacgtgccctgcccactgccccccaacttcaacaacaccacaggcaacttcagccacgtggagatcgtgaaggagaaggtgcagctgcaggtcgagcctgaggcttcagccttctgcactcccagcttgggctacagaatganannctgtttcaca

SEQ ID NO: 428746 - DNA, 2453 bp, Homo sapiens
ttgcaggcgagttcagccgggagcagagcgaaccgcaccggcccgagcggagcgccgcacgttcccaaccgcgaggccagacatctgactgttggtgtgagaccagtgctcctggtggtgtgccctgagccatggaggcgcctttgcagacagagatggtggagctggtgcccaatggcaaacactcagaggggctgctcccggtcatcacccccatggcaggcaaccagagggtcgaggaccctgcacggagctgtatggagggcaagagcttcctacagaaaagtcccagcaaggagccacacttcactgacttcgaggggaagacatcattcgggatgtcagtgttcaacctcagcaatgccatcatgggcagcggcatcctgggactcgcctatgccatggccaatacgggcattatccttttcctgttcctgttgacagctgtcgccttgctctccagctactccatccacctgctactcaagtcctcaggggtcgtgggcatccgtgcctatgagcagctgggctaccgtgcctttgggaccccaggaaagctggcagcagccctggccatcacgctccagaacatcggagccatgtccagctacctgtacatcatcaagtctgagctgccacttgtcatacagaccttcctgaacctggaggagaaaacctcggactggtacatgaacgggaactacctggtaatccttgtctctgtcaccatcattctgcccctggcactgatgcggcagcttggctacctgggctactccagcggcttctctcttagctgcatggtgttcttcctaattgcagtcatctacaaaaagttccacgtgccctgcccactgccccccaacttcaacaacaccacaggcaacttcagccacgtggagatcgtgaaggagaaggtgcagctgcaggtcgagcctgaggcttcagccttctgcactcccagctacttcacgctcaactcacagacagcatacaccatccccatcatggccttcgccttcgtctgccaccccgaggtgctgcccatctatactgagctcaaggacccctccaagaagaagatgcagcacatctccaacctgtccatcgctgtcatgtacatcatgtacttcctggctgccctcttcggctacctcaccttctacaacggggtggagtcggagctgctgcacacctacagcaaggtggacccgtttgacgtcctgatcctgtgtgtgcgcgtggccgtgctgacagcagtcacgctcacagtgcccatcgttctgttcccggtgcgccgcgccatccagcagatgctgtttccaaaccaggagttcagctggctgcggcatgtgcttattgccgttggcctgctcacttgtatcaacctgctggtcatctttgcccccaacatcctgggcatctttggggtcatcggtgccacatctgccccattcctcatcttcatcttccctgccatcttctacttccgaatcatgcccacggagaaggagcctgcaagatccacccccaaaatcctggccctgtgttttgctatgcttggcttcttgctgatgaccatgagcttgagcttcatcatcattgactgggcctcagggaccagccggcatggaggaaaccactagggtgaccctcatcctgttctgtctactcaccctagcagccctgcccagactcttcagcccctgctcccatccagtggccagtcgggggaggagaaagacgcgattaacactgtggcattcagccaggccccatgtcctctctgtggaaggtttttgttcaagagccaggaccaaggcccttgggccactaccctgctaggctctggagctgtagaggcttcctgaactgggagcagggtagggctgtcgccttagatcccgcccaagcccctcattccctccttgcacagatgcatacactggggcccagcagctgcctcctgaggtgacacagcctgtaggaacatacacagctgggatcagcctgcagccatcccccgaccctgctgctaggccacggtctgcgccctggggcctcatctcccccagcccacttgttttccccccttttattccctaggcccttttcagactcctgggcccttggatactcttctcccatctcccttcacaggatgacaccctcccataccccatagctggggccagcaggttctgctgagggtggggctggtgtagggacccccaagagacccctgtcctgtcccttcaccagtcctggggaggctgggactccccctgccacaagcctgggccacagctcacattccactgctgggagaagaaacaggccgaggcccagagtggcctgcccccgggagccaaagaccccagtggccacactgggatagggtggggaggctggcagccctcttttataaatattatacataagaccagctgtgt

SEQ ID NO: 428747 - DNA, 2529 bp, Homo sapiens
ttgcaggcgagttcagccgggagcagagcgaaccgcaccggcccgagcggagcgccgcacgttcccaaccgcgaggccagacatctgactgttggtgtgagaccagtgctcctggtggtgtgccctgagccatggaggcgcctttgcagacagagatggtggagctggtgcccaatggcaaacactcagaggggctgctcccggtcatcacccccatggcaggcaaccagagggtcgaggaccctgcacggagctgtatggagggcaagagcttcctacagaaaagtcccagcaaggagccacacttcactgacttcgaggggaagacatcattcgggatgtcagtgttcaacctcagcaatgccatcatgggcagcggcatcctgggactcgcctatgccatggccaatacgggcattatccttttcctgttcctgttgacagctgtcgccttgctctccagctactccatccacctgctactcaagtcctcaggggtcgtgggcatccgtgcctatgagcagctgggctaccgtgcctttgggaccccaggaaagctggcagcagccctggccatcacgctccagaacatcggagccatgtccagctacctgtacatcatcaagtctgagctgccacttgtcatacagaccttcctgaacctggaggagaaaacctcggactggtacatgaacgggaactacctggtaatccttgtctctgtcaccatcattctgcccctggcactgatgcggcagcttggctacctgggctactccagcggcttctctcttagctgcatggtgttcttcctaattgcagtcatctacaaaaagttccacgtgccctgcccactgccccccaacttcaacaacaccacaggcaacttcagccacgtggagatcgtgaaggagaaggtgcagctgcaggtcgagcctgaggcttcagccttctgcactcccagctacttcacgctcaactcacaggttctgacaggtcagggcaaggcgggggcccaatgagagtggcagactgccttgacacagccccgtgtttccccagacagcatacaccatccccatcatggccttcgccttcgtctgccaccccgaggtgctgcccatctatactgagctcaaggacccctccaagaagaagatgcagcacatctccaacctgtccatcgctgtcatgtacatcatgtacttcctggctgccctcttcggctacctcaccttctacaacggggtggagtcggagctgctgcacacctacagcaaggtggacccgtttgacgtcctgatcctgtgtgtgcgcgtggccgtgctgacagcagtcacgctcacagtgcccatcgttctgttcccggtgcgccgcgccatccagcagatgctgtttccaaaccaggagttcagctggctgcggcatgtgcttattgccgttggcctgctcacttgtatcaacctgctggtcatctttgcccccaacatcctgggcatctttggggtcatcggtgccacatctgccccattcctcatcttcatcttccctgccatcttctacttccgaatcatgcccacggagaaggagcctgcaagatccacccccaaaatcctggccctgtgttttgctatgcttggcttcttgctgatgaccatgagcttgagcttcatcatcattgactgggcctcagggaccagccggcatggaggaaaccactagggtgaccctcatcctgttctgtctactcaccctagcagccctgcccagactcttcagcccctgctcccatccagtggccagtcgggggaggagaaagacgcgattaacactgtggcattcagccaggccccatgtcctctctgtggaaggtttttgttcaagagccaggaccaaggcccttgggccactaccctgctaggctctggagctgtagaggcttcctgaactgggagcagggtagggctgtcgccttagatcccgcccaagcccctcattccctccttgcacagatgcatacactggggcccagcagctgcctcctgaggtgacacagcctgtaggaacatacacagctgggatcagcctgcagccatcccccgaccctgctgctaggccacggtctgcgccctggggcctcatctcccccagcccacttgttttccccccttttattccctaggcccttttcagactcctgggcccttggatactcttctcccatctcccttcacaggatgacaccctcccataccccatagctggggccagcaggttctgctgagggtggggctggtgtagggacccccaagagacccctgtcctgtcccttcaccagtcctggggaggctgggactccccctgccacaagcctgggccacagctcacattccactgctgggagaagaaacaggccgaggcccagagtggcctgcccccgggagccaaagaccccagtggccacactgggatagggtggggaggctggcagccctcttttataaatattatacataagaccagctgtgt

SEQ ID NO: 428748 - DNA, 530 bp, Homo sapiens
cacccgcacccccaccctctgctccctcctcagaatagaaggaaacttccacaagtgcaaaaagtgaagtcactgcttttgctgtcttggatcaagaccagaaagaaattattgataccaatggagctggagatgcatttgttggaggttttctgtctcaactggtctctgacaagcctctgactgaatgtatccgtgctggccactatgcagcaagcatcataattagacggactggctgcacctttcctgagaagccagacttccactgatggaagagctgaaaacacaagcccaggagtgcagacactgccctaattgcttcctgagaattcccatattaataaagaagaaaattatctgccattttttcctactataataatgctgaatcttaatttagagggtacaagggtatggtaatgcttgtagaatctttattatctcaacaatctaaaaaatgatgtttatttccatagtttgatagtgccacttaaatgccaattaaacaagaatataacatttcaata

SEQ ID NO: 428749 - DNA, 522 bp, Homo sapiens
attaaaaaattctatataagtttatatatataaaagtctttatactcataaaaaagtgaagtcactgcttttgctgtcttggatcaagaccagaaagaaattattgataccaatggagctggagatgcatttgttggaggttttctgtctcaactggtctctgacaagcctctgactgaatgtatccgtgctggccactatgcagcaagcatcataattagacggactggctgcacctttcctgagaagccagacttccactgatggaagagctgaaaacacaagcccaggagtgcagacactgccctaattgcttcctgagaattcccatattaataaagaagaaaattatctgccattttttcctactataataatgctgaatcttaatttagagggtacaagggtatggtaatgcttgtagaatctttattatctcaacaatctaaaaaatgatgtttatttccatagtttgatagtgccacttaaatgccaattaaacaagaatataacatttcaata

SEQ ID NO: 428750 - DNA, 419 bp, Homo sapiens
  misc_feature (56)..(56): n is a, c, g, or t
gtcagggaggaggaggaaaaatgaagaaaagaggaagttgtgggtacgccactggncttttgcagcctaacactgaatgtatccgtgctggccactatgcagcaagcatcataattagacggactggctgcacctttcctgagaagccagacttccactgatggaagagctgaaaacacaagcccaggagtgcagacactgccctaattgcttcctgagaattcccatattaataaagaagaaaattatctgccattttttcctactataataatgctgaatcttaatttagagggtacaagggtatggtaatgcttgtagaatctttattatctcaacaatctaaaaaatgatgtttatttccatagtttgatagtgccacttaaatgccaattaaacaagaatataacatttcaata

SEQ ID NO: 428751 - DNA, 2938 bp, Homo sapiens
gggcacccaatctctcgccctgtaaactgcggggtgacgggacgctgttactaggactcaagatggccaccgcgcccgctagtcatctcgctagcccgcgcgccagtgagctggcacgagacacgcggtggcccacggcgtctggggacgatctccagcccttcgcacggggcggagcgcccgccttccctccaatcagcacgccgggccggctagccaggggccgcccgcgcgcggggtgtgtgaggacgcgctcccagtcgctgagtgcctgagccgggaagcagttgctgtggtacctgctgctgcccgagcggacgtagagcatcggacgcgggcgccgtggcgttgggcaggagggcgaagccatgacgtcagtcagagaaaatattctctttggaatgggaaatcctctgcttgacatctctgctgtagtggacaaagatttccttgataagtattctctgaaaccaaatgaccaaatcttggctgaagacaaacacaaggaactgtttgatgaacttgtgaaaaaattcaaagtcgaatatcatgctggtggctctacccagaattcaattaaagtggctcagtggatgattcaacagccacacaaagcagcaacattttttggatgcattgggatagataaatttggggagatcctgaagagaaaagctgctgaagcccatgtggatgctcattactacgagcagaatgagcagccaacaggaacttgtgctgcatgcatcactggtgacaacaggtccctcatagctaatcttgctgctgccaattgttataaaaaggaaaaacatcttgatctggagaaaaactggatgttggtagaaaaagcaagagtttgttatatagcaggcttttttcttacagtttccccagagtcagtattaaaggtggctcaccatgcttctgaaaacaacaggattttcactttgaatctatctgcaccgtttattagccagttctacaaggaatcattgatgaaagttatgccttatgttgatatactttttggaaatgagacagaagctgccacttttgctagagagcaaggctttgagactaaagacattaaagagatagccaaaaagacacaagccctgccaaagatgaactcaaagaggcagcgaatcgtgatcttcacccaagggagagatgacactataatggctacagaaagtgaagtcactgcttttgctgtcttggatcaagaccagaaagaaattattgataccaatggagctggagatgcatttgttggaggttttctgtctcaactggtctctgacaagcctctgactgaatgtatccgtgctggccactatgcagcaagcatcataattagacggactggctgcacctttcctgagaagccagacttccactgatggaagagctgaaaacacaagcccaggagtgcagacactgccctaattgcttcctgagaattcccatattaataaagaagaaaattatctgccattttttcctactataataatgctgaatcttaatttagagggtacaagggtatggtaatgcttgtagaatctttattatctcaacaatctaaaaaatgatgtttatttccatagtttgatagtgccacttaaatgccaattaaacaagaatataacatttcaatagaaatttttatttcattttcaattactttgtaaattcgtgtgtatttagtacactgatttgtttttttacatttctgctttgaatgcagatgcaatttaatataatagattttttaatgaattaatcttaacatagtaatctttagctttttatacaaatatatttaatttaggagtatatgtgtgtctatacacacacatacataaatataccacatatacacctgatagtcaaataaggtacagaaattttatcttgtcaattatgccaaataatctctttaatgtgcactcaaacatgtaataaactttggataattaaataatgtgccaaatttaagttgtaccacaatattcaaatcatagtcttatggaactctgtaattggatacaaacaaaaacttgtcatataggaatttttttctgtcttttccctgtgtacagcaaactgaggaagaaagatcattatttaatactgggccctgaaatgacacccaatttgttaatggaattatgaagaacagcaatataatacactgaagaataacttagtatcagagaccaataaatcacttttttaaggatgacaaaatggtataattggacttctggagtcagactttatatgaccttaggtaaatcttcgaacctcagtttcctttttgtaaaatgagataataacccttacatagaaggtcattgagatgatttgagcgagattaccaagtataagatatttgttataatgccttgtaaatgctttataagtagctgctgttattatcattatgattattttctttttgaagaaaaaaagataatgtttgtaaaactgaattcaaatcataggaaaggatttggccaggcgctgcagctcatgcttgtaatcccaacactttgggaggccaaggtgggaggatcacttgagcccaggagttcaagaccagcctgggtaacaaagtgaggccccacctctacaaaaaaatttttaaattatccagccacaggctgggcacagtggcttacacctgtaattccaccactttgggatgaggcaggtatcactagaggtcaagagttcaagaccagcctggccgccatgttggtgaaactccatctctattaaaaatacaaaaattagccaggcatggtggtggatacctgtaattccagctacttgggaggctgacacaggagaattgcttgaacccaggaggcggaggttgcagtgaggcaagatcacaccactgcactccaccctgagcaatagagtg

SEQ ID NO: 428752 - DNA, 2029 bp, Homo sapiens
gggcacccaatctctcgccctgtaaactgcggggtgacgggacgctgttactaggactcaagatggccaccgcgcccgctagtcatctcgctagcccgcgcgccagtgagctggcacgagacacgcggtggcccacggcgtctggggacgatctccagcccttcgcacggggcggagcgcccgccttccctccaatcagcacgccgggccggctagccaggggccgcccgcgcgcggggtgtgtgaggacgcgctcccagtcgctgagtgcctgagccgggaagcagttgctgtggtacctgctgctgcccgagcggacgtagagcatcggacgcgggcgccgtggcgttgggcaggagggcgaagccatgacgtcagtcagagaaaatattctctttggaatgggaaatcctctgcttgacatctctgctgtagtggacaaagatttccttgataagtattctctgaaaccaaatgaccaaatcttggctgaagacaaacacaaggaactgtttgatgaacttgtgaaaaaattcaaagtcgaatatcatgctggtggctctacccagaattcaattaaagtggctcagtggatgattcaacagccacacaaagcagcaacattttttggatgcattgggatagataaatttggggagatcctgaagagaaaagctgctgaagcccatgtggatgctcattactacgagcagaatgagcagccaacaggaacttgtgctgcatgcatcactggtgacaacaggtccctcatagctaatcttgctgctgccaattgttataaaaaggaaaaacatcttgatctggagaaaaactggatgttggtagaaaaagcaagagtttgttatatagcaggcttttttcttacagtttccccagagtcagtattaaaggtggctcaccatgcttctgaaaacaacaggattttcactttgaatctatctgcaccgtttattagccagttctacaaggaatcattgatgaaagttatgccttatgttgatatactttttggaaatgagacagaagctgccacttttgctagagagcaaggctttgagactaaagacattaaagagatagccaaaaagacacaagccctgccaaagatgaactcaaagaggcagcgaatcgtgatcttcacccaagggagagatgacactataatggctacagaaagtgaagtcactgcttttgctgtcttggatcaagaccagaaagaaattattgataccaatggagctggagatgcatttgttggaggttttctgtctcaactggtctctgacaagcctctgactgaatgtatccgtgctggccactatgcagcaagcatcataattagacggactggctgcacctttcctgagaagccagacttccactgatggaagagctgaaaacacaagcccaggagtgcagacactgccctaattgcttcctgagaattcccatattaataaagaagaaaattatctgccattttttcctactataataatgctgaatcttaatttagagggtacaagggtatggtaatgcttgtagaatctttattatctcaacaatctaaaaaatgatgtttatttccatagtttgatagtgccacttaaatgccaattaaacaagaatataacatttcaatagaaatttttatttcattttcaattactttgtaaattcgtgtgtatttagtacactgatttgtttttttacatttctgctttgaatgcagatgcaatttaatataatagattttttaatgaattaatcttaacatagtaatctttagctttttatacaaatatatttaatttaggagtatatgtgtgtctatacacacacatacataaatataccacatatacacctgatagtcaaataaggtacagaaattttatcttgtcaattatgccaaataatctctttaatgtgcactcaaacatgtaataaactttggttagcggcaagacttgacgcaattaaaataacaatagtatggattataaag

SEQ ID NO: 428753 - DNA, 2033 bp, Homo sapiens
gggcacccaatctctcgccctgtaaactgcggggtgacgggacgctgttactaggactcaagatggccaccgcgcccgctagtcatctcgctagcccgcgcgccagtgagctggcacgagacacgcggtggcccacggcgtctggggacgatctccagcccttcgcacggggcggagcgcccgccttccctccaatcagcacgccgggccggctagccaggggccgcccgcgcgcggggtgtgtgaggacgcgctcccagtcgctgagtgcctgagccgggaagcagttgctgtggtacctgctgctgcccgagcggacgtagagcatcggacgcgggcgccgtggcgttgggcaggagggcgaagccatgacgtcagtcagagaaaatattctctttggaatgggaaatcctctgcttgacatctctgctgtagtggacaaagatttccttgataagtattctctgaaaccaaatgaccaaatcttggctgaagacaaacacaaggaactgtttgatgaacttgtgaaaaaattcaaagtcgaatatcatgctggtggctctacccagaattcaattaaagtggctcagtggatgattcaacagccacacaaagcagcaacattttttggatgcattgggatagataaatttggggagatcctgaagagaaaagctgctgaagcccatgtggatgctcattactacgagcagaatgagcagccaacaggaacttgtgctgcatgcatcactggtgacaacaggtccctcatagctaatcttgctgctgccaattgttataaaaaggaaaaacatcttgatctggagaaaaactggatgttggtagaaaaagcaagagtttgttatatagcaggcttttttcttacagtttccccagagtcagtattaaaggtggctcaccatgcttctgaaaacaacaggattttcactttgaatctatctgcaccgtttattagccagttctacaaggaatcattgatgaaagttatgccttatgttgatatactttttggaaatgagacagaagctgccacttttgctagagagcaaggctttgagactaaagacattaaagagatagccaaaaagacacaagccctgccaaagatgaactcaaagaggcagcgaatcgtgatcttcacccaagggagagatgacactataatggctacagaaagtgaagtcactgcttttgctgtcttggatcaagaccagaaagaaattattgataccaatggagctggagatgcatttgttggaggttttctgtctcaactggtctctgacaagcctctgactgaatgtatccgtgctggccactatgcagcaagcatcataattagacggactggctgcacctttcctgagaagccagacttccactgatggaagagctgaaaacacaagcccaggagtgcagacactgccctaattgcttcctgagaattcccatattaataaagaagaaaattatctgccattttttcctactataataatgctgaatcttaatttagagggtacaagggtatggtaatgcttgtagaatctttattatctcaacaatctaaaaaatgatgtttatttccatagtttgatagtgccacttaaatgccaattaaacaagaatataacatttcaatagaaatttttatttcattttcaattactttgtaaattcgtgtgtatttagtacactgatttgtttttttacatttctgctttgaatgcagatgcaatttaatataatagattttttaatgaattaatcttaacatagtaatctttagctttttatacaaatatatttaatttaggagtatatgtgtgtctatacacacacatacataaatataccacatatacacctgatagtcaaataaggtacagaaattttatcttgtcaattatgccaaataatctctttaatgtgcactcaaacatgtaataaactttgccgggccggtccaccccctctttatattttaatattattattatataaaaatacta

SEQ ID NO: 428754 - DNA, 2989 bp, Homo sapiens
gggcacccaatctctcgccctgtaaactgcggggtgacgggacgctgttactaggactcaagatggccaccgcgcccgctagtcatctcgctagcccgcgcgccagtgagctggcacgagacacgcggtggcccacggcgtctggggacgatctccagcccttcgcacggggcggagcgcccgccttccctccaatcagcacgccgggccggctagccaggggccgcccgcgcgcggggtgtgtgaggacgcgctcccagtcgctgagtgcctgagccgggaagcagttgctgtggtacctgctgctgcccgagcggactggatggcagaggtgggctgtagagccaaagtggggtgggagcgcgaagatggcagctgctgaggaggagccgaagcccaaaaagctgaaggtggaggcgccgcaagcgctgagagaaaatattctctttggaatgggaaatcctctgcttgacatctctgctgtagtggacaaagatttccttgataagtattctctgaaaccaaatgaccaaatcttggctgaagacaaacacaaggaactgtttgatgaacttgtgaaaaaattcaaagtcgaatatcatgctggtggctctacccagaattcaattaaagtggctcagtggatgattcaacagccacacaaagcagcaacattttttggatgcattgggatagataaatttggggagatcctgaagagaaaagctgctgaagcccatgtggatgctcattactacgagcagaatgagcagccaacaggaacttgtgctgcatgcatcactggtgacaacaggtccctcatagctaatcttgctgctgccaattgttataaaaaggaaaaacatcttgatctggagaaaaactggatgttggtagaaaaagcaagagtttgttatatagcaggcttttttcttacagtttccccagagtcagtattaaaggtggctcaccatgcttctgaaaacaacaggattttcactttgaatctatctgcaccgtttattagccagttctacaaggaatcattgatgaaagttatgccttatgttgatatactttttggaaatgagacagaagctgccacttttgctagagagcaaggctttgagactaaagacattaaagagatagccaaaaagacacaagccctgccaaagatgaactcaaagaggcagcgaatcgtgatcttcacccaagggagagatgacactataatggctacagaaagtgaagtcactgcttttgctgtcttggatcaagaccagaaagaaattattgataccaatggagctggagatgcatttgttggaggttttctgtctcaactggtctctgacaagcctctgactgaatgtatccgtgctggccactatgcagcaagcatcataattagacggactggctgcacctttcctgagaagccagacttccactgatggaagagctgaaaacacaagcccaggagtgcagacactgccctaattgcttcctgagaattcccatattaataaagaagaaaattatctgccattttttcctactataataatgctgaatcttaatttagagggtacaagggtatggtaatgcttgtagaatctttattatctcaacaatctaaaaaatgatgtttatttccatagtttgatagtgccacttaaatgccaattaaacaagaatataacatttcaatagaaatttttatttcattttcaattactttgtaaattcgtgtgtatttagtacactgatttgtttttttacatttctgctttgaatgcagatgcaatttaatataatagattttttaatgaattaatcttaacatagtaatctttagctttttatacaaatatatttaatttaggagtatatgtgtgtctatacacacacatacataaatataccacatatacacctgatagtcaaataaggtacagaaattttatcttgtcaattatgccaaataatctctttaatgtgcactcaaacatgtaataaactttggataattaaataatgtgccaaatttaagttgtaccacaatattcaaatcatagtcttatggaactctgtaattggatacaaacaaaaacttgtcatataggaatttttttctgtcttttccctgtgtacagcaaactgaggaagaaagatcattatttaatactgggccctgaaatgacacccaatttgttaatggaattatgaagaacagcaatataatacactgaagaataacttagtatcagagaccaataaatcacttttttaaggatgacaaaatggtataattggacttctggagtcagactttatatgaccttaggtaaatcttcgaacctcagtttcctttttgtaaaatgagataataacccttacatagaaggtcattgagatgatttgagcgagattaccaagtataagatatttgttataatgccttgtaaatgctttataagtagctgctgttattatcattatgattattttctttttgaagaaaaaaagataatgtttgtaaaactgaattcaaatcataggaaaggatttggccaggcgctgcagctcatgcttgtaatcccaacactttgggaggccaaggtgggaggatcacttgagcccaggagttcaagaccagcctgggtaacaaagtgaggccccacctctacaaaaaaatttttaaattatccagccacaggctgggcacagtggcttacacctgtaattccaccactttgggatgaggcaggtatcactagaggtcaagagttcaagaccagcctggccgccatgttggtgaaactccatctctattaaaaatacaaaaattagccaggcatggtggtggatacctgtaattccagctacttgggaggctgacacaggagaattgcttgaacccaggaggcggaggttgcagtgaggcaagatcacaccactgcactccaccctgagcaatagagtg

SEQ ID NO: 428755 - DNA, 1664 bp, Homo sapiens
gggcacccaatctctcgccctgtaaactgcggggtgacgggacgctgttactaggactcaagatggccaccgcgcccgctagtcatctcgctagcccgcgcgccagtgagctggcacgagacacgcggtggcccacggcgtctggggacgatctccagcccttcgcacggggcggagcgcccgccttccctccaatcagcacgccgggccggctagccaggggccgcccgcgcgcggggtgtgtgaggacgcgctcccagtcgctgagtgcctgagccgggaagcagttgctgtggtacctgctgctgcccgagcggacgtagagcatcggacgcgggcgccgtggcgttgggcaggagggcgaagccatgacgtcagtcagagaaaatattctctttggaatgggaaatcctctgcttgacatctctgctgtagtggacaaagatttccttgataagtattctctgaaaccaaatgaccaaatcttggctgaagacaaacacaaggaactgtttgatgaacttgtgaaaaaattcaaagtcgaatatcatgctggtggctctacccagaattcaattaaagtggctcagtggatgattcaacagccacacaaagcagcaacattttttggatgcattgggatagataaatttggggagatcctgaagagaaaagctgctgaagcccatgtggatgctcattactacgagcagaatgagcagccaacaggaacttgtgctgcatgcatcactggtgacaacaggtccctcatagctaatcttgctgctgccaattgttataaaaaggaaaaacatcttgatctggagaaaaactggatgttggtagaaaaagcaagagtttgttatatagcaggcttttttcttacagtttccccagagtcagtattaaaggtggctcaccatgcttctgaaaacaacaggattttcactttgaatctatctgcaccgtttattagccagttctacaaggaatcattgatgaaagttatgccttatgttgatatactttttggaaatgagacagaagctgccacttttgctagagagcaaggctttgagactaaagacattaaagagatagccaaaaagacacaagccctgccaaagatgaactcaaagaggcagcgaatcgtgatcttcacccaagggagagatgacactataatggctacagaaagtgaagtcactgcttttgctgtcttggatcaagaccagaaagaaattattgataccaatggagctggagatgcatttgttggaggttttctgtctcaactggtctctgacaagcctctgactgaatgtatccgtgctggccactatgcagcaagcatcataattagacggactggctgcacctttcctgagaagccagacttccactgatggaagagctgaaaacacaagcccaggagtgcagacactgccctaattgcttcctgagaattcccatattaataaagaagaaaattatctgccattttttcctactataataatgctgaatcttaatttagagggtacaagggtatggtaatgcttgtagaatctttattatctcaacaatctaaaaaatgatgtttatttccatagtttgatagtgccacttaaatgccaattaaacaagaatataacatttcaata

SEQ ID NO: 428756 - DNA, 2868 bp, Homo sapiens
ggcagaggtgggctgtaaagccaaagtggggtgggagcgcgaagatggcagctgctgaggaggagccgaagcccaaaaagctgaaggtggaggcgccgcaagcgctgaggcttgctactcagcctggcccacagaccagaagcaattagtgagacctgggaacataaagaaatgcaaaattttggtcactgatacctgcagtgccaaacctgcattttaacaagatccacgagatttgtatgcatgttaaagtttgaaaagcactgatggtgtgaaatgtggattatctatcaacattttccacaagagaagagaaaatattctctttggaatgggaaatcctctgcttgacatctctgctgtagtggacaaagatttccttgataagtattctctgaaaccaaatgaccaaatcttggctgaagacaaacacaaggaactgtttgatgaacttgtgaaaaaattcaaagtcgaatatcatgctggtggctctacccagaattcaattaaagtggctcagtggatgattcaacagccacacaaagcagcaacattttttggatgcattgggatagataaatttggggagatcctgaagagaaaagctgctgaagcccatgtggatgctcattactacgagcagaatgagcagccaacaggaacttgtgctgcatgcatcactggtgacaacaggtccctcatagctaatcttgctgctgccaattgttataaaaaggaaaaacatcttgatctggagaaaaactggatgttggtagaaaaagcaagagtttgttatatagcaggcttttttcttacagtttccccagagtcagtattaaaggtggctcaccatgcttctgaaaacaacaggattttcactttgaatctatctgcaccgtttattagccagttctacaaggaatcattgatgaaagttatgccttatgttgatatactttttggaaatgagacagaagctgccacttttgctagagagcaaggctttgagactaaagacattaaagagatagccaaaaagacacaagccctgccaaagatgaactcaaagaggcagcgaatcgtgatcttcacccaagggagagatgacactataatggctacagaaagtgaagtcactgcttttgctgtcttggatcaagaccagaaagaaattattgataccaatggagctggagatgcatttgttggaggttttctgtctcaactggtctctgacaagcctctgactgaatgtatccgtgctggccactatgcagcaagcatcataattagacggactggctgcacctttcctgagaagccagacttccactgatggaagagctgaaaacacaagcccaggagtgcagacactgccctaattgcttcctgagaattcccatattaataaagaagaaaattatctgccattttttcctactataataatgctgaatcttaatttagagggtacaagggtatggtaatgcttgtagaatctttattatctcaacaatctaaaaaatgatgtttatttccatagtttgatagtgccacttaaatgccaattaaacaagaatataacatttcaatagaaatttttatttcattttcaattactttgtaaattcgtgtgtatttagtacactgatttgtttttttacatttctgctttgaatgcagatgcaatttaatataatagattttttaatgaattaatcttaacatagtaatctttagctttttatacaaatatatttaatttaggagtatatgtgtgtctatacacacacatacataaatataccacatatacacctgatagtcaaataaggtacagaaattttatcttgtcaattatgccaaataatctctttaatgtgcactcaaacatgtaataaactttggataattaaataatgtgccaaatttaagttgtaccacaatattcaaatcatagtcttatggaactctgtaattggatacaaacaaaaacttgtcatataggaatttttttctgtcttttccctgtgtacagcaaactgaggaagaaagatcattatttaatactgggccctgaaatgacacccaatttgttaatggaattatgaagaacagcaatataatacactgaagaataacttagtatcagagaccaataaatcacttttttaaggatgacaaaatggtataattggacttctggagtcagactttatatgaccttaggtaaatcttcgaacctcagtttcctttttgtaaaatgagataataacccttacatagaaggtcattgagatgatttgagcgagattaccaagtataagatatttgttataatgccttgtaaatgctttataagtagctgctgttattatcattatgattattttctttttgaagaaaaaaagataatgtttgtaaaactgaattcaaatcataggaaaggatttggccaggcgctgcagctcatgcttgtaatcccaacactttgggaggccaaggtgggaggatcacttgagcccaggagttcaagaccagcctgggtaacaaagtgaggccccacctctacaaaaaaatttttaaattatccagccacaggctgggcacagtggcttacacctgtaattccaccactttgggatgaggcaggtatcactagaggtcaagagttcaagaccagcctggccgccatgttggtgaaactccatctctattaaaaatacaaaaattagccaggcatggtggtggatacctgtaattccagctacttgggaggctgacacaggagaattgcttgaacccaggaggcggaggttgcagtgaggcaagatcacaccactgcactccaccctgagcaatagagtg

SEQ ID NO: 428757 - DNA, 1970 bp, Homo sapiens
gggcacccaatctctcgccctgtaaactgcggggtgacgggacgctgttactaggactcaagatggccaccgcgcccgctagtcatctcgctagcccgcgcgccagtgagctggcacgagacacgcggtggcccacggcgtctggggacgatctccagcccttcgcacggggcggagcgcccgccttccctccaatcagcacgccgggccggctagccaggggccgcccgcgcgcggggtgtgtgaggacgcgctcccagtcgctgagtgcctgagccgggaagcagttgctgtggtacctgctgctgcccgagcggacgtagagcatcggacgcgggcgccgtggcgttgggcaggagggcgaagccatgacgtcagtcagagaaaatattctctttggaatgggaaatcctctgcttgacatctctgctgtagtggacaaagatttccttgataagtattctctgaaaccaaatgaccaaatcttggctgaagacaaacacaaggaactgtttgatgaacttgtgaaaaaattcaaagtcgaatatcatgctggtggctctacccagaattcaattaaagtggctcagtggatgattcaacagccacacaaagcagcaacattttttggatgcattgggatagataaatttggggagatcctgaagagaaaagctgctgaagcccatgtggatgctcattactacgagcagaatgagcagccaacaggaacttgtgctgcatgcatcactggtgacaacaggtccctcatagctaatcttgctgctgccaattgttataaaaaggaaaaacatcttgatctggagaaaaactggatgttggtagaaaaagcaagagtttgttatatagcaggcttttttcttacagtttccccagagtcagtattaaaggtggctcaccatgcttctgaaaacaacaggattttcactttgaatctatctgcaccgtttattagccagttctacaaggaatcattgatgaaagttatgccttatgttgatatactttttggaaatgagacagaagctgccacttttgctagagagcaaggctttgagactaaagacattaaagagatagccaaaaagacacaagccctgccaaagatgaactcaaagaggcagcgaatcgtgatcttcacccaagggagagatgacactataatggctacagaaagtgaagtcactgcttttgctgtcttggatcaagaccagaaagaaattattgataccaatggagctggagatgcatttgttggaggttttctgtctcaactggtctctgacaagcctctgactgaatgtatccgtgctggccactatgcagcaagcatcataattagacggactggctgcacctttcctgagaagccagacttccactgatggaagagctgaaaacacaagcccaggagtgcagacactgccctaattgcttcctgagaattcccatattaataaagaagaaaattatctgccattttttcctactataataatgctgaatcttaatttagagggtacaagggtatggtaatgcttgtagaatctttattatctcaacaatctaaaaaatgatgtttatttccatagtttgatagtgccacttaaatgccaattaaacaagaatataacatttcaataacaaaacaaacgagtggccctcgtggccctaccggaggacctctcgcgacgctaacctttactgagggatacttcctcatccctcctcactgcctaactcaccccgcgccataccgcccccccagcggagcccactcactccccagcgggtgccccccttgcacaccaaactaggggcccccacccgcacaaacccgcattcttaacgccctaccccgccccgcacaccgcagtagcgcccatatatctggtccagccgccccgagcctccactctctgcggtgcatgccccgccccccgcacccc

SEQ ID NO: 428758 - DNA, 1733 bp, Homo sapiens
gggcacccaatctctcgccctgtaaactgcggggtgacgggacgctgttactaggactcaagatggccaccgcgcccgctagtcatctcgctagcccgcgcgccagtgagctggcacgagacacgcggtggcccacggcgtctggggacgatctccagcccttcgcacggggcggagcgcccgccttccctccaatcagcacgccgggccggctagccaggggccgcccgcgcgcggggtgtgtgaggacgcgctcccagtcgctgagtgcctgagccgggaagcagttgctgtggtacctgctgctgcccgagcggacgtagagcatcggacgcgggcgccgtggcgttgggcaggagggcgaagccatgacgtcagtcagagaaaatattctctttggaatgggaaatcctctgcttgacatctctgctgtagtggacaaagatttccttgataagtattctctgaaaccaaatgaccaaatcttggctgaagacaaacacaaggaactgtttgatgaacttgtgaaaaaattcaaagtcgaatatcatgctggtggctctacccagaattcaattaaagtggctcagtggatgattcaacagccacacaaagcagcaacattttttggatgcattgggatagataaatttggggagatcctgaagagaaaagctgctgaagcccatgtggatgctcattactacgagcagaatgagcagccaacaggaacttgtgctgcatgcatcactggtgacaacaggtccctcatagctaatcttgctgctgccaattgttataaaaaggaaaaacatcttgatctggagaaaaactggatgttggtagaaaaagcaagagtttgttatatagcaggcttttttcttacagtttccccagagtcagtattaaaggtggctcaccatgcttctgaaaacaacaggattttcactttgaatctatctgcaccgtttattagccagttctacaaggaatcattgatgaaagttatgccttatgttgatatactttttggaaatgagacagaagctgccacttttgctagagagcaaggctttgagactaaagacattaaagagatagccaaaaagacacaagccctgccaaagatgaactcaaagaggcagcgaatcgtgatcttcacccaagggagagatgacactataatggctacagaaagtgaagtcactgcttttgctgtcttggatcaagaccagaaagaaattattgataccaatggagctggagatgcatttgttggaggttttctgtctcaactggtctctgacaagcctctgactgaatgtatccgtgctggccactatgcagcaagcatcataattagacggactggctgcacctttcctgagaagccagacttccactgatggaagagctgaaaacacaagcccaggagtgcagacactgccctaattgcttcctgagaattcccatattaataaagaagaaaattatctgccattttttcctactataataatgctgaatcttaatttagagggtacaagggtatggtaatgcttgtagaatctttattatctcaacaatctaaaaaatgatgtttatttccatagtttgatagtgccacttaaatgccaattaaacaagaatataacatttcaataggaaaaaaaaaagaacctaggaaaataactaaaaaaaactagaaaattaaggtggaggaatacgaaaaa

SEQ ID NO: 428759 - DNA, 1772 bp, Homo sapiens
gggcacccaatctctcgccctgtaaactgcggggtgacgggacgctgttactaggactcaagatggccaccgcgcccgctagtcatctcgctagcccgcgcgccagtgagctggcacgagacacgcggtggcccacggcgtctggggacgatctccagcccttcgcacggggcggagcgcccgccttccctccaatcagcacgccgggccggctagccaggggccgcccgcgcgcggggtgtgtgaggacgcgctcccagtcgctgagtgcctgagccgggaagcagttgctgtggtacctgctgctgcccgagcggacgtagagcatcggacgcgggcgccgtggcgttgggcaggagggcgaagccatgacgtcagtcagagaaaatattctctttggaatgggaaatcctctgcttgacatctctgctgtagtggacaaagatttccttgataagtattctctgaaaccaaatgaccaaatcttggctgaagacaaacacaaggaactgtttgatgaacttgtgaaaaaattcaaagtcgaatatcatgctggtggctctacccagaattcaattaaagtggctcagtggatgattcaacagccacacaaagcagcaacattttttggatgcattgggatagataaatttggggagatcctgaagagaaaagctgctgaagcccatgtggatgctcattactacgagcagaatgagcagccaacaggaacttgtgctgcatgcatcactggtgacaacaggtccctcatagctaatcttgctgctgccaattgttataaaaaggaaaaacatcttgatctggagaaaaactggatgttggtagaaaaagcaagagtttgttatatagcaggcttttttcttacagtttccccagagtcagtattaaaggtggctcaccatgcttctgaaaacaacaggattttcactttgaatctatctgcaccgtttattagccagttctacaaggaatcattgatgaaagttatgccttatgttgatatactttttggaaatgagacagaagctgccacttttgctagagagcaaggctttgagactaaagacattaaagagatagccaaaaagacacaagccctgccaaagatgaactcaaagaggcagcgaatcgtgatcttcacccaagggagagatgacactataatggctacagaaagtgaagtcactgcttttgctgtcttggatcaagaccagaaagaaattattgataccaatggagctggagatgcatttgttggaggttttctgtctcaactggtctctgacaagcctctgactgaatgtatccgtgctggccactatgcagcaagcatcataattagacggactggctgcacctttcctgagaagccagacttccactgatggaagagctgaaaacacaagcccaggagtgcagacactgccctaattgcttcctgagaattcccatattaataaagaagaaaattatctgccattttttcctactataataatgctgaatcttaatttagagggtacaagggtatggtaatgcttgtagaatctttattatctcaacaatctaaaaaatgatgtttatttccatagtttgatagtgcattaatgcattaacagattacttttcaaaaaaaaaaaaaaagggggggaaattccgagggcaattggcccgttttgaaaggccaagggataaagggggaaggggaaaggtggtgggatcgggaggaccaaggaagggtctggtgaggg

SEQ ID NO: 428760 - DNA, 2322 bp, Homo sapiens
cggacgcgtgggtcgacccacgcgtccggataaatttggggagatcctgaagagaaaagctgctgaagcccatgtggatgctcattactacgagcagaatgagcagccaacaggaacttgtgctgcatgcatcactggtgacaacaggtccctcatagctaatcttgctgctgccaattgttataaaaaggaaaaacatcttgatctggagaaaaactggatgttggtagaaaaagcaagagtttgttatatagcaggcttttttcttacagtttccccagagtcagtattaaaggtggctcaccatgcttctgaaaacaacaggattttcactttgaatctatctgcaccgtttattagccagttctacaaggaatcattgatgaaagttatgccttatgttgatatactttttggaaatgagacagaagctgccacttttgctagagagcaaggctttgagactaaagacattaaagagatagccaaaaagacacaagccctgccaaagatgaactcaaagaggcagcgaatcgtgatcttcacccaagggagagatgacactataatggctacagaaagtgaagtcactgcttttgctgtcttggatcaagaccagaaagaaattattgataccaatggagctggagatgcatttgttggaggttttctgtctcaactggtctctgacaagcctctgactgaatgtatccgtgctggccactatgcagcaagcatcataattagacggactggctgcacctttcctgagaagccagacttccactgatggaagagctgaaaacacaagcccaggagtgcagacactgccctaattgcttcctgagaattcccatattaataaagaagaaaattatctgccattttttcctactataataatgctgaatcttaatttagagggtacaagggtatggtaatgcttgtagaatctttattatctcaacaatctaaaaaatgatgtttatttccatagtttgatagtgccacttaaatgccaattaaacaagaatataacatttcaatagaaatttttatttcattttcaattactttgtaaattcgtgtgtatttagtacactgatttgtttttttacatttctgctttgaatgcagatgcaatttaatataatagattttttaatgaattaatcttaacatagtaatctttagctttttatacaaatatatttaatttaggagtatatgtgtgtctatacacacacatacataaatataccacatatacacctgatagtcaaataaggtacagaaattttatcttgtcaattatgccaaataatctctttaatgtgcactcaaacatgtaataaactttggataattaaataatgtgccaaatttaagttgtaccacaatattcaaatcatagtcttatggaactctgtaattggatacaaacaaaaacttgtcatataggaatttttttctgtcttttccctgtgtacagcaaactgaggaagaaagatcattatttaatactgggccctgaaatgacacccaatttgttaatggaattatgaagaacagcaatataatacactgaagaataacttagtatcagagaccaataaatcacttttttaaggatgacaaaatggtataattggacttctggagtcagactttatatgaccttaggtaaatcttcgaacctcagtttcctttttgtaaaatgagataataacccttacatagaaggtcattgagatgatttgagcgagattaccaagtataagatatttgttataatgccttgtaaatgctttataagtagctgctgttattatcattatgattattttctttttgaagaaaaaaagataatgtttgtaaaactgaattcaaatcataggaaaggatttggccaggcgctgcagctcatgcttgtaatcccaacactttgggaggccaaggtgggaggatcacttgagcccaggagttcaagaccagcctgggtaacaaagtgaggccccacctctacaaaaaaatttttaaattatccagccacaggctgggcacagtggcttacacctgtaattccaccactttgggatgaggcaggtatcactagaggtcaagagttcaagaccagcctggccgccatgttggtgaaactccatctctattaaaaatacaaaaattagccaggcatggtggtggatacctgtaattccagctacttgggaggctgacacaggagaattgcttgaacccaggaggcggaggttgcagtgaggcaagatcacaccactgcactccaccctgagcaatagagtg

SEQ ID NO: 428761 - DNA, 1495 bp, Homo sapiens
gggcacccaatctctcgccctgtaaactgcggggtgacgggacgctgttactaggactcaagatggccaccgcgcccgctagtcatctcgctagcccgcgcgccagtgagctggcacgagacacgcggtggcccacggcgtctggggacgatctccagcccttcgcacggggcggagcgcccgccttccctccaatcagcacgccgggccggctagccaggggccgcccgcgcgcggggtgtgtgaggacgcgctcccagtcgctgagtgcctgagccgggaagcagttgctgtggtacctgctgctgcccgagcggacgtagagcatcggacgcgggcgccgtggcgttgggcaggagggcgaagccatgacgtcagtcagagaaaatattctctttggaatgggaaatcctctgcttgacatctctgctgtagtggacaaagatttccttgataagtattctctgaaaccaaatgaccaaatcttggctgaagacaaacacaaggaactgtttgatgaacttgtgaaaaaattcaaagtcgaatatcatgctggtggctctacccagaattcaattaaagtggctcagtggatgattcaacagccacacaaagcagcaacattttttggatgcattgggatagataaatttggggagatcctgaagagaaaagctgctgaagcccatgtggatgctcattactacgagcagaatgagcagccaacaggaacttgtgctgcatgcatcactggtgacaacaggtccctcatagctaatcttgctgctgccaattgttataaaaaggaaaaacatcttgatctggagaaaaactggatgttggtagaaaaagcaagagtttgttatatagcaggcttttttcttacagtttccccagagtcagtattaaaggtggctcaccatgcttctgaaaacaacaggattttcactttgaatctatctgcaccgtttattagccagttctacaaggaatcattgatgaaagttatgccttatgttgatatactttttggaaatgagacagaagctgccacttttgctagagagcaaggctttgagactaaagacattaaagagatagccaaaaagacacaagccctgccaaagatgaactcaaagaggcagcgaatcgtgatcttcacccaagggagagatgacactataatggctacagaaagtgaagtcactgcttttgctgtcttggatcaagaccagaaagaaattattgataccaatggagctggagatgcatttgttggaggttttctgtctcaactggtctctgacaagcctctgactgaatgtatccgtgctggccactatgcagcaagcatcataattagacggactggctgcacctttcctgagaagccagacttccactgatggaagagctgaaaacacaagcccaggagtgcagacactgccctaattgcttcctgagaattcccatattaataaagaagaaaattatc

SEQ ID NO: 428762 - DNA, 2766 bp, Homo sapiens
gggcacccaatctctcgccctgtaaactgcggggtgacgggacgctgttactaggactcaagatggccaccgcgcccgctagtcatctcgctagcccgcgcgccagtgagctggcacgagacacgcggtggcccacggcgtctggggacgatctccagcccttcgcacggggcggagcgcccgccttccctccaatcagcacgccgggccggctagccaggggccgcccgcgcgcggggtgtgtgaggacgcgctcccagtcgctgagtgcctgagccgggaagcagttgctgtggtacctgctgctgcccgagcggacgtagagcatcggacgcgggcgccgtggcgttgggcaggagggcgaagccatgacgtcagtcagagaaaatattctctttggaatgggaaatcctctgcttgacatctctgctgtagtggacaaagatttccttgataagtattctctgaaaccaaatgaccaaatcttggctgaagacaaacacaaggaactgtttgatgaacttgtgaaaaaattcaaagtcgaatatcatgctggtggctctacccagaattcaattaaagtggctcagtggatgattcaacagccacacaaagcagcaacattttttggatgcattgggatagataaatttggggagatcctgaagagaaaagctgctgaagcccatgtggatgctcattactacgagcagaatgagcagccaacaggaacttgtgctgcatgcatcactggtgacaacaggtccctcatagctaatcttgctgctgccaattgttataaaaaggaaaaacatcttgatctggagaaaaactggatgttggtagaaaaagcaagagtttgttatatagcaaagctgccacttttgctagagagcaaggctttgagactaaagacattaaagagatagccaaaaagacacaagccctgccaaagatgaactcaaagaggcagcgaatcgtgatcttcacccaagggagagatgacactataatggctacagaaagtgaagtcactgcttttgctgtcttggatcaagaccagaaagaaattattgataccaatggagctggagatgcatttgttggaggttttctgtctcaactggtctctgacaagcctctgactgaatgtatccgtgctggccactatgcagcaagcatcataattagacggactggctgcacctttcctgagaagccagacttccactgatggaagagctgaaaacacaagcccaggagtgcagacactgccctaattgcttcctgagaattcccatattaataaagaagaaaattatctgccattttttcctactataataatgctgaatcttaatttagagggtacaagggtatggtaatgcttgtagaatctttattatctcaacaatctaaaaaatgatgtttatttccatagtttgatagtgccacttaaatgccaattaaacaagaatataacatttcaatagaaatttttatttcattttcaattactttgtaaattcgtgtgtatttagtacactgatttgtttttttacatttctgctttgaatgcagatgcaatttaatataatagattttttaatgaattaatcttaacatagtaatctttagctttttatacaaatatatttaatttaggagtatatgtgtgtctatacacacacatacataaatataccacatatacacctgatagtcaaataaggtacagaaattttatcttgtcaattatgccaaataatctctttaatgtgcactcaaacatgtaataaactttggataattaaataatgtgccaaatttaagttgtaccacaatattcaaatcatagtcttatggaactctgtaattggatacaaacaaaaacttgtcatataggaatttttttctgtcttttccctgtgtacagcaaactgaggaagaaagatcattatttaatactgggccctgaaatgacacccaatttgttaatggaattatgaagaacagcaatataatacactgaagaataacttagtatcagagaccaataaatcacttttttaaggatgacaaaatggtataattggacttctggagtcagactttatatgaccttaggtaaatcttcgaacctcagtttcctttttgtaaaatgagataataacccttacatagaaggtcattgagatgatttgagcgagattaccaagtataagatatttgttataatgccttgtaaatgctttataagtagctgctgttattatcattatgattattttctttttgaagaaaaaaagataatgtttgtaaaactgaattcaaatcataggaaaggatttggccaggcgctgcagctcatgcttgtaatcccaacactttgggaggccaaggtgggaggatcacttgagcccaggagttcaagaccagcctgggtaacaaagtgaggccccacctctacaaaaaaatttttaaattatccagccacaggctgggcacagtggcttacacctgtaattccaccactttgggatgaggcaggtatcactagaggtcaagagttcaagaccagcctggccgccatgttggtgaaactccatctctattaaaaatacaaaaattagccaggcatggtggtggatacctgtaattccagctacttgggaggctgacacaggagaattgcttgaacccaggaggcggaggttgcagtgaggcaagatcacaccactgcactccaccctgagcaatagagtg

SEQ ID NO: 428763 - DNA, 1688 bp, Homo sapiens
gggcacccaatctctcgccctgtaaactgcggggtgacgggacgctgttactaggactcaagatggccaccgcgcccgctagtcatctcgctagcccgcgcgccagtgagctggcacgagacacgcggtggcccacggcgtctggggacgatctccagcccttcgcacggggcggagcgcccgccttccctccaatcagcacgccgggccggctagccaggggccgcccgcgcgcggggtgtgtgaggacgcgctcccagtcgctgagtgcctgagccgggaagcagttgctgtggtacctgctgctgcccgagcggacgtagagcatcggacgcgggcgccgtggcgttgggcaggagggcgaagccatgacgtcagtcagagaaaatattctctttggaatgggaaatcctctgcttgacatctctgctgtagtggacaaagatttccttgataagtattctctgaaaccaaatgaccaaatcttggctgaagacaaacacaaggaactgtttgatgaacttgtgaaaaaattcaaagtcgaatatcatgctggtggctctacccagaattcaattaaagtggctcagtggatgattcaacagccacacaaagcagcaacattttttggatgcattgggatagataaatttggggagatcctgaagagaaaagctgctgaagcccatgtggatgctcattactacgagcagaatgagcagccaacaggaacttgtgctgcatgcatcactggtgacaacaggtccctcatagctaatcttgctgctgccaattgttataaaaaggaaaaacatcttgatctggagaaaaactggatgttggtagaaaaagcaagagtttgttatatagcaggcttttttcttacagtttccccagagtcagtattaaaggtggctcaccatgcttctgaaaacaacaggattttcactttgaatctatctgcaccgtttattagccagttctacaaggaatcattgatgaaagttatgccttatgttgatatactttttggaaatgagacagaagctgccacttttgctagagagcaaggctttgagactaaagacattaaagagatagccaaaaagacacaagccctgccaaagatgaactcaaagaggcagcgaatcgtgatcttcacccaagggagagatgacactataatggctacagaaagtgaagtcactgcttttgctgtcttggatcaagaccagaaagaaattattgataccaatggagctggagatgcatttgttggaggttttctgtctcaactggtctctgacaagcctctgactgaatgtatccgtgctggccactatgcagcaagcatcataattagacggactggctgcacctttcctgagaagccagacttccactgatggaagagctgaaaacacaagcccaggagtgcagacactgccctaattgcttcctgagaattcccatattaataaagaagaaaattatcaaaaaaaaaaaaaaaaaacacaaaaaaggggggggggctaaaaatttccctggggggccaagtttacgggttcccagtttttgtacaaggggccctaaggggggggataaaaagagggaggggggggtttaaaacgcgggtggaaaggtctgggcttggaaggagctcttggggggatttgggaacccccggt

SEQ ID NO: 428764 - DNA, 1548 bp, Homo sapiens
gggcacccaatctctcgccctgtaaactgcggggtgacgggacgctgttactaggactcaagatggccaccgcgcccgctagtcatctcgctagcccgcgcgccagtgagctggcacgagacacgcggtggcccacggcgtctggggacgatctccagcccttcgcacggggcggagcgcccgccttccctccaatcagcacgccgggccggctagccaggggccgcccgcgcgcggggtgtgtgaggacgcgctcccagtcgctgagtgcctgagccgggaagcagttgctgtggtacctgctgctgcccgagcggacgtagagcatcggacgcgggcgccgtggcgttgggcaggagggcgaagccatgacgtcagtcagagaaaatattctctttggaatgggaaatcctctgcttgacatctctgctgtagtggacaaagatttccttgataagtattctctgaaaccaaatgaccaaatcttggctgaagacaaacacaaggaactgtttgatgaacttgtgaaaaaattcaaagtcgaatatcatgctggtggctctacccagaattcaattaaagtggctcagtggatgattcaacagccacacaaagcagcaacattttttggatgcattgggatagataaatttggggagatcctgaagagaaaagctgctgaagcccatgtggatgctcattactacgagcagaatgagcagccaacaggaacttgtgctgcatgcatcactggtgacaacaggtccctcatagctaatcttgctgctgccaattgttataaaaaggaaaaacatcttgatctggagaaaaactggatgttggtagaaaaagcaagagtttgttatatagcaggcttttttcttacagtttccccagagtcagtattaaaggtggctcaccatgcttctgaaaacaacaggattttcactttgaatctatctgcaccgtttattagccagttctacaaggaatcattgatgaaagttatgccttatgttgatatactttttggaaatgagacagaagctgccacttttgctagagagcaaggctttgagactaaagacattaaagagatagccaaaaagacacaagccctgccaaagatgaactcaaagaggcagcgaatcgtgatcttcacccaagggagagatgacactataatggctacagaaagtgaagtcactgcttttgctgtcttggatcaagaccagaaagaaattattgataccaatggagctggagatgcatttgttggaggttttctgtctcaactggtctctgacaagcctctgactgaatgtatccgtgctggccactatgcagcaagcatcataattagacggactggctgcacctttcctgagaagccagacttccactgatggaagagctgaaaacacaagcccaggagtgcagacactgccctaattgcttcctgagaattcccatattaataaagaagaaaattatctaccgcagtatgcggaggatcctcttcttctccttaagttgttcttcctccct

SEQ ID NO: 428765 - DNA, 1934 bp, Homo sapiens
gcatagctgcaacgactctcttaatctccaccgctacacgaagctgccacttttgctagagagcaaggctttgagactaaagacattaaagagatagccaaaaagacacaagccctgccaaagatgaactcaaagaggcagcgaatcgtgatcttcacccaagggagagatgacactataatggctacagaaagtgaagtcactgcttttgctgtcttggatcaagaccagaaagaaattattgataccaatggagctggagatgcatttgttggaggttttctgtctcaactggtctctgacaagcctctgactgaatgtatccgtgctggccactatgcagcaagcatcataattagacggactggctgcacctttcctgagaagccagacttccactgatggaagagctgaaaacacaagcccaggagtgcagacactgccctaattgcttcctgagaattcccatattaataaagaagaaaattatctgccattttttcctactataataatgctgaatcttaatttagagggtacaagggtatggtaatgcttgtagaatctttattatctcaacaatctaaaaaatgatgtttatttccatagtttgatagtgccacttaaatgccaattaaacaagaatataacatttcaatagaaatttttatttcattttcaattactttgtaaattcgtgtgtatttagtacactgatttgtttttttacatttctgctttgaatgcagatgcaatttaatataatagattttttaatgaattaatcttaacatagtaatctttagctttttatacaaatatatttaatttaggagtatatgtgtgtctatacacacacatacataaatataccacatatacacctgatagtcaaataaggtacagaaattttatcttgtcaattatgccaaataatctctttaatgtgcactcaaacatgtaataaactttggataattaaataatgtgccaaatttaagttgtaccacaatattcaaatcatagtcttatggaactctgtaattggatacaaacaaaaacttgtcatataggaatttttttctgtcttttccctgtgtacagcaaactgaggaagaaagatcattatttaatactgggccctgaaatgacacccaatttgttaatggaattatgaagaacagcaatataatacactgaagaataacttagtatcagagaccaataaatcacttttttaaggatgacaaaatggtataattggacttctggagtcagactttatatgaccttaggtaaatcttcgaacctcagtttcctttttgtaaaatgagataataacccttacatagaaggtcattgagatgatttgagcgagattaccaagtataagatatttgttataatgccttgtaaatgctttataagtagctgctgttattatcattatgattattttctttttgaagaaaaaaagataatgtttgtaaaactgaattcaaatcataggaaaggatttggccaggcgctgcagctcatgcttgtaatcccaacactttgggaggccaaggtgggaggatcacttgagcccaggagttcaagaccagcctgggtaacaaagtgaggccccacctctacaaaaaaatttttaaattatccagccacaggctgggcacagtggcttacacctgtaattccaccactttgggatgaggcaggtatcactagaggtcaagagttcaagaccagcctggccgccatgttggtgaaactccatctctattaaaaatacaaaaattagccaggcatggtggtggatacctgtaattccagctacttgggaggctgacacaggagaattgcttgaacccaggaggcggaggttgcagtgaggcaagatcacaccactgcactccaccctgagcaatagagtg

SEQ ID NO: 428766 - DNA, 1762 bp, Homo sapiens
gggcacccaatctctcgccctgtaaactgcggggtgacgggacgctgttactaggactcaagatggccaccgcgcccgctagtcatctcgctagcccgcgcgccagtgagctggcacgagacacgcggtggcccacggcgtctggggacgatctccagcccttcgcacggggcggagcgcccgccttccctccaatcagcacgccgggccggctagccaggggccgcccgcgcgcggggtgtgtgaggacgcgctcccagtcgctgagtgcctgagccgggaagcagttgctgtggtacctgctgctgcccgagcggacgtagagcatcggacgcgggcgccgtggcgttgggcaggagggcgaagccatgacgtcagtcagagaaaatattctctttggaatgggaaatcctctgcttgacatctctgctgtagtggacaaagatttccttgataagtattctctgaaaccaaatgaccaaatcttggctgaagacaaacacaaggaactgtttgatgaacttgtgaaaaaattcaaagtcgaatatcatgctggtggctctacccagaattcaattaaagtggctcagtggatgattcaacagccacacaaagcagcaacattttttggatgcattgggatagataaatttggggagatcctgaagagaaaagctgctgaagcccatgtggatgctcattactacgagcagaatgagcagccaacaggaacttgtgctgcatgcatcactggtgacaacaggtccctcatagctaatcttgctgctgccaattgttataaaaaggaaaaacatcttgatctggagaaaaactggatgttggtagaaaaagcaagagtttgttatatagcaggcttttttcttacagtttccccagagtcagtattaaaggtggctcaccatgcttctgaaaacaacaggattttcactttgaatctatctgcaccgtttattagccagttctacaaggaatcattgatgaaagttatgccttatgttgatatactttttggaaatgagacagaagctgccacttttgctagagagcaaggctttgagactaaagacattaaagagatagccaaaaagacacaagccctgccaaagatgaactcaaagaggcagcgaatcgtgatcttcacccaagggagagatgacactataatggctacagaaagtgaagtcactgcttttgctgtcttggatcaagaccagaaagaaattattgataccaatggagctggagatgcatttgttggaggctggtgtgcagtggtgcaatctcagctcactgcaacctccacctcccgggttcaaatgattctcctgcctcagcctcccaagcagctgggaccacaggttttctgtctcaactggtctctgacaagcctctgactgaatgtatccgtgctggccactatgcagcaagcatcataattagacggactggctgcacctttcctgagaagccagacttccactgatggaagagctgaaaacacaagcccaggagtgcagacactgccctaattgcttcctgagaattcccatattaataaagaagaaaattatctgccattttttcctactataataatgctgaatcttaatttagagggtacaagggtatggtaatgcttgtagaatctttattatctcaacaatctaaaaaatgatgtttatttccatagtttgatagtgccacttaaatgccaattaaacaagaatataacatttcaata

SEQ ID NO: 428767 - DNA, 1804 bp, Homo sapiens
cacccgcacccccaccctctgctccctcctcagaatagaaggaaacttccacaagtgcaaaaagtgaagtcactgcttttgctgtcttggatcaagaccagaaagaaattattgataccaatggagctggagatgcatttgttggaggttttctgtctcaactggtctctgacaagcctctgactgaatgtatccgtgctggccactatgcagcaagcatcataattagacggactggctgcacctttcctgagaagccagacttccactgatggaagagctgaaaacacaagcccaggagtgcagacactgccctaattgcttcctgagaattcccatattaataaagaagaaaattatctgccattttttcctactataataatgctgaatcttaatttagagggtacaagggtatggtaatgcttgtagaatctttattatctcaacaatctaaaaaatgatgtttatttccatagtttgatagtgccacttaaatgccaattaaacaagaatataacatttcaatagaaatttttatttcattttcaattactttgtaaattcgtgtgtatttagtacactgatttgtttttttacatttctgctttgaatgcagatgcaatttaatataatagattttttaatgaattaatcttaacatagtaatctttagctttttatacaaatatatttaatttaggagtatatgtgtgtctatacacacacatacataaatataccacatatacacctgatagtcaaataaggtacagaaattttatcttgtcaattatgccaaataatctctttaatgtgcactcaaacatgtaataaactttggataattaaataatgtgccaaatttaagttgtaccacaatattcaaatcatagtcttatggaactctgtaattggatacaaacaaaaacttgtcatataggaatttttttctgtcttttccctgtgtacagcaaactgaggaagaaagatcattatttaatactgggccctgaaatgacacccaatttgttaatggaattatgaagaacagcaatataatacactgaagaataacttagtatcagagaccaataaatcacttttttaaggatgacaaaatggtataattggacttctggagtcagactttatatgaccttaggtaaatcttcgaacctcagtttcctttttgtaaaatgagataataacccttacatagaaggtcattgagatgatttgagcgagattaccaagtataagatatttgttataatgccttgtaaatgctttataagtagctgctgttattatcattatgattattttctttttgaagaaaaaaagataatgtttgtaaaactgaattcaaatcataggaaaggatttggccaggcgctgcagctcatgcttgtaatcccaacactttgggaggccaaggtgggaggatcacttgagcccaggagttcaagaccagcctgggtaacaaagtgaggccccacctctacaaaaaaatttttaaattatccagccacaggctgggcacagtggcttacacctgtaattccaccactttgggatgaggcaggtatcactagaggtcaagagttcaagaccagcctggccgccatgttggtgaaactccatctctattaaaaatacaaaaattagccaggcatggtggtggatacctgtaattccagctacttgggaggctgacacaggagaattgcttgaacccaggaggcggaggttgcagtgaggcaagatcacaccactgcactccaccctgagcaatagagtg

SEQ ID NO: 428768 - DNA, 1792 bp, Homo sapiens
atttttatttcgttattcaatatacccacaaatccaaccagcaccaccaaagtgaagtcactgcttttgctgtcttggatcaagaccagaaagaaattattgataccaatggagctggagatgcatttgttggaggttttctgtctcaactggtctctgacaagcctctgactgaatgtatccgtgctggccactatgcagcaagcatcataattagacggactggctgcacctttcctgagaagccagacttccactgatggaagagctgaaaacacaagcccaggagtgcagacactgccctaattgcttcctgagaattcccatattaataaagaagaaaattatctgccattttttcctactataataatgctgaatcttaatttagagggtacaagggtatggtaatgcttgtagaatctttattatctcaacaatctaaaaaatgatgtttatttccatagtttgatagtgccacttaaatgccaattaaacaagaatataacatttcaatagaaatttttatttcattttcaattactttgtaaattcgtgtgtatttagtacactgatttgtttttttacatttctgctttgaatgcagatgcaatttaatataatagattttttaatgaattaatcttaacatagtaatctttagctttttatacaaatatatttaatttaggagtatatgtgtgtctatacacacacatacataaatataccacatatacacctgatagtcaaataaggtacagaaattttatcttgtcaattatgccaaataatctctttaatgtgcactcaaacatgtaataaactttggataattaaataatgtgccaaatttaagttgtaccacaatattcaaatcatagtcttatggaactctgtaattggatacaaacaaaaacttgtcatataggaatttttttctgtcttttccctgtgtacagcaaactgaggaagaaagatcattatttaatactgggccctgaaatgacacccaatttgttaatggaattatgaagaacagcaatataatacactgaagaataacttagtatcagagaccaataaatcacttttttaaggatgacaaaatggtataattggacttctggagtcagactttatatgaccttaggtaaatcttcgaacctcagtttcctttttgtaaaatgagataataacccttacatagaaggtcattgagatgatttgagcgagattaccaagtataagatatttgttataatgccttgtaaatgctttataagtagctgctgttattatcattatgattattttctttttgaagaaaaaaagataatgtttgtaaaactgaattcaaatcataggaaaggatttggccaggcgctgcagctcatgcttgtaatcccaacactttgggaggccaaggtgggaggatcacttgagcccaggagttcaagaccagcctgggtaacaaagtgaggccccacctctacaaaaaaatttttaaattatccagccacaggctgggcacagtggcttacacctgtaattccaccactttgggatgaggcaggtatcactagaggtcaagagttcaagaccagcctggccgccatgttggtgaaactccatctctattaaaaatacaaaaattagccaggcatggtggtggatacctgtaattccagctacttgggaggctgacacaggagaattgcttgaacccaggaggcggaggttgcagtgaggcaagatcacaccactgcactccaccctgagcaatagagtg

SEQ ID NO: 428769 - DNA, 1614 bp, Homo sapiens
gggcacccaatctctcgccctgtaaactgcggggtgacgggacgctgttactaggactcaagatggccaccgcgcccgctagtcatctcgctagcccgcgcgccagtgagctggcacgagacacgcggtggcccacggcgtctggggacgatctccagcccttcgcacggggcggagcgcccgccttccctccaatcagcacgccgggccggctagccaggggccgcccgcgcgcggggtgtgtgaggacgcgctcccagtcgctgagtgcctgagccgggaagcagttgctgtggtacctgctgctgcccgagcggacgtagagcatcggacgcgggcgccgtggcgttgggcaggagggcgaagccatgacgtcagtcagagaaaatattctctttggaatgggaaatcctctgcttgacatctctgctgtagtggacaaagatttccttgataagtattctctgaaaccaaatgaccaaatcttggctgaagacaaacacaaggaactgtttgatgaacttgtgaaaaaattcaaagtcgaatatcatgctggtggctctacccagaattcaattaaagtggctcagtggatgattcaacagccacacaaagcagcaacattttttggatgcattgggatagataaatttggggagatcctgaagagaaaagctgctgaagcccatgtggatgctcattactacgagcagaatgagcagccaacaggaacttgtgctgcatgcatcactggtgacaacaggtccctcatagctaatcttgctgctgccaattgttataaaaaggaaaaacatcttgatctggagaaaaactggatgttggtagaaaaagcaagagtttgttatatagcaggcttttttcttacagtttccccagagtcagtattaaaggtggctcaccatgcttctgaaaacaacaggattttcactttgaatctatctgcaccgtttattagccagttctacaaggaatcattgatgaaagttatgccttatgttgatatactttttggaaatgagacagaagctgccacttttgctagagagcaaggctttgagactaaagacattaaagagatagccaaaaagacacaagccctgccaaagatgaactcaaagaggcagcgaatcgtgatcttcacccaagggagagatgacactataatggctacagaaagtgaagtcactgcttttgctgtcttggatcaagaccagaaagaaattattgataccaatggagctggagatgcatttgttggaggttttctgtctcaactggtctctgacaagcctctgactgaatgtatccgtgctggccactattagacggactggctgcacctttcctgagaagccagacttccactgatggaagagctgaaaacacaagcccaggagtgcagacactgagaattcccatattaataaagaagaaaattatctgccattttttcctactataataatgctgaatcttaatttagagggtattgtagaatctttattatctcaacaatctaaaaaatgatgtttatttccatagtttgatagtgccacttaaatgccaattaaacaagaatataacatttcaata

SEQ ID NO: 428770 - DNA, 1813 bp, Homo sapiens
cagcccagagcgataaaaaaaacaacaaacaacccacaacccccaccaaaaccccacataaaaacaaaaaaagtgaagtcactgcttttgctgtcttggatcaagaccagaaagaaattattgataccaatggagctggagatgcatttgttggaggttttctgtctcaactggtctctgacaagcctctgactgaatgtatccgtgctggccactatgcagcaagcatcataattagacggactggctgcacctttcctgagaagccagacttccactgatggaagagctgaaaacacaagcccaggagtgcagacactgccctaattgcttcctgagaattcccatattaataaagaagaaaattatctgccattttttcctactataataatgctgaatcttaatttagagggtacaagggtatggtaatgcttgtagaatctttattatctcaacaatctaaaaaatgatgtttatttccatagtttgatagtgccacttaaatgccaattaaacaagaatataacatttcaatagaaatttttatttcattttcaattactttgtaaattcgtgtgtatttagtacactgatttgtttttttacatttctgctttgaatgcagatgcaatttaatataatagattttttaatgaattaatcttaacatagtaatctttagctttttatacaaatatatttaatttaggagtatatgtgtgtctatacacacacatacataaatataccacatatacacctgatagtcaaataaggtacagaaattttatcttgtcaattatgccaaataatctctttaatgtgcactcaaacatgtaataaactttggataattaaataatgtgccaaatttaagttgtaccacaatattcaaatcatagtcttatggaactctgtaattggatacaaacaaaaacttgtcatataggaatttttttctgtcttttccctgtgtacagcaaactgaggaagaaagatcattatttaatactgggccctgaaatgacacccaatttgttaatggaattatgaagaacagcaatataatacactgaagaataacttagtatcagagaccaataaatcacttttttaaggatgacaaaatggtataattggacttctggagtcagactttatatgaccttaggtaaatcttcgaacctcagtttcctttttgtaaaatgagataataacccttacatagaaggtcattgagatgatttgagcgagattaccaagtataagatatttgttataatgccttgtaaatgctttataagtagctgctgttattatcattatgattattttctttttgaagaaaaaaagataatgtttgtaaaactgaattcaaatcataggaaaggatttggccaggcgctgcagctcatgcttgtaatcccaacactttgggaggccaaggtgggaggatcacttgagcccaggagttcaagaccagcctgggtaacaaagtgaggccccacctctacaaaaaaatttttaaattatccagccacaggctgggcacagtggcttacacctgtaattccaccactttgggatgaggcaggtatcactagaggtcaagagttcaagaccagcctggccgccatgttggtgaaactccatctctattaaaaatacaaaaattagccaggcatggtggtggatacctgtaattccagctacttgggaggctgacacaggagaattgcttgaacccaggaggcggaggttgcagtgaggcaagatcacaccactgcactccaccctgagcaatagagtg

SEQ ID NO: 428771 - DNA, 1408 bp, Homo sapiens
gggcacccaatctctcgccctgtaaactgcggggtgacgggacgctgttactaggactcaagatggccaccgcgcccgctagtcatctcgctagcccgcgcgccagtgagctggcacgagacacgcggtggcccacggcgtctggggacgatctccagcccttcgcacggggcggagcgcccgccttccctccaatcagcacgccgggccggctagccaggggccgcccgcgcgcggggtgtgtgaggacgcgctcccagtcgctgagtgcctgagccgggaagcagttgctgtggtacctgctgctgcccgagcggacgtagagcatcggacgcgggcgccgtggcgttgggcaggagggcgaagccatgacgtcagtcagagaaaatattctctttggaatgggaaatcctctgcttgacatctctgctgtagtggacaaagatttccttgataagtattctctgaaaccaaatgaccaaatcttggctgaagacaaacacaaggaactgtttgatgaacttgtgaaaaaattcaaagtcgaatatcatgctggtggctctacccagaattcaattaaagtggctcagtggatgattcaacagccacacaaagcagcaacattttttggatgcattgggatagataaatttggggagatcctgaagagaaaagctgctgaagcccatgtggatgctcattactacgagcagaatgagcagccaacaggaacttgtgctgcatgcatcactggtgacaacaggtccctcatagctaatcttgctgctgccaattgttataaaaaggaaaaacatcttgatctggagaaaaactggatgttggtagaaaaagcaagagtttgttatatagcaggcttttttcttacagtttccccagagtcagtattaaaggtggctcaccatgcttctgaaaacaacaggattttcactttgaatctatctgcaccgtttattagccagttctacaaggaatcattgatgaaagttatgccttatgttgatatactttttggaaatgagacagaagctgccacttttgctagagagcaaggctttgagactaaagacattaaagagatagccaaaaagacacaagccctgccaaagatgaactcaaagaggcagcgaatcgtgatcttcacccaagggagagatgacactataatggctacaggttttctgtctcaactggtctctgacaagcctctgactgaatgtatccgtgctggccactatgcagcaagcatcataattagacggactggctgcacctttcctgagaagccagacttccactgatggaagagctgaaaacacaagcccaggagtgcagacactgccctaattgcttcctgagaattcccatattaataaagaagaaaattatc

SEQ ID NO: 428772 - DNA, 2730 bp, Homo sapiens
gggcacccaatctctcgccctgtaaactgcggggtgacgggacgctgttactaggactcaagatggccaccgcgcccgctagtcatctcgctagcccgcgcgccagtgagctggcacgagacacgcggtggcccacggcgtctggggacgatctccagcccttcgcacggggcggagcgcccgccttccctccaatcagcacgccgggccggctagccaggggccgcccgcgcgcggggtgtgtgaggacgcgctcccagtcgctgagtgcctgagccgggaagcagttgctgtggtacctgctgctgcccgagcggactggatggcagaggtgggctgtagagccaaagtggggtgggagcgcgaagatggcagctgctgaggaggagccgaagcccaaaaagctgaaggtggaggcgccgcaagcgctgagagaaaatattctctttggaatgggaaatcctctgcttgacatctctgctgtagtggacaaagatttccttgataagtattctctgaaaccaaatgaccaaatcttggctgaagacaaacacaaggaactgtttgatgaacttgtgaaaaaattcaaagtcgaatatcatgctggtggctctacccagaattcaattaaagtggctcagtggatgattcaacagccacacaaagcagcaacattttttggatgcattgggatagataaatttggggagatcctgaagagaaaagctgctgaagcccatgtggatgctcattactacgagcagaatgagcagccaacaggaacttgtgctgcatgcatcactggtgacaacaggtccctcatagctaatcttgctgctgccaattgttataaaaaggaaaaacatcttgatctggagaaaaactggatgttggtagaaaaagcaagagtttgttatatagcaaagctgccacttttgctagagagcaaggctttgagactaaagacattaaagagatagccaaaaagacacaagccctgccaaagatgaactcaaagaggcagcgaatcgtgatcttcacccaagggagagatgacactataatggctacaggttttctgtctcaactggtctctgacaagcctctgactgaatgtatccgtgctggccactatgcagcaagcatcataattagacggactggctgcacctttcctgagaagccagacttccactgatggaagagctgaaaacacaagcccaggagtgcagacactgccctaattgcttcctgagaattcccatattaataaagaagaaaattatctgccattttttcctactataataatgctgaatcttaatttagagggtacaagggtatggtaatgcttgtagaatctttattatctcaacaatctaaaaaatgatgtttatttccatagtttgatagtgccacttaaatgccaattaaacaagaatataacatttcaatagaaatttttatttcattttcaattactttgtaaattcgtgtgtatttagtacactgatttgtttttttacatttctgctttgaatgcagatgcaatttaatataatagattttttaatgaattaatcttaacatagtaatctttagctttttatacaaatatatttaatttaggagtatatgtgtgtctatacacacacatacataaatataccacatatacacctgatagtcaaataaggtacagaaattttatcttgtcaattatgccaaataatctctttaatgtgcactcaaacatgtaataaactttggataattaaataatgtgccaaatttaagttgtaccacaatattcaaatcatagtcttatggaactctgtaattggatacaaacaaaaacttgtcatataggaatttttttctgtcttttccctgtgtacagcaaactgaggaagaaagatcattatttaatactgggccctgaaatgacacccaatttgttaatggaattatgaagaacagcaatataatacactgaagaataacttagtatcagagaccaataaatcacttttttaaggatgacaaaatggtataattggacttctggagtcagactttatatgaccttaggtaaatcttcgaacctcagtttcctttttgtaaaatgagataataacccttacatagaaggtcattgagatgatttgagcgagattaccaagtataagatatttgttataatgccttgtaaatgctttataagtagctgctgttattatcattatgattattttctttttgaagaaaaaaagataatgtttgtaaaactgaattcaaatcataggaaaggatttggccaggcgctgcagctcatgcttgtaatcccaacactttgggaggccaaggtgggaggatcacttgagcccaggagttcaagaccagcctgggtaacaaagtgaggccccacctctacaaaaaaatttttaaattatccagccacaggctgggcacagtggcttacacctgtaattccaccactttgggatgaggcaggtatcactagaggtcaagagttcaagaccagcctggccgccatgttggtgaaactccatctctattaaaaatacaaaaattagccaggcatggtggtggatacctgtaattccagctacttgggaggctgacacaggagaattgcttgaacccaggaggcggaggttgcagtgaggcaagatcacaccactgcactccaccctgagcaatagagtg

SEQ ID NO: 428773 - DNA, 1323 bp, Homo sapiens
gggcacccaatctctcgccctgtaaactgcggggtgacgggacgctgttactaggactcaagatggccaccgcgcccgctagtcatctcgctagcccgcgcgccagtgagctggcacgagacacgcggtggcccacggcgtctggggacgatctccagcccttcgcacggggcggagcgcccgccttccctccaatcagcacgccgggccggctagccaggggccgcccgcgcgcggggtgtgtgaggacgcgctcccagtcgctgagtgcctgagccgggaagcagttgctgtggtacctgctgctgcccgagcggacgtagagcatcggacgcgggcgccgtggcgttgggcaggagggcgaagccatgacgtcagtcagagaaaatattctctttggaatgggaaatcctctgcttgacatctctgctgtagtggacaaagatttccttgataagtattctctgaaaccaaatgaccaaatcttggctgaagacaaacacaaggaactgtttgatgaacttgtgaaaaaattcaaagtcgaatatcatgctggtggctctacccagaattcaattaaagtggctcagtggatgattcaacagccacacaaagcagcaacattttttggatgcattgggatagataaatttggggagatcctgaagagaaaagctgctgaagcccatgtggatgctcattactacgagcagaatgagcagccaacaggaacttgtgctgcatgcatcactggtgacaacaggtccctcatagctaatcttgctgctgccaattgttataaaaaggaaaaacatcttgatctggagaaaaactggatgttggtagaaaaagcaagagtttgttatatagcaaagctgccacttttgctagagagcaaggctttgagactaaagacattaaagagatagccaaaaagacacaagccctgccaaagatgaactcaaagaggcagcgaatcgtgatcttcacccaagggagagatgacactataatggctacagaaagtgaagtcactgcttttgctgtcttggatcaagaccagaaagaaattattgataccaatggagctggagatgcatttgttggaggttttctgtctcaactggtctctgacaagcctctgactgaatgtatccgtgctggccactatgcagcaagcatcataattagacggactggctgcacctttcctgagaagccagacttccactgatggaagagctgaaaacacaagcccaggagtgcagacactgccctaattgcttcctgagaattcccatattaataaagaagaaaattatc

SEQ ID NO: 428774 - DNA, 1693 bp, Homo sapiens
  misc_feature (56)..(56): n is a, c, g, or t
gtcagggaggaggaggaaaaatgaagaaaagaggaagttgtgggtacgccactggncttttgcagcctaacactgaatgtatccgtgctggccactatgcagcaagcatcataattagacggactggctgcacctttcctgagaagccagacttccactgatggaagagctgaaaacacaagcccaggagtgcagacactgccctaattgcttcctgagaattcccatattaataaagaagaaaattatctgccattttttcctactataataatgctgaatcttaatttagagggtacaagggtatggtaatgcttgtagaatctttattatctcaacaatctaaaaaatgatgtttatttccatagtttgatagtgccacttaaatgccaattaaacaagaatataacatttcaatagaaatttttatttcattttcaattactttgtaaattcgtgtgtatttagtacactgatttgtttttttacatttctgctttgaatgcagatgcaatttaatataatagattttttaatgaattaatcttaacatagtaatctttagctttttatacaaatatatttaatttaggagtatatgtgtgtctatacacacacatacataaatataccacatatacacctgatagtcaaataaggtacagaaattttatcttgtcaattatgccaaataatctctttaatgtgcactcaaacatgtaataaactttggataattaaataatgtgccaaatttaagttgtaccacaatattcaaatcatagtcttatggaactctgtaattggatacaaacaaaaacttgtcatataggaatttttttctgtcttttccctgtgtacagcaaactgaggaagaaagatcattatttaatactgggccctgaaatgacacccaatttgttaatggaattatgaagaacagcaatataatacactgaagaataacttagtatcagagaccaataaatcacttttttaaggatgacaaaatggtataattggacttctggagtcagactttatatgaccttaggtaaatcttcgaacctcagtttcctttttgtaaaatgagataataacccttacatagaaggtcattgagatgatttgagcgagattaccaagtataagatatttgttataatgccttgtaaatgctttataagtagctgctgttattatcattatgattattttctttttgaagaaaaaaagataatgtttgtaaaactgaattcaaatcataggaaaggatttggccaggcgctgcagctcatgcttgtaatcccaacactttgggaggccaaggtgggaggatcacttgagcccaggagttcaagaccagcctgggtaacaaagtgaggccccacctctacaaaaaaatttttaaattatccagccacaggctgggcacagtggcttacacctgtaattccaccactttgggatgaggcaggtatcactagaggtcaagagttcaagaccagcctggccgccatgttggtgaaactccatctctattaaaaatacaaaaattagccaggcatggtggtggatacctgtaattccagctacttgggaggctgacacaggagaattgcttgaacccaggaggcggaggttgcagtgaggcaagatcacaccactgcactccaccctgagcaatagagtg

SEQ ID NO: 428775 - DNA, 1400 bp, Homo sapiens
gggcacccaatctctcgccctgtaaactgcggggtgacgggacgctgttactaggactcaagatggccaccgcgcccgctagtcatctcgctagcccgcgcgccagtgagctggcacgagacacgcggtggcccacggcgtctggggacgatctccagcccttcgcacggggcggagcgcccgccttccctccaatcagcacgccgggccggctagccaggggccgcccgcgcgcggggtgtgtgaggacgcgctcccagtcgctgagtgcctgagccgggaagcagttgctgtggtacctgctgctgcccgagcggactggatggcagaggtgggctgtagagccaaagtggggtgggagcgcgaagatggcagctgctgaggaggagccgaagcccaaaaagctgaaggtggaggcgccgcaagcgctgaggtgagcgctgccggacttggggaggagggtgacggcgctgcaagcaagccagggcccacgtggggttgcacggccccgacgctgggtggtgtctctcactgccagcttggggccaacacgcaggacctcccccagctgcccgcttggccgcgaccccttgccagacgttctctccgtttggctgagtccccgcctgtctggtgcagctccggctccagcagcccttcgccagtcgtggcccgcagggggaccgagctggctgaccgcgccacctgcgagcaagcccaggctgggctggtgcgaccccggagggtcggaccggagcagcgtctgtaggcggccgccttctcttcccgggggatggcgggaaagaggctcggcaactgctgtacactggggcaaagtcagaattcttggggatttttcagagtgttgcggaagggcacgttgaccttccttttcgtgcacattctgaaagcccgtacctttgaggaccctctaccagggacccagacccctccgatgctttgcaggggcagcatttggatgaatggataggaaaggttgatttctcttttttatttacactttttggcagcaacggggacagtgctgcccctaacacctgcctcacatgtgattgatgttgcaacttttacttatgaagagtcatttgttaaaatatcccttcctaataagtataaagtgaagcaggcagtctttgatgatttggaaatgttcgctgaaaggcagcgatttttttttccatcttaaaatagacatatcaaactgatttaaaactattaggacactcctgattaaacaggacatatcccatttcttccagtatcactcttcttcacctccaaaggaaggaatcacccacaattgaaaagaaaaggacacttaggggcctggtggtgtgttcatgctgctttgaatggagggtgaacaaatccttgccagt

SEQ ID NO: 428776 - DNA, 1586 bp, Homo sapiens
  misc_feature (297)..(297): n is a, c, g, or t
  misc_feature (385)..(385): n is a, c, g, or t
ttcggagcaaaggcggctctgtcctcgcggttctttgtggaagcaaatgaagacatggtcggctcgcagctgctcctcagcgaactccaggagaactgcaaagctgtccttgctcccctcgggcagcgcgccgcccgggatctcgatgtagaggctgccgccactcagcactgttcgccagttaatgcgtttggcgtctgtgagcctggactggacgttgagaatcctcgtcttgtcgttggacgttagttcctctgttacattcagccgatcatcctgtccagggggtgcagcccnattcagaaccctgactcatcccacaggactccaagaacccggcagcgctaaagcttgggcctaggccgtgttgagctcaggcaacgcntgggctgcaggagactgtgcgccggctctgatgaaactcagggttcccacgattacattcaatcacaggtacgggcagcaaggtgcacaagaagtacctgtggccccagagcagccccagcaggcccggccccatactcacggagtagaataagttagctgaaagattgtgatccctctgactattccctcgcccacctgggatcttcaggggtgggtgaggggcatcaggagcaccaccgaggccccggacccgggttactacagcagtggagggagaccctggaactgaagatgatgcaggtcacgaggcagcgccaggctccgggcggagacccctccagggcgcccgggcggccttcagccctcgtgccgaattcggcacgaggttgttttcttgatttggggtaatttatacaagggcatacaagttgattttaagatgtggaactgggaggtagactagtttggataagaactttgaaatgttccttgtggatccccatttctggtcatcaagatgtggatgtacatttcttaaaattattacatgctgcatctttcagcctggagactgtgcagaaacatgagaggtgatgacacactaattatgggaagcagaattactggctgatggcccctgaggctgtgtgtaacaaaatgacaggacaatcttgcagtaacactttccccttgaagagaagggggttttgattgtgatatatactagtatctaggaatgaacagtaaaagaggagcagttggctacttgattacaacagagtaaatgaagtactggatttgggaaaacctggttttattagaacatatggaatgaaagcctacacctagcattgcctacttagccccctgaattaacagagcccaattgagacaaacccctggcaacaggaaattcaagggagaaaaagtaagcaacttgggctaggatgagctgactcccttagagcaaaggagagacagcccccattaccaaataccatttttgcctggggcttgtgcagctggcagtgttcctgccccagcatggcaccttattgttttgatagcaacttcgttgaattttcaccaacttattacttgaaattataatatagcctgtccgtttgctgtttccaggctgtgatatattttcctagtggtttgactttaaaaataaataaggtttaattttctcccca

SEQ ID NO: 428777 - DNA, 2236 bp, Homo sapiens
atgttcatagtcaccactttattcataatagctactaagtggaaaagacccaaacacccatcagcaggggaatggatcaacaaatgtgggccgggaccgatgcctcatgcctgcaatctcagcactttgggaggccgaggtgtgtggatcccttgagctcaggagttggagaccagcttggctaacatggtgaaaccccgtgtgccgattccatatgggcgccggcgcggagcgccgcggggcagcgcggggtcgccatggctgagctgcagcagctccgggtgcaggaggcggtggagtccatggtgaagagtctggaaagagagaacatccggaagatgcagggtctcatgttccggtgcagcgccagctgttgtgaggacagccaggcctccatgaagcaggtgcaccagtgcatcgagcgctgccatgtgcctctggctcaagcccaggctttggtcaccagtgagctggagaagttccaggaccgcctggcccggtgcaccatgcattgcaacgacaaagccaaagattcaatagatgctgggagtaaggagcttcaggtgaagcagcagctggacagttgtgtgaccaagtgtgtggatgaccacatgcacctcatcccaactatgaccaagaagatgaaggaggctctcttatcaattggaaaataaaagtatttgccagtggccatcagggctgagggcaagaatatattttttataaggaattgggaattttagtcttttaagcaaagtttacgaatgaagaaatgaaggatggccacaagcgtaaggcatatgtcacttgcctctggacactggttattttatgtttcagtccctaaaaaatgaaatggaaaaaagtggtgctaaatcgagtcagagatattacaggagagttttagagcttattatttcctgtggccagtgcttgtcctggcagtaaggctctcccctgtaacaagccagagccctccaaggtaccagactcttcttactacacaggtactaacaggctggcaggttagagttggtggagtctgaggagagatattttctctttgttgccaacatcctgtttaccaaaagtgtcaccccaccatcttccataagctgtgaaacaaaatcaatgaggtcactaacttagaagggaaagaaagttttctgggtctttgttttcttgatttggggtaatttatacaagggcatacaagttgattttaagatgtggaactgggaggtagactagtttggataagaactttgaaatgttccttgtggatccccatttctggtcatcaagatgtggatgtacatttcttaaaattattacatgctgcatctttcagcctggagactgtgcagaaacatgagaggtgatgacacactaattatgggaagcagaattactggctgatggcccctgaggctgtgtgtaacaaaatgacaggacaatcttgcagtaacactttccccttgaagagaagggggttttgattgtgatatatactagtatctaggaatgaacagtaaaagaggagcagttggctacttgattacaacagagtaaatgaagtactggatttgggaaaacctggttttattagaacatatggaatgaaagcctacacctagcattgcctacttagccccctgaattaacagagcccaattgagacaaacccctggcaacaggaaattcaagggagaaaaagtaagcaacttgggctaggatgagctgactcccttagagcaaaggagagacagcccccattaccaaataccatttttgcctggggcttgtgcagctggcagtgttcctgccccagcatggcaccttattgttttgatagcaacttcgttgaattttcaccaacttattacttgaaattataatatagcctgtccgtttgctgtttccaggctgtgatatattttcctagtggtttgactttaaaaataaataaggtttaattttctccccaaaaaaaaaaaaaaaaaaaaaaaaaaaaaaaaaaaaaaaaacaaacaaaacaaaaaaaaaagaagaaaagaagaagagaaaaagaacaagaatacaaataaacacagaaacacaaatagaaacaaaaagacaggaccacactaagaggacacccacgaattcgacaagaacacgaaaggaacaggacaccaagatcaggacccgactgtacagacaggggcaaaaaccgtgaggcggagaacgaacacag

SEQ ID NO: 428778 - DNA, 2242 bp, Homo sapiens
atgttcatagtcaccactttattcataatagctactaagtggaaaagacccaaacacccatcagcaggggaatggatcaacaaatgtgggccgggaccgatgcctcatgcctgcaatctcagcactttgggaggccgaggtgtgtggatcccttgagctcaggagttggagaccagcttggctaacatggtgaaaccccgtgtgccgattccatatgggcgccggcgcggagcgccgcggggcagcgcggggtcgccatggctgagctgcagcagctccgggtgcaggaggcggtggagtccatggtgaagagtctggaaagagagaacatccggaagatgcaggtagcggggctggggccgaaccaggacccccttctcagcgggtgggttccgggcccttccctcagccaccacgcgacgccttgcactgcagccgcgtccccgcagaccgggtgtgggcggccctggggtcgccggggcggcctcggacaggacttcggaagctttggcggatcggatgaaatccgtgtgcccttgccgtgcgcgaggctgttttccgccccttccagcccggggcaggagcgtcctcggcggcagggtctcatgttccggtgcagcgccagctgttgtgaggacagccaggcctccatgaagcaggtgcaccagtgcatcgagcgctgccatgtgcctctggctcaagcccaggctttggtcaccagtgagctggagaagttccaggaccgcctggcccggtgcaccatgcattgcaacgacaaagccaaagattcaatagatgctgggagtaaggagcttcaggtgaagcagcagctggacagttgtgtgaccaagtgtgtggatgaccacatgcacctcatcccaactatgaccaagaagatgaaggaggctctcttatcaattggaaaataaaagtatttgccagtggccatcagggctgagggcaagaatatattttttataaggaattgggaattttagtcttttaagcaaagtttacgaatgaagaaatgaaggatggccacaagcgtaaggcatatgtcacttgcctctggacactggttattttatgtttcagtccctaaaaaatgaaatggaaaaaagtggtgctaaatcgagtcagagatattacaggagagttttagagcttattatttcctgtggccagtgcttgtcctggcagtaaggctctcccctgtaacaagccagagccctccaaggtaccagactcttcttactacacaggtactaacaggctggcaggttagagttggtggagtctgaggagagatattttctctttgttgccaacatcctgtttaccaaaagtgtcaccccaccatcttccataagctgtgaaacaaaatcaatgaggtcactaacttagaagggaaagaaagttttctgggtctttgttttcttgatttggggtaatttatacaagggcatacaagttgattttaagatgtggaactgggaggtagactagtttggataagaactttgaaatgttccttgtggatccccatttctggtcatcaagatgtggatgtacatttcttaaaattattacatgctgcatctttcagcctggagactgtgcagaaacatgagaggtgatgacacactaattatgggaagcagaattactggctgatggcccctgaggctgtgtgtaacaaaatgacaggacaatcttgcagtaacactttccccttgaagagaagggggttttgattgtgatatatactagtatctaggaatgaacagtaaaagaggagcagttggctacttgattacaacagagtaaatgaagtactggatttgggaaaacctggttttattagaacatatggaatgaaagcctacacctagcattgcctacttagccccctgaattaacagagcccaattgagacaaacccctggcaacaggaaattcaagggagaaaaagtaagcaacttgggctaggatgagctgactcccttagagcaaaggagagacagcccccattaccaaataccatttttgcctggggcttgtgcagctggcagtgttcctgccccagcatggcaccttattgttttgatagcaacttcgttgaattttcaccaacttattacttgaaattataatatagcctgtccgtttgctgtttccaggctgtgatatattttcctagtggtttgactttaaaaataaataaggtttaattttctcccca

SEQ ID NO: 428779 - DNA, 1932 bp, Homo sapiens
atgttcatagtcaccactttattcataatagctactaagtggaaaagacccaaacacccatcagcaggggaatggatcaacaaatgtgggccgggaccgatgcctcatgcctgcaatctcagcactttgggaggccgaggtgtgtggatcccttgagctcaggagttggagaccagcttggctaacatggtgaaaccccgtgtgccgattccatatgggcgccggcgcggagcgccgcggggcagcgcggggtcgccatggctgagctgcagcagctccgggtgcaggaggcggtggagtccatggtgaagagtctggaaagagagaacatccggaagatgcagggtctcatgttccggtgcagcgccagctgttgtgaggacagccaggcctccatgaagcaggtgcaccagtgcatcgagcgctgccatgtgcctctggctcaagcccaggctttggtcaccagtgagctggagaagttccaggaccgcctggcccggtgcaccatgcattgcaacgacaaagccaaagattcaatagatgctgggagtaaggagcttcaggtgaagcagcagctggacagttgtgtgaccaagtgtgtggatgaccacatgcacctcatcccaactatgaccaagaagatgaaggaggctctcttatcaattggaaaataaaagtatttgccagtggccatcagggctgagggcaagaatatattttttataaggaattgggaattttagtcttttaagcaaagtttacgaatgaagaaatgaaggatggccacaagcgtaaggcatatgtcacttgcctctggacactggttattttatgtttcagtccctaaaaaatgaaatggaaaaaagtggtgctaaatcgagtcagagatattacaggagagttttagagcttattatttcctgtggccagtgcttgtcctggcagtaaggctctcccctgtaacaagccagagccctccaaggtaccagactcttcttactacacaggtactaacaggctggcaggttagagttggtggagtctgaggagagatattttctctttgttgccaacatcctgtttaccaaaagtgtcaccccaccatcttccataagctgtgaaacaaaatcaatgaggtcactaacttagaagggaaagaaagttttctgggtctttgttttcttgatttggggtaatttatacaagggcatacaagttgattttaagatgtggaactgggaggtagactagtttggataagaactttgaaatgttccttgtggatccccatttctggtcatcaagatgtggatgtacatttcttaaaattattacatgctgcatctttcagcctggagactgtgcagaaacatgagaggtgatgacacactaattatgggaagcagaattactggctgatggcccctgaggctgtgtgttttgattgtgatatatactagtatctaggaatgaacagtaaaagaggagcagttggctacttgattacaacagagtaaatgaagtactggatttgggaaaacctggttttattagaacatatggaatgaaagcctacacctagcattgcctacttagccccctgaattaacagagcccaattgagacaaacccctggcaacaggaaattcaagggagaaaaagtaagcaacttgggctaggatgagctgactcccttagagcaaaggagagacagcccccattaccaaataccatttttgcctggggcttgtgcagctggcagtgttcctgccccagcatggcaccttattgttttgatagcaacttcgttgaattttcaccaacttattacttgaaattataatatagcctgtccgtttgctgtttccaggctgtgatatattttcctagtggtttgactttaaaaataaataaggtttaattttctcccca

SEQ ID NO: 428780 - DNA, 1981 bp, Homo sapiens
atgttcatagtcaccactttattcataatagctactaagtggaaaagacccaaacacccatcagcaggggaatggatcaacaaatgtgggccgggaccgatgcctcatgcctgcaatctcagcactttgggaggccgaggtgtgtggatcccttgagctcaggagttggagaccagcttggctaacatggtgaaaccccgtgtgccgattccatatgggcgccggcgcggagcgccgcggggcagcgcggggtcgccatggctgagctgcagcagctccgggtgcaggaggcggtggagtccatggtgaagagtctggaaagagagaacatccggaagatgcagggtctcatgttccggtgcagcgccagctgttgtgaggacagccaggcctccatgaagcaggtgcaccagtgcatcgagcgctgccatgtgcctctggctcaagcccaggctttggtcaccagtgagctggagaagttccaggaccgcctggcccggtgcaccatgcattgcaacgacaaagccaaagattcaatagatgctgggagtaaggagcttcaggtgaagcagcagctggacagttgtgtgaccaagtgtgtggatgaccacatgcacctcatcccaactatgaccaagaagatgaaggaggctctcttatcaattggaaaataaaagtatttgccagtggccatcagggctgagggcaagaatatattttttataaggaattgggaattttagtcttttaagcaaagtttacgaatgaagaaatgaaggatggccacaagcgtaaggcatatgtcacttgcctctggacactggttattttatgtttcagtccctaaaaaatgaaatggaaaaaagtggtgctaaatcgagtcagagatattacaggagagttttagagcttattatttcctgtggccagtgcttgtcctggcagtaaggctctcccctgtaacaagccagagccctccaaggtaccagactcttcttactacacaggtactaacaggctggcaggttagagttggtggagtctgaggagagatattttctctttgttgccaacatcctgtttaccaaaagtgtcaccccaccatcttccataagctgtgaaacaaaatcaatgaggtcactaacttagaagggaaagaaagttttctgggtctttgttttcttgatttggggtaatttatacaagggcatacaagttgattttaagatgtggaactgggaggtagactagtttggataagaactttgaaatgttccttgtggatccccatttctggtcatcaagatgtggatgtacatttcttaaaattattacatgctgcatctttcagcctggagactgtgcagaaacatgagaggtgatgacacactaattatgggaagcagaattactggctgatggcccctgaggctgtgtgtaacaaaatgacaggacaatcttgcagtaacactttccccttgaagagaagggggttttgattgtgatatatactagtatctaggaatgaacagtaaaagaggagcagttggctacttgattacaacagagtaaatgaagtactggatttgggaaaacctggttttattagaacatatggaatgaaagcctacacctagcattgcctacttagccccctgaattaacagagcccaattgagacaaacccctggcaacaggaaattcaagggagaaaaagtaagcaacttgggctaggatgagctgactcccttagagcaaaggagagacagcccccattaccaaataccatttttgcctggggcttgtgcagctggcagtgttcctgccccagcatggcaccttatttatttttaaagtcaaaccactaggaaaatatatcacagcctggaaacagcaaacggacaggctatattataatttcaagtaataagttggtgaaaattcaacgaagttgctatcaaaacaataaggtgcgtcgacg

SEQ ID NO: 428781 - DNA, 810 bp, Homo sapiens
atgttcatagtcaccactttattcataatagctactaagtggaaaagacccaaacacccatcagcaggggaatggatcaacaaatgtgggccgggaccgatgcctcatgcctgcaatctcagcactttgggaggccgaggtgtgtggatcccttgagctcaggagttggagaccagcttggctaacatggtgaaaccccgtgtgccgattccatatgggcgccggcgcggagcgccgcggggcagcgcggggtcgccatggctgagctgcagcagctccgggtgcaggaggcggtggagtccatggtgaagagtctggaaagagagaacatccggaagatgcaggtgagcggcccgaggcccagcagaggcgctgccaacgtgaaagaccagaaaggcgaggacttccggcctccccgttggccagggtctcatgttccggtgcagcgccagctgttgtgaggacagccaggcctccatgaagcaggtgcaccagtgcatcgagcgctgccatgtgcctctggctcaagcccaggctttggtcaccagtgagctggagaagttccaggaccgcctggcccggtgcaccatgcattgcaacgacaaagccaaagattcaatagatgctgggagtaaggagcttcaggtgaagcagcagctggacagttgtgtgaccaagtgtgtggatgaccacatgcacctcatcccaactatgaccaagaagatgaaggaggctctcttatcaattggaaaataaaagtatttgccagtggccatcagggctgagggcaagaatatattttttataagg

SEQ ID NO: 428782 - DNA, 1987 bp, Homo sapiens
atgttcatagtcaccactttattcataatagctactaagtggaaaagacccaaacacccatcagcaggggaatggatcaacaaatgtgggccgggaccgatgcctcatgcctgcaatctcagcactttgggaggccgaggtgtgtggatcccttgagctcaggagttggagaccagcttggctaacatggtgaaaccccgtgtgccgattccatatgggcgccggcgcggagcgccgcggggcagcgcggggtcgccatggctgagctgcagcagctccgggtgcaggaggcggtggagtccatggtgaagagtctggaaagagagaacatccggaagatgcagggtctcatgttccggtgcagcgccagctgttgtgaggacagccaggcctccatgaagcaggtgcaccagtgcatcgagcgctgccatgtgcctctggctcaagcccaggctttggtcaccagtgagctggagaagttccaggaccgcctggcccggtgcaccatgcattgcaacgacaaagccaaagattcaatagatgctgggagtaaggagcttcaggtgaagcagcagctggacagttgtgtgaccaagtgtgtggatgaccacatgcacctcatcccaactatgaccaagaagatgaaggaggctctcttatcaattggaaaataaaagtatttgccagtggccatcagggctgagggcaagaatatattttttataaggaattgggaattttagtcttttaagcaaagtttacgaatgaagaaatgaaggatggccacaagcgtaaggcatatgtcacttgcctctggacactggttattttatgtttcagtccctaaaaaatgaaatggaaaaaagtggtgctaaatcgagtcagagatattacaggagagttttagagcttattatttcctgtggccagtgcttgtcctggcagtaaggctctcccctgtaacaagccagagccctccaaggtaccagactcttcttactacacaggtactaacaggctggcaggttagagttggtggagtctgaggagagatattttctctttgttgccaacatcctgtttaccaaaagtgtcaccccaccatcttccataagctgtgaaacaaaatcaatgaggtcactaacttagaagggaaagaaagttttctgggtctttgttttcttgatttggggtaatttatacaagggcatacaagttgattttaagatgtggaactgggaggtagactagtttggataagaactttgaaatgttccttgtggatccccatttctggtcatcaagatgtggatgtacatttcttaaaattattacatgctgcatctttcagcctggagactgtgcagaaacatgagaggtgatgacacactaattatgggaagcagaattactggctgatggcccctgaggctgtgtgtaacaaaatgacaggacaatcttgcagtaacactttccccttgaagagaagggggttttgattgtgatatatactagtatctaggaatgaacagtaaaagaggagcagttggctacttgattacaacagagtaaatgaagtactggatttgggaaaacctggttttattagaacatatggaatgaaagcctacacctagcattgcctacttagccccctgaattaacagagcccaattgagacaaacccctggcaacaggaaattcaagggagaaaaagtaagcaacttgggctaggatgagctgactcccttagagcaaaggagagacagcccccattaccaaataccatttttgcctggggcttgtgcagctggcagtgttcctgccccagcatggcaccttattgttttgatagcaacttcgttgaattttcaccaacttattacttgaaattataatatagcctgtccgtttgctgtttccaggctgtgatatattttcctagtggtttgactttaaaaataaataaggtttaattttctcccca

SEQ ID NO: 428783 - DNA, 2610 bp, Homo sapiens
atgttcatagtcaccactttattcataatagctactaagtggaaaagacccaaacacccatcagcaggggaatggatcaacaaatgtgggccgggaccgatgcctcatgcctgcaatctcagcactttgggaggccgaggtgtgtggatcccttgagctcaggagttggagaccagcttggctaacatggtgaaaccccgtgtgccgattccatatgggcgccggcgcggagcgccgcggggcagcgcggggtcgccatggctgagctgcagcagctccgggtgcaggaggcggtggagtccatggtgaagagtctggaaagagagaacatccggaagatgcaggtgagcggcccgaggcccagcagaggcgctgccaacgtgaaagaccagaaaggcgaggacttccggcctccccgttggccaggtcatgcctgcttctcttgcgcccaacctcgcttcacacagcgcgggtttctacactgttcttctctgagccccgcaatgcctctgtgtgtttcggtcctgcttctctcacggagtatgcgtttcccagatagtgccccttgagtcattgattagtgggtcggctgccctctggtggaatttgtattgctaggttgctgacctctgaaccccatggaagaggctcctggttttcagaatttggcttcgtcagaccaccctaccctcacccactcgggcgaacctctgttcacccaaccatcggtgcaacaggtgccgatgagctagcagcaaggacaccatgaaacactacactagacattgaggataattttccccagtggtggttttaaggtcctggtgtctattctcagggaaggtgaaagcagaaggtggagagagaggtgcaaatatccacgtggccttctaactcctgtagtgctccatagtcatctctgtccccagagactttcctacctaacctctctgccctttctccccagggtctcatgttccggtgcagcgccagctgttgtgaggacagccaggcctccatgaagcaggtgcaccagtgcatcgagcgctgccatgtgcctctggctcaagcccaggctttggtcaccagtgagctggagaagttccaggaccgcctggcccggtgcaccatgcattgcaacgacaaagccaaagattcaatagatgctgggagtaaggagcttcaggtgaagcagcagctggacagttgtgtgaccaagtgtgtggatgaccacatgcacctcatcccaactatgaccaagaagatgaaggaggctctcttatcaattggaaaataaaagtatttgccagtggccatcagggctgagggcaagaatatattttttataaggaattgggaattttagtcttttaagcaaagtttacgaatgaagaaatgaaggatggccacaagcgtaaggcatatgtcacttgcctctggacactggttattttatgtttcagtccctaaaaaatgaaatggaaaaaagtggtgctaaatcgagtcagagatattacaggagagttttagagcttattatttcctgtggccagtgcttgtcctggcagtaaggctctcccctgtaacaagccagagccctccaaggtaccagactcttcttactacacaggtactaacaggctggcaggttagagttggtggagtctgaggagagatattttctctttgttgccaacatcctgtttaccaaaagtgtcaccccaccatcttccataagctgtgaaacaaaatcaatgaggtcactaacttagaagggaaagaaagttttctgggtctttgttttcttgatttggggtaatttatacaagggcatacaagttgattttaagatgtggaactgggaggtagactagtttggataagaactttgaaatgttccttgtggatccccatttctggtcatcaagatgtggatgtacatttcttaaaattattacatgctgcatctttcagcctggagactgtgcagaaacatgagaggtgatgacacactaattatgggaagcagaattactggctgatggcccctgaggctgtgtgtaacaaaatgacaggacaatcttgcagtaacactttccccttgaagagaagggggttttgattgtgatatatactagtatctaggaatgaacagtaaaagaggagcagttggctacttgattacaacagagtaaatgaagtactggatttgggaaaacctggttttattagaacatatggaatgaaagcctacacctagcattgcctacttagccccctgaattaacagagcccaattgagacaaacccctggcaacaggaaattcaagggagaaaaagtaagcaacttgggctaggatgagctgactcccttagagcaaaggagagacagcccccattaccaaataccatttttgcctggggcttgtgcagctggcagtgttcctgccccagcatggcaccttattgttttgatagcaacttcgttgaattttcaccaacttattacttgaaattataatatagcctgtccgtttgctgtttccaggctgtgatatattttcctagtggtttgactttaaaaataaataaggtttaattttctcccca

SEQ ID NO: 428784 - DNA, 1944 bp, Homo sapiens
atgttcatagtcaccactttattcataatagctactaagtggaaaagacccaaacacccatcagcaggggaatggatcaacaaatgtgggccgggaccgatgcctcatgcctgcaatctcagcactttgggaggccgaggtgtgtggatcccttgagctcaggagttggagaccagcttggctaacatggtgaaaccccgtgtgccgattccatatgggcgccggcgcggagcgccgcggggcagcgcggggtcgccatggctgagctgcagcagctccgggtgcaggaggcggtggagtccatggtgaagagtctggaaagagagaacatccggaagatgcagggtctcatgttccggtgcagcgccagctgttgtgaggacagccaggcctccatgaagcaggtgcaccagtgcatcgagcgctgccatgtgcctctggctcaagcccaggctttggtcaccagtgagctggagaagttccaggaccgcctggcccggtgcaccatgcattgcaacgacaaagccaaagattcaatagatgctgggagtaaggagcttcaggtgaagcagcagctggacagttgtgtgaccaagtgtgtggatgaccacatgcacctcatcccaactatgaccaagaagatgaaggaggctctcttatcaattggaaaataaaagtatttgccagtggccatcagggctgagggcaagaatatattttttataaggaattgggaattttagtcttttaagcaaagtttacgaatgaagaaatgaaggatggccacaagcgtaaggcatatgtcacttgcctctggacactggttattttatgtttcagtccctaaaaaatgaaatggaaaaaagtggtgctaaatcgagtcagagatattacaggagagttttagagcttattatttcctgtggccagtgcttgtcctggcagtaaggctctcccctgtaacaagccagagccctccaaggtaccagactcttcttactacacaggtactaacaggctggcaggttagagttggtggagtctgaggagagatattttctctttgttgccaacatcctgtttaccaaaagtgtcaccccaccatcttccataagctgtgaaacaaaatcaatgaggtcactaacttagaagggaaagaaagttttctgggtctttgttttcttgatttggggtaatttatacaagggcatacaagttgattttaagatgtggaactgggaggtagactagtttggataagaactttgaaatgttccttgtggatccccatttctggtcatcaagatgtggatgtacatttcttaaaattattacatgctgcatctttcagcctggagactgtgcagaaacatgagaggtgatgacacactaattatgggaagcagaattactggctgatggcccctgaggctgtgtgtaacaaaatgacaggacaatcttgcagtaacactttccccttgaagagaagggggttttgattgtgatatatactagtatctaggaatgaacagtaaaagaggagcagttggctacttgattacaacagagtaaatgaagtactggatttgggaaaacctggttttttagccccctgaattaacagagcccaattgagacaaacccctggcaacaggaaattcaagggagaaaaagtaagcaacttgggctaggatgagctgactcccttagagcaaaggagagacagcccccattaccaaataccatttttgcctggggcttgtgcagctggcagtgttcctgccccagcatggcaccttattgttttgatagcaacttcgttgaattttcaccaacttattacttgaaattataatatagcctgtccgtttgctgtttccaggctgtgatatattttcctagtggtttgactttaaaaataaataaggtttaattttctcccca

SEQ ID NO: 428785 - DNA, 728 bp, Homo sapiens
atgttcatagtcaccactttattcataatagctactaagtggaaaagacccaaacacccatcagcaggggaatggatcaacaaatgtgggccgggaccgatgcctcatgcctgcaatctcagcactttgggaggccgaggtgtgtggatcccttgagctcaggagttggagaccagcttggctaacatggtgaaaccccgtgtgccgattccatatgggcgccggcgcggagcgccgcggggcagcgcggggtcgccatggctgagctgcagcagctccgggtgcaggaggcggtggagtccatggtgaagagtctggaaagagagaacatccggaagatgcagggtctcatgttccggtgcagcgccagctgttgtgaggacagccaggcctccatgaagcaggtgcaccagtgcatcgagcgctgccatgtgcctctggctcaagcccaggctttggtcaccagtgagctggagaagttccaggaccgcctggcccggtgcaccatgcattgcaacgacaaagccaaagattcaatagatgctgggagtaaggagcttcaggtgaagcagcagctggacagttgtgtgaccaagtgtgtggatgaccacatgcacctcatcccaactatgaccaagaagatgaaggaggctctcttatcaattggaaaataaaagtatttgccagtggccatcagggctgagggcaagaatatattttttataagg

SEQ ID NO: 428786 - DNA, 2386 bp, Homo sapiens
aggtgcggctactcccccggccccggcagacctgcgactggcccagtcgcccctggggccctttgccactcccttggcaaggagagccgagacctcagttcccggcggctcttgcggggcacaggtgagccctggctgcgcgcgcgggccctcctccccggcgcctcccagccagggccccagcccctatgatgaaagcgaagtgcacgactccttccagcagctcatccaggagcagagccagtgcacggcccaggaggggctggagctgcagcagagagagcgggaggtgacaggaagtagccagcagacactctggcggcccgagggcacccagagcacggccacactccgcatcctggccagcatgcccagccgcaccattggccgcagccgaggtgccatcatctcccagtactacaaccgcacggtgcagcttcggtgcaggagcagccggcccctgctcgggaactttgtccgctccgcctggcccagcctccgcctgtacgacctggagctggaccccacggccctggaggaggaggagaagcagagcctcctggtgaaggagctccagagcctggcagtggcacagcgggaccacatgcttcgcgggatgcccttaagcctggctgagaaacgcagcctgcggccttgcacagcctgggcctggcgctgctctccgccctgcaggccctgatgccgtggcgctacgccctgaagcgcatcgggggccagttcggctccagcgtgctctcctacttcctctttctcaagaccctgctggctttcaatgccctcctgctgctgctgctggtggccttcatcatgggccctcaggtcgccttcccacccgccctgccgggccctgcccccgtctgcacaggcctggagctcctcacaggcgcgggttgcttcacccacaccgtcatgtactacggccactacagtaacgccacgctgaaccagccgtgtggcagccccctggatggcagccagtgcacacccagggtgggtggcctgccctacaacatgcccctggcctacctctccactgtgggcgtgagcttctttatcacctgcatcaccctggtgtacagcatggctcactctttcggggagagctaccgggtgggcagcacctctggcatccacgccatcaccgtcttctgctcctgggactacaaggtgacgcagaagcgggcctcccgcctccagcaggacaatattcgcacccggctgaaggagctgctggccgagtggcagctgcggcacagccccaggagcgtgtgcgggaggctgcggcaggcggctgtgctggggcttgtgtggctgctgtgtctggggaccgcgctgggctgcgccgtggccgtccacgtcttctcggagttcatgatccagagtccagaggctgctggccaggaggctgtgctgctggtcctgcccctggtggttggcctcctcaacctgggggccccctacctgtgccgtgtcctggccgccctggagccgcatgactccccggtactggaggtgtacgtggccatctgcaggtgtgtggccgcacatgaaaacatcatttggtgctggagctgatactggttgtttagctccgggtgtatccaaacctacttaggatgaggccggtgtgaccaagcccctggtgggggccctggggtgcatcttctgtcccctgtacccgcccctcagcctttgcaccccgccctccggaacctcatcctcaagctggccatcctggggacactgtgctaccactggctgggccgcagggtgggcgtcctgcagggccagtgctgggaggattttgtgggccaggagctgtaccggttcctggtgatggacttcgtcctcatgttgctggacacgctttttggggaactggtgtggaggtgagggggtcctgggcggactgggtggtgagtgttctccccttagtggccgggacgtgtggccgggaggttctcaggcctggacctttcccatcagggccctgtgtctccacccttcagaggaagactcaggaaatagaaccgaactcatttttagattggaaaggaaaacaggtttcaaagtgatgtgtatggccaggcatggtggctcatgcctgtaatcccagcactttgggaggctgaggtgagtggatcacctgaggtcaggagtttgagaccagcctggccagcatggcaaaaccccgtctctactaaaaatacaaaaattagcagggcgtggtggcgcacaccagtagtcccagctactcgggaggcagaggcatgagaatcgcttgaacctgggaagcggaggttgtagtgagctgagattgcgcctctgcactccagcccgggcgacagagcaagactgtgttgcc

SEQ ID NO: 428787 - DNA, 495 bp, Homo sapiens
acgcgaaaagcgatatcgaattcgcggccgcgcgacgaagacgacagaagctgggggtgctcttctcgcccctcctccccgccgtgcagatcatcaagctgctgctcgtcttctatgtcaagaaggagggtgaggacaaaatcttcttaatcaacaagcttcactccatctacgagaggaaggagagggaggagaggagcagggttgggacaaccgaggaggctgcggcaccccctgccctgctcacagatgaacaggatgcctagggggacggcgatgggcctcacgggcccgcccagcaccctgagaccacactgttgcctcccagtgaccctgctgggacaccaggacaaggaagacagtttcgcctctcgaaagccgcagctgcgcctaggctggagctggaagggtgggtgaatccggcttgggcatccccaatgaactctgccctgcctgggactctatttattctgattaaaggggttttgcaaatgg

SEQ ID NO: 428788 - DNA, 480 bp, Homo sapiens
ggcagagccagtacgtggcagggctggttttaaattgagtcaggctggctctgggctgctgattacatttcccttttcactttggccactaggaagcttagatccacacatacgcccacttcctggctcttggtttttccttgtccttgtttggtggccctttcaccttttcttttatgtttttgctgcttgcgatgttgaatacacctcgtgagttttccctcaaatgcagtttggaacaggatgcctagggggacggcgatgggcctcacgggcccgcccagcaccctgagaccacactgttgcctcccagtgaccctgctgggacaccaggacaaggaagacagtttcgcctctcgaaagccgcagctgcgcctaggctggagctggaagggtgggtgaatccggcttgggcatccccaatgaactctgccctgcctgggactctatttattctgattaaaggggttttgcaaatgg

SEQ ID NO: 428789 - DNA, 2892 bp, Homo sapiens
aggtgcggctactcccccggccccggcagacctgcgactggcccagtcgcccctggggccctttgccactcccttggcaaggagagccgagacctcagttcccggcggctcttgcggggcacaggtgagccctggctgcgcgcgcgggccctcctccccggcgcctcccagatgggggctccggaggtggcgcccaggctctgagctaccctaggtctgcagactagcgggcattggccagagacatggcccagccactggccttcatcctcgatgtccctgagaccccaggggaccagggccagggccccagcccctatgatgaaagcgaagtgcacgactccttccagcagctcatccaggagcagagccagtgcacggcccaggaggggctggagctgcagcagagagagcgggaggtgacaggaagtagccagcagacactctggcggcccgagggcacccagagcacggccacactccgcatcctggccagcatgcccagccgcaccattggccgcagccgaggtgccatcatctcccagtactacaaccgcacggtgcagcttcggtgcaggagcagccggcccctgctcgggaactttgtccgctccgcctggcccagcctccgcctgtacgacctggagctggaccccacggccctggaggaggaggagaagcagagcctcctggtgaaggagctccagagcctggcagtggcacagcgggaccacatgcttcgcgggatgcccttaagcctggctgagaaacgcagcctgcgagagaagagcaggaccccgagggggaagtggaggggccagccgggcagcggcggggtctgctcctgctgtggccggctcagatatgcctgcgtgctggccttgcacagcctgggcctggcgctgctctccgccctgcaggccctgatgccgtggcgctacgccctgaagcgcatcgggggccagttcggctccagcgtgctctcctacttcctctttctcaagaccctgctggctttcaatgccctcctgctgctgctgctggtggccttcatcatgggccctcaggtcgccttcccacccgccctgccgggccctgcccccgtctgcacaggcctggagctcctcacaggcgcgggttgcttcacccacaccgtcatgtactacggccactacagtaacgccacgctgaaccagccgtgtggcagccccctggatggcagccagtgcacacccagggtgggtggcctgccctacaacatgcccctggcctacctctccactgtgggcgtgagcttctttatcacctgcatcaccctggtgtacagcatggctcactctttcggggagagctaccgggtgggcagcacctctggcatccacgccatcaccgtcttctgctcctgggactacaaggtgacgcagaagcgggcctcccgcctccagcaggacaatattcgcacccggctgaaggagctgctggccgagtggcagctgcggcacagccccaggagcgtgtgcgggaggctgcggcaggcggctgtgctggggcttgtgtggctgctgtgtctggggaccgcgctgggctgcgccgtggccgtccacgtcttctcggagttcatgatccagagtccagaggctgctggccaggaggctgtgctgctggtcctgcccctggtggttggcctcctcaacctgggggccccctacctgtgccgtgtcctggccgccctggagccgcatgactccccggtactggaggtgtacgtggccatctgcaggaacctcatcctcaagctggccatcctggggacactgtgctaccactggctgggccgcagggtgggcgtcctgcagggccagtgctgggaggattttgtgggccaggagctgtaccggttcctggtgatggacttcgtcctcatgttgctggacacgctttttggggaactggtgtggaggattatctccgagaagaagctgaagaggaggcggaagccggagtttgacattgcccggaatgtcctggagctgatttatgggcagactctgacctggctgggggtgctcttctcgcccctcctccccgccgtgcagatcatcaagctgctgctcgtcttctatgtcaagaagaccagccttctggccaactgccaggcgccgcgccggccctggctggcctcacacatgagcaccgtcttcctcacgctgctctgcttccccgccttcctgggcgccgctgtcttcctctgctacgccgtctggcaggtgaagccctcgagcacctgcggccccttccggaccctggacaccatgtacgaggccggcagggtgtgggtgcgccacctggaggcggcaggccccagggtctcctggctgccctgggtgcaccggtacctgatggaaaacaccttctttgtcttcctggtgtcagccctgctgctggccgtgatctacctcaacatccaggtggtgcggggccagcgcaaggtcatctgcctgctcaaggagcagatcagcaatgagggtgaggacaaaatcttcttaatcaacaagcttcactccatctacgagaggaaggagagggaggagaggagcagggttgggacaaccgaggaggctgcggcaccccctgccctgctcacagatgaacaggatgcctagggggacggcgatgggcctcacgggcccgcccagcaccctgagaccacactgttgcctcccagtgaccctgctgggacaccaggacaaggaagacagtttcgcctctcgaaagccgcagctgcgcctaggctggagctggaagggtgggtgaatccggcttgggcatccccaatgaactctgccctgcctgggactctatttattctgattaaaggggttttgcaaatgg

SEQ ID NO: 428790 - DNA, 2845 bp, Homo sapiens
aggtgcggctactcccccggccccggcagacctgcgactggcccagtcgcccctggggccctttgccactcccttggcaaggagagccgagacctcagttcccggcggctcttgcggggcacagatgggggctccggaggtggcgcccaggctctgagctaccctaggtctgcagactagcgggcattggccagagacatggcccagccactggccttcatcctcgatgtccctgagaccccaggggaccagggccagggccccagcccctatgatgaaagcgaagtgcacgactccttccagcagctcatccaggagcagagccagtgcacggcccaggaggggctggagctgcagcagagagagcgggaggtgacaggaagtagccagcagacactctggcggcccgagggcacccagagcacggccacactccgcatcctggccagcatgcccagccgcaccattggccgcagccgaggtgccatcatctcccagtactacaaccgcacggtgcagcttcggtgcaggagcagccggcccctgctcgggaactttgtccgctccgcctggcccagcctccgcctgtacgacctggagctggaccccacggccctggaggaggaggagaagcagagcctcctggtgaaggagctccagagcctggcagtggcacagcgggaccacatgcttcgcgggatgcccttaagcctggctgagaaacgcagcctgcgagagaagagcaggaccccgagggggaagtggaggggccagccgggcagcggcggggtctgctcctgctgtggccggctcagatatgcctgcgtgctggccttgcacagcctgggcctggcgctgctctccgccctgcaggccctgatgccgtggcgctacgccctgaagcgcatcgggggccagttcggctccagcgtgctctcctacttcctctttctcaagaccctgctggctttcaatgccctcctgctgctgctgctggtggccttcatcatgggccctcaggtcgccttcccacccgccctgccgggccctgcccccgtctgcacaggcctggagctcctcacaggcgcgggttgcttcacccacaccgtcatgtactacggccactacagtaacgccacgctgaaccagccgtgtggcagccccctggatggcagccagtgcacacccagggtgggtggcctgccctacaacatgcccctggcctacctctccactgtgggcgtgagcttctttatcacctgcatcaccctggtgtacagcatggctcactctttcggggagagctaccgggtgggcagcacctctggcatccacgccatcaccgtcttctgctcctgggactacaaggtgacgcagaagcgggcctcccgcctccagcaggacaatattcgcacccggctgaaggagctgctggccgagtggcagctgcggcacagccccaggagcgtgtgcgggaggctgcggcaggcggctgtgctggggcttgtgtggctgctgtgtctggggaccgcgctgggctgcgccgtggccgtccacgtcttctcggagttcatgatccagagtccagaggctgctggccaggaggctgtgctgctggtcctgcccctggtggttggcctcctcaacctgggggccccctacctgtgccgtgtcctggccgccctggagccgcatgactccccggtactggaggtgtacgtggccatctgcaggaacctcatcctcaagctggccatcctggggacactgtgctaccactggctgggccgcagggtgggcgtcctgcagggccagtgctgggaggattttgtgggccaggagctgtaccggttcctggtgatggacttcgtcctcatgttgctggacacgctttttggggaactggtgtggaggattatctccgagaagaagctgaagaggaggcggaagccggagtttgacattgcccggaatgtcctggagctgatttatgggcagactctgacctggctgggggtgctcttctcgcccctcctccccgccgtgcagatcatcaagctgctgctcgtcttctatgtcaagaagaccagccttctggccaactgccaggcgccgcgccggccctggctggcctcacacatgagcaccgtcttcctcacgctgctctgcttccccgccttcctgggcgccgctgtcttcctctgctacgccgtctggcaggtgaagccctcgagcacctgcggccccttccggaccctggacaccatgtacgaggccggcagggtgtgggtgcgccacctggaggcggcaggccccagggtctcctggctgccctgggtgcaccggtacctgatggaaaacaccttctttgtcttcctggtgtcagccctgctgctggccgtgatctacctcaacatccaggtggtgcggggccagcgcaaggtcatctgcctgctcaaggagcagatcagcaatgagggtgaggacaaaatcttcttaatcaacaagcttcactccatctacgagaggaaggagagggaggagaggagcagggttgggacaaccgaggaggctgcggcaccccctgccctgctcacagatgaacaggatgcctagggggacggcgatgggcctcacgggcccgcccagcaccctgagaccacactgttgcctcccagtgaccctgctgggacaccaggacaaggaagacagtttcgcctctcgaaagccgcagctgcgcctaggctggagctggaagggtgggtgaatccggcttgggcatccccaatgaactctgccctgcctgggactctatttattctgattaaaggggttttgcaaatgg

SEQ ID NO: 428791 - DNA, 2960 bp, Homo sapiens
aggtgcggctactcccccggccccggcagacctgcgactggcccagtcgcccctggggccctttgccactcccttggcaaggagagccgagacctcagttcccggcggctcttgcggggcacaggtgagccctggctgcgcgcgcgggccctcctccccggcgcctcccaggaatgggtggtgtggacagctgccaggcgttgaagaccacccctggctctgtgcccctgtctcatcagatgggggctccggaggtggcgcccaggctctgagctaccctaggtctgcagactagcgggcattggccagagacatggcccagccactggccttcatcctcgatgtccctgagaccccaggggaccagggccagggccccagcccctatgatgaaagcgaagtgcacgactccttccagcagctcatccaggagcagagccagtgcacggcccaggaggggctggagctgcagcagagagagcgggaggtgacaggaagtagccagcagacactctggcggcccgagggcacccagagcacggccacactccgcatcctggccagcatgcccagccgcaccattggccgcagccgaggtgccatcatctcccagtactacaaccgcacggtgcagcttcggtgcaggagcagccggcccctgctcgggaactttgtccgctccgcctggcccagcctccgcctgtacgacctggagctggaccccacggccctggaggaggaggagaagcagagcctcctggtgaaggagctccagagcctggcagtggcacagcgggaccacatgcttcgcgggatgcccttaagcctggctgagaaacgcagcctgcgagagaagagcaggaccccgagggggaagtggaggggccagccgggcagcggcggggtctgctcctgctgtggccggctcagatatgcctgcgtgctggccttgcacagcctgggcctggcgctgctctccgccctgcaggccctgatgccgtggcgctacgccctgaagcgcatcgggggccagttcggctccagcgtgctctcctacttcctctttctcaagaccctgctggctttcaatgccctcctgctgctgctgctggtggccttcatcatgggccctcaggtcgccttcccacccgccctgccgggccctgcccccgtctgcacaggcctggagctcctcacaggcgcgggttgcttcacccacaccgtcatgtactacggccactacagtaacgccacgctgaaccagccgtgtggcagccccctggatggcagccagtgcacacccagggtgggtggcctgccctacaacatgcccctggcctacctctccactgtgggcgtgagcttctttatcacctgcatcaccctggtgtacagcatggctcactctttcggggagagctaccgggtgggcagcacctctggcatccacgccatcaccgtcttctgctcctgggactacaaggtgacgcagaagcgggcctcccgcctccagcaggacaatattcgcacccggctgaaggagctgctggccgagtggcagctgcggcacagccccaggagcgtgtgcgggaggctgcggcaggcggctgtgctggggcttgtgtggctgctgtgtctggggaccgcgctgggctgcgccgtggccgtccacgtcttctcggagttcatgatccagagtccagaggctgctggccaggaggctgtgctgctggtcctgcccctggtggttggcctcctcaacctgggggccccctacctgtgccgtgtcctggccgccctggagccgcatgactccccggtactggaggtgtacgtggccatctgcaggaacctcatcctcaagctggccatcctggggacactgtgctaccactggctgggccgcagggtgggcgtcctgcagggccagtgctgggaggattttgtgggccaggagctgtaccggttcctggtgatggacttcgtcctcatgttgctggacacgctttttggggaactggtgtggaggattatctccgagaagaagctgaagaggaggcggaagccggagtttgacattgcccggaatgtcctggagctgatttatgggcagactctgacctggctgggggtgctcttctcgcccctcctccccgccgtgcagatcatcaagctgctgctcgtcttctatgtcaagaagaccagccttctggccaactgccaggcgccgcgccggccctggctggcctcacacatgagcaccgtcttcctcacgctgctctgcttccccgccttcctgggcgccgctgtcttcctctgctacgccgtctggcaggtgaagccctcgagcacctgcggccccttccggaccctggacaccatgtacgaggccggcagggtgtgggtgcgccacctggaggcggcaggccccagggtctcctggctgccctgggtgcaccggtacctgatggaaaacaccttctttgtcttcctggtgtcagccctgctgctggccgtgatctacctcaacatccaggtggtgcggggccagcgcaaggtcatctgcctgctcaaggagcagatcagcaatgagggtgaggacaaaatcttcttaatcaacaagcttcactccatctacgagaggaaggagagggaggagaggagcagggttgggacaaccgaggaggctgcggcaccccctgccctgctcacagatgaacaggatgcctagggggacggcgatgggcctcacgggcccgcccagcaccctgagaccacactgttgcctcccagtgaccctgctgggacaccaggacaaggaagacagtttcgcctctcgaaagccgcagctgcgcctaggctggagctggaagggtgggtgaatccggcttgggcatccccaatgaactctgccctgcctgggactctatttattctgattaaaggggttttgcaaatgg

SEQ ID NO: 428792 - DNA, 2169 bp, Homo sapiens
ggcacggccacactccgcatcctggccagcatgcccagccgcaccattggccgcagccgaggtgccatcatctcccagatgggggctccggaggtggcgcccaggctctgagctaccctaggtctgcagactagcgggcattggccagagacatggcccagccactggccttcatcctcgatgtccctgagaccccaggggaccagggccagggccccagcccctatgatgaaagcgaagtgcacgactccttccagcagctcatccaggagcagagccagtgcacggcccaggaggggctggagctgctgctgctgctggtggccttcatcatgggccctcaggtcgccttcccacccgccctgccgggccctgcccccgtctgcacaggcctggagctcctcacaggcgcgggttgcttcacccacaccgtcatgtactacggccactacagtaacgccacgctgaaccagccgtgtggcagccccctggatggcagccagtgcacacccagggtgggtggcctgccctacaacatgcccctggcctacctctccactgtgggcgtgagcttctttatcacctgcatcaccctggtgtacagcatggctcactctttcggggagagctaccgggtgggcagcacctctggcatccacgccatcaccgtcttctgctcctgggactacaaggtgacgcagaagcgggcctcccgcctccagcaggacaatattcgcacccggctgaaggagctgctggccgagtggcagctgcggcacagccccaggagcgtgtgcgggaggctgcggcaggcggctgtgctggggcttgtgtggctgctgtgtctggggaccgcgctgggctgcgccgtggccgtccacgtcttctcggagttcatgatccagagtccagaggctgctggccaggaggctgtgctgctggtcctgcccctggtggttggcctcctcaacctgggggccccctacctgtgccgtgtcctggccgccctggagccgcatgactccccggtactggaggtgtacgtggccatctgcaggaacctcatcctcaagctggccatcctggggacactgtgctaccactggctgggccgcagggtgggcgtcctgcagggccagtgctgggaggattttgtgggccaggagctgtaccggttcctggtgatggacttcgtcctcatgttgctggacacgctttttggggaactggtgtggaggattatctccgagaagaagctgaagaggaggcggaagccggagtttgacattgcccggaatgtcctggagctgatttatgggcagactctgacctggctgggggtgctcttctcgcccctcctccccgccgtgcagatcatcaagctgctgctcgtcttctatgtcaagaagaccagccttctggccaactgccaggcgccgcgccggccctggctggcctcacacatgagcaccgtcttcctcacgctgctctgcttccccgccttcctgggcgccgctgtcttcctctgctacgccgtctggcaggtgaagccctcgagcacctgcggccccttccggaccctggacaccatgtacgaggccggcagggtgtgggtgcgccacctggaggcggcaggccccagggtctcctggctgccctgggtgcaccggtacctgatggaaaacaccttctttgtcttcctggtgtcagccctgctgctggccgtgatctacctcaacatccaggtggtgcggggccagcgcaaggtcatctgcctgctcaaggagcagatcagcaatgagggtgaggacaaaatcttcttaatcaacaagcttcactccatctacgagaggaaggagagggaggagaggagcagggttgggacaaccgaggaggctgcggcaccccctgccctgctcacagatgaacaggatgcctagggggacggcgatgggcctcacgggcccgcccagcaccctgagaccacactgttgcctcccagtgaccctgctgggacaccaggacaaggaagacagtttcgcctctcgaaagccgcagctgcgcctaggctggagctggaagggtgggtgaatccggcttgggcatccccaatgaactctgccctgcctgggactctatttattctgattaaaggggttttgcaaatgg

SEQ ID NO: 428793 - DNA, 3039 bp, Homo sapiens
aggtgcggctactcccccggccccggcagacctgcgactggcccagtcgcccctggggccctttgccactcccttggcaaggagagccgagacctcagttcccggcggctcttgcggggcacaggtgagccctggctgcgcgcgcgggccctcctccccggcgcctcccagatgggggctccggaggtggcgcccaggctctgagctaccctaggtctgcagactagcgggcattggccagagacatggcccagccactggccttcatcctcgatgtccctgagaccccaggggaccagggccagggccccagcccctatgatgaaagcgaagtgcacgactccttccagcagctcatccaggagcagagccagtgcacggcccaggaggggctggagctgcagcagagagagcgggaggtgacaggaagtagccagcagacactctggcggcccgagggcacccagagcacggccacactccgcatcctggccagcatgcccagccgcaccattggccgcagccgaggtgccatcatctcccagtactacaaccgcacggtgcagcttcggtgcaggagcagccggcccctgctcgggaactttgtccgctccgcctggcccagcctccgcctgtacgacctggagctggaccccacggccctggaggaggaggagaagcagagcctcctggtgaaggagctccagagcctggcagtggcacagcgggaccacatgcttcgcgggatgcccttaagcctggctgagaaacgcagcctgcgagagaagagcaggaccccgagggggaagtggaggggccagccgggcagcggcggggtctgctcctgctgtggccggctcagatatgcctgcgtgctggccttgcacagcctgggcctggcgctgctctccgccctgcaggccctgatgccgtggcgctacgccctgaagcgcatcgggggccagttcggctccagcgtgctctcctacttcctctttctcaagaccctgctggctttcaatgccctcctgctgctgctgctggtggccttcatcatgggccctcaggtcgccttcccacccgccctgccgggccctgcccccgtctgcacaggcctggagctcctcacaggcgcgggttgcttcacccacaccgtcatgtactacggccactacagtaacgccacgctgaaccagccgtgtggcagccccctggatggcagccagtgcacacccagggtgggtggcctgccctacaacatgcccctggcctacctctccactgtgggcgtgagcttctttatcacctgcatcaccctggtgtacagcatggctcactctttcggggagagctaccgggtgggcagcacctctggcatccacgccatcaccgtcttctgctcctgggactacaaggtgacgcagaagcgggcctcccgcctccagcaggacaatattcgcacccggctgaaggagctgctggccgagtggcagctgcggcacagccccaggagcgtgtgcgggaggctgcggcaggcggctgtgctggggcttgtgtggctgctgtgtctggggaccgcgctgggctgcgccgtggccgtccacgtcttctcggagttcatgatccagagtccagaggctgctggccaggaggctgtgctgctggtcctgcccctggtggttggcctcctcaacctgggggccccctacctgtgccgtgtcctggccgccctggagccgcatgactccccggtactggaggtgtacgtggccatctgcaggaacctcatcctcaagctggccatcctggggacactgtgctaccactggctgggccgcagggtgggcgtcctgcagggccagtgctgggaggattttgtgggccaggagctgtaccggttcctggtgatggacttcgtcctcatgttgctggacacgctttttggggaactggtgtggagggccctgtgtctccacccttcagaggaagactcaggaaatagaaccgaactcatttttagattggaaaggaaaacaggtttcaaagtgatgtgtatggccaggcatggtggctcatgcctgtaatcccagcactttgggaggctgaggattatctccgagaagaagctgaagaggaggcggaagccggagtttgacattgcccggaatgtcctggagctgatttatgggcagactctgacctggctgggggtgctcttctcgcccctcctccccgccgtgcagatcatcaagctgctgctcgtcttctatgtcaagaagaccagccttctggccaactgccaggcgccgcgccggccctggctggcctcacacatgagcaccgtcttcctcacgctgctctgcttccccgccttcctgggcgccgctgtcttcctctgctacgccgtctggcaggtgaagccctcgagcacctgcggccccttccggaccctggacaccatgtacgaggccggcagggtgtgggtgcgccacctggaggcggcaggccccagggtctcctggctgccctgggtgcaccggtacctgatggaaaacaccttctttgtcttcctggtgtcagccctgctgctggccgtgatctacctcaacatccaggtggtgcggggccagcgcaaggtcatctgcctgctcaaggagcagatcagcaatgagggtgaggacaaaatcttcttaatcaacaagcttcactccatctacgagaggaaggagagggaggagaggagcagggttgggacaaccgaggaggctgcggcaccccctgccctgctcacagatgaacaggatgcctagggggacggcgatgggcctcacgggcccgcccagcaccctgagaccacactgttgcctcccagtgaccctgctgggacaccaggacaaggaagacagtttcgcctctcgaaagccgcagctgcgcctaggctggagctggaagggtgggtgaatccggcttgggcatccccaatgaactctgccctgcctgggactctatttattctgattaaaggggttttgcaaatgg

SEQ ID NO: 428794 - DNA, 3313 bp, Homo sapiens
aggtgcggctactcccccggccccggcagacctgcgactggcccagtcgcccctggggccctttgccactcccttggcaaggagagccgagacctcagttcccggcggctcttgcggggcacaggtgagccctggctgcgcgcgcgggccctcctccccggcgcctcccagatgggggctccggaggtggcgcccaggctctgagctaccctaggtctgcagactagcgggcattggccagagacatggcccagccactggccttcatcctcgatgtccctgagaccccaggggaccagggccagggccccagcccctatgatgaaagcgaagtgcacgactccttccagcagctcatccaggagcagagccagtgcacggcccaggaggggctggagctgcagcagagagagcgggaggtgacaggaagtagccagcagacactctggcggcccgagggcacccagagcacggccacactccgcatcctggccagcatgcccagccgcaccattggccgcagccgaggtgccatcatctcccagtactacaaccgcacggtgcagcttcggtgcaggagcagccggcccctgctcgggaactttgtccgctccgcctggcccagcctccgcctgtacgacctggagctggaccccacggccctggaggaggaggagaagcagagcctcctggtgaaggagctccagagcctggcagtggcacagcgggaccacatgcttcgcgggatgcccttaagcctggctgagaaacgcagcctgcgagagaagagcaggaccccgagggggaagtggaggggccagccgggcagcggcggggtctgctcctgctgtggccggctcagatatgcctgcgtgctggccttgcacagcctgggcctggcgctgctctccgccctgcaggccctgatgccgtggcgctacgccctgaagcgcatcgggggccagttcggctccagcgtgctctcctacttcctctttctcaagaccctgctggctttcaatgccctcctgctgctgctgctggtggccttcatcatgggccctcaggtcgccttcccacccgccctgccgggccctgcccccgtctgcacaggcctggagctcctcacaggcgcgggttgcttcacccacaccgtcatgtactacggccactacagtaacgccacgctgaaccagccgtgtggcagccccctggatggcagccagtgcacacccagggtgggtggcctgccctacaacatgcccctggcctacctctccactgtgggcgtgagcttctttatcacctgcatcaccctggtgtacagcatggctcactctttcggggagagctaccgggtgggcagcacctctggcatccacgccatcaccgtcttctgctcctgggactacaaggtgacgcagaagcgggcctcccgcctccagcaggacaatattcgcacccggctgaaggagctgctggccgagtggcagctgcggcacagccccaggagcgtgtgcgggaggctgcggcaggcggctgtgctggggcttgtgtggctgctgtgtctggggaccgcgctgggctgcgccgtggccgtccacgtcttctcggagttcatgatccagagtccagaggctgctggccaggaggctgtgctgctggtcctgcccctggtggttggcctcctcaacctgggggccccctacctgtgccgtgtcctggccgccctggagccgcatgactccccggtactggaggtgtacgtggccatctgcaggtgtgtggccgcacatgaaaacatcatttggtgctggagctgatactggttgtttagctccgggtgtatccaaacctacttaggatgaggccggtgtgaccaagcccctggtgggggccctggggtgcatcttctgtcccctgtacccgcccctcagcctttgcaccccgccctccggaacctcatcctcaagctggccatcctggggacactgtgctaccactggctgggccgcagggtgggcgtcctgcagggccagtgctgggaggattttgtgggccaggagctgtaccggttcctggtgatggacttcgtcctcatgttgctggacacgctttttggggaactggtgtggaggtgagggggtcctgggcggactgggtggtgagtgttctccccttagtggccgggacgtgtggccgggaggttctcaggcctggacctttcccatcagggccctgtgtctccacccttcagaggaagactcaggaaatagaaccgaactcatttttagattggaaaggaaaacaggtttcaaagtgatgtgtatggccaggcatggtggctcatgcctgtaatcccagcactttgggaggctgaggattatctccgagaagaagctgaagaggaggcggaagccggagtttgacattgcccggaatgtcctggagctgatttatgggcagactctgacctggctgggggtgctcttctcgcccctcctccccgccgtgcagatcatcaagctgctgctcgtcttctatgtcaagaagaccagccttctggccaactgccaggcgccgcgccggccctggctggcctcacacatgagcaccgtcttcctcacgctgctctgcttccccgccttcctgggcgccgctgtcttcctctgctacgccgtctggcaggtgaagccctcgagcacctgcggccccttccggaccctggacaccatgtacgaggccggcagggtgtgggtgcgccacctggaggcggcaggccccagggtctcctggctgccctgggtgcaccggtacctgatggaaaacaccttctttgtcttcctggtgtcagccctgctgctggccgtgatctacctcaacatccaggtggtgcggggccagcgcaaggtcatctgcctgctcaaggagcagatcagcaatgagggtgaggacaaaatcttcttaatcaacaagcttcactccatctacgagaggaaggagagggaggagaggagcagggttgggacaaccgaggaggctgcggcaccccctgccctgctcacagatgaacaggatgcctagggggacggcgatgggcctcacgggcccgcccagcaccctgagaccacactgttgcctcccagtgaccctgctgggacaccaggacaaggaagacagtttcgcctctcgaaagccgcagctgcgcctaggctggagctggaagggtgggtgaatccggcttgggcatccccaatgaactctgccctgcctgggactctatttattctgattaaaggggttttgcaaatgg

SEQ ID NO: 428795 - DNA, 3319 bp, Homo sapiens
aggtgcggctactcccccggccccggcagacctgcgactggcccagtcgcccctggggccctttgccactcccttggcaaggagagccgagacctcagttcccggcggctcttgcggggcacaggtgagccctggctgcgcgcgcgggccctcctccccggcgcctcccagatgggggctccggaggtggcgcccaggctctgagctaccctaggtctgcagactagcgggcattggccagagacatggcccagccactggccttcatcctcgatgtccctgagaccccaggggaccagggccagggccccagcccctatgatgaaagcgaagtgcacgactccttccagcagctcatccaggagcagagccagtgcacggcccaggaggggctggagctgcagcagagagagcgggaggtgacaggaagtagccagcagacactctggcggcccgagggcacccagagcacggccacactccgcatcctggccagcatgcccagccgcaccattggccgcagccgaggtgccatcatctcccagtactacaaccgcacggtgcagcttcggtgcaggagcagccggcccctgctcgggaactttgtccgctccgcctggcccagcctccgcctgtacgacctggagctggaccccacggccctggaggaggaggagaagcagagcctcctggtgaaggagctccagagcctggcagtggcacagcgggaccacatgcttcgcgggatgcccttaagcctggctgagaaacgcagcctgcgagagaagagcaggaccccgagggggaagtggaggggccagccgggcagcggcggggtctgctcctgctgtggccggctcagatatgcctgcgtgctggccttgcacagcctgggcctggcgctgctctccgccctgcaggccctgatgccgtggcgctacgccctgaagcgcatcgggggccagttcggctccagcgtgctctcctacttcctctttctcaagaccctgctggctttcaatgccctcctgctgctgctgctggtggccttcatcatgggccctcaggtcgccttcccacccgccctgccgggccctgcccccgtctgcacaggcctggagctcctcacaggcgcgggttgcttcacccacaccgtcatgtactacggccactacagtaacgccacgctgaaccagccgtgtggcagccccctggatggcagccagtgcacacccagggtgggtggcctgccctacaacatgcccctggcctacctctccactgtgggcgtgagcttctttatcacctgcatcaccctggtgtacagcatggctcactctttcggggagagctaccgggtgggcagcacctctggcatccacgccatcaccgtcttctgctcctgggactacaaggtgacgcagaagcgggcctcccgcctccagcaggacaatattcgcacccggctgaaggagctgctggccgagtggcagctgcggcacagccccaggagcgtgtgcgggaggctgcggcaggcggctgtgctggggcttgtgtggctgctgtgtctggggaccgcgctgggctgcgccgtggccgtccacgtcttctcggagttcatgatccagagtccagaggctgctggccaggaggctgtgctgctggtcctgcccctggtggttggcctcctcaacctgggggccccctacctgtgccgtgtcctggccgccctggagccgcatgactccccggtactggaggtgtacgtggccatctgcaggaacctcatcctcaagctggccatcctggggacactgtgctaccactggctgggccgcagggtgggcgtcctgcagggccagtgctgggaggattttgtgggccaggagctgtaccggttcctggtgatggacttcgtcctcatgttgctggacacgctttttggggaactggtgtggaggattatctccgagaagaagctgaagaggaggcggaagccggagtttgacattgcccggaatgtcctggagctgatttatgggcagactctgacctggctgggggtgctcttctcgcccctcctccccgccgtgcagatcatcaagctgctgctcgtcttctatgtcaagaagaccagccttctggccaactgccaggcgccgcgccggccctggctggcctcacacatgagcaccgtcttcctcacgctgctctgcttccccgccttcctgggcgccgctgtcttcctctgctacgccgtctggcaggtgaagccctcgagcacctgcggccccttccggaccctggacaccatgtacgaggccggcagggtgtgggtgcgccacctggaggcggcaggccccagggtctcctggctgccctgggtgcaccggtacctgatggaaaacaccttctttgtcttcctggtgtcagccctgctgctggccgtgatctacctcaacatccaggtggtgcggggccagcgcaaggtcatctgcctgctcaaggagcagatcagcaatgagggtgaggacaaaatcttcttaatcaacaagcttcactccatctacgagaggaaggagagggaggagaggagcagggttgggacaaccgaggaggctgcggcaccccctgccctgctcacagatgaacaggatgcctagggggacggcgatgggcctcacgggcccgcccagcaccctgagaccacactgttgcctcccagtgaccctgctgggacaccaggacaaggaagacagtttcgcctctcgaaagccgcagctgcgcctaggctggagctggaagggtgggtgaatccggcttgggcatccccaatgaactctgccctgcctgggactctatttattctgattaaaggggttttgcaaatggaaaaaaaaaaaaaaaaaaaaaaaaaaaaaaaaaaaaaaaaaaaaaaaaaaaaaaacaagagagagagggcgcgcgcgcgcgcgccgaaagagatatctcctcctccgaggagcggcgcccccagagtcgagcgccgagcccaccctagtcttttggatcaacgagaggggcgccccacaaagagggagcggccgtcatctattataaagcgcagcggcggcggcgcgagcgcgaggcgttcttcaaacaaagacggacgcgctgggagagcgcgtgaggaaaacacctgcggtggcaaaaaagcgggggggacaccccttctggggagagaaaagagaggagccacctctctatttctgctgtggggcgtgggagagcgacaaaactatgtgggggcgccacaagcactcctctgcgaccaaggaac

SEQ ID NO: 428796 - DNA, 1213 bp, Homo sapiens
agctagtaagcggtggatggagagcgcctgtggtggctctcactggggccctactgtgcgtctgcgcctggacgatgactcccggtacgaggtgtacgtgggaacctcatcctcaagctggccatcctggggacactgtgctaccactggctgggccgcagggtgggcgtcctgcagggccagtgctgggaggattttgtgggccaggagctgtaccggttcctggtgatggacttcgtcctcatgttgctggacacgctttttggggaactggtgtggaggattatctccgagaagaagctgaagaggaggcggaagccggagtttgacattgcccggaatgtcctggagctgatttatgggcagactctgacctggctgggggtgctcttctcgcccctcctccccgccgtgcagatcatcaagctgctgctcgtcttctatgtcaagaagaccagccttctggccaactgccaggcgccgcgccggccctggctggcctcacacatgagcaccgtcttcctcacgctgctctgcttccccgccttcctgggcgccgctgtcttcctctgctacgccgtctggcaggtgaagccctcgagcacctgcggccccttccggaccctggacaccatgtacgaggccggcagggtgtgggtgcgccacctggaggcggcaggccccagggtctcctggctgccctgggtgcaccggtacctgatggaaaacaccttctttgtcttcctggtgtcagccctgctgctggccgtgatctacctcaacatccaggtggtgcggggccagcgcaaggtcatctgcctgctcaaggagcagatcagcaatgagggtgaggacaaaatcttcttaatcaacaagcttcactccatctacgagaggaaggagagggaggagaggagcagggttgggacaaccgaggaggctgcggcaccccctgccctgctcacagatgaacaggatgcctagggggacggcgatgggcctcacgggcccgcccagcaccctgagaccacactgttgcctcccagtgaccctgctgggacaccaggacaaggaagacagtttcgcctctcgaaagccgcagctgcgcctaggctggagctggaagggtgggtgaatccggcttgggcatccccaatgaactctgccctgcctgggactctatttattctgattaaaggggttttgcaaatgg

SEQ ID NO: 428797 - DNA, 2929 bp, Homo sapiens
aggtgcggctactcccccggccccggcagacctgcgactggcccagtcgcccctggggccctttgccactcccttggcaaggagagccgagacctcagttcccggcggctcttgcggggcacaggtgagccctggctgcgcgcgcgggccctcctccccggcgcctcccagatgggggctccggaggtggcgcccaggctctgagctaccctaggtctgcagactagcgggcattggccagagacatggcccagccactggccttcatcctcgatgtccctgagaccccaggggaccagggccagggccccagcccctatgatgaaagcgaagtgcacgactccttccagcagctcatccaggagcagagccagtgcacggcccaggaggggctggagctgcagcagagagagcgggaggtgacaggaagtagccagcagacactctggcggcccgagggcacccagagcacggccacactccgcatcctggccagcatgcccagccgcaccattggccgcagccgaggtgccatcatctcccagtactacaaccgcacggtgcagcttcggtgcaggagcagccggcccctgctcgggaactttgtccgctccgcctggcccagcctccgcctgtacgacctggagctggaccccacggccctggaggaggaggagaagcagagcctcctggtgaaggagctccagagcctggcagtggcacagcgggaccacatgcttcgcgggatgcccttaagcctggctgagaaacgcagcctgcgagagaagagcaggaccccgagggggaagtggaggggccagccgggcagcggcggggtctgctcctgctgtggccggctcagatatgcctgcgtgctggccttgcacagcctgggcctggcgctgctctccgccctgcaggccctgatgccgtggcgctacgccctgaagcgcatcgggggccagttcggctccagcgtgctctcctacttcctctttctcaagaccctgctggctttcaatgccctcctgctgctgctgctggtggccttcatcatgggccctcaggtcgccttcccacccgccctgccgggccctgcccccgtctgcacaggcctggagctcctcacaggcgcgggttgcttcacccacaccgtcatgtactacggccactacagtaacgccacgctgaaccagccgtgtggcagccccctggatggcagccagtgcacacccagggtgggtggcctgccctacaacatgcccctggcctacctctccactgtgggcgtgagcttctttatcacctgcatcaccctggtgtacagcatggctcactctttcggggagagctaccgggtgggcagcacctctggcatccacgccatcaccgtcttctgctcctgggactacaaggtgacgcagaagcgggcctcccgcctccagcaggacaatattcgcacccggctgaaggagctgctggccgagtggcagctgcggcacagccccaggagcgtgtgcgggaggctgcggcaggcggctgtgctggggcttgtgtggctgctgtgtctggggaccgcgctgggctgcgccgtggccgtccacgtcttctcggagttcatgatccagagtccagaggctgctggccaggaggctgtgctgctggtcctgcccctggtggttggcctcctcaacctgggggccccctacctgtgccgtgtcctggccgccctggagccgcatgactccccggtactggaggtgtacgtggccatctgcaggaacctcatcctcaagctggccatcctggggacactgtgctaccactggctgggccgcagggtgggcgtcctgcagggccagtgctgggaggattttgtgggccaggagctgtaccggttcctggtgatggacttcgtcctcatgttgctggacacgctttttggggaactggtgtggaggattatctccgagaagaagctgaagaggaggcggaagccggagtttgacattgcccggaatgtcctggagctgatttatgggcagactctgacctggctgggggtgctcttctcgcccctcctccccgccgtgcagatcatcaagctgctgctcgtcttctatgtcaagaaggagggtgaggacaaaatcttcttaatcaacaagcttcactccatctacgagaggaaggagagggaggagaggagcagggttgggacaaccgaggaggctgcggcaccccctgccctgctcacagatgaacaggatgcctagggggacggcgatgggcctcacgggcccgcccagcaccctgagaccacactgttgcctcccagtgaccctgctgggacaccaggacaaggaagacagtttcgcctctcgaaagccgcagctgcgcctaggctggagctggaagggtgggtgaatccggcttgggcatccccaatgaactctgccctgcctgggactctatttattctgattaaaggggttttgcaaatggaaaaaaaaaaaaaaaaaaaaaaaaaaaaaaaaaaaaaaaaaaaaaaaaaaaaaaacaagagagagagggcgcgcgcgcgcgcgccgaaagagatatctcctcctccgaggagcggcgcccccagagtcgagcgccgagcccaccctagtcttttggatcaacgagaggggcgccccacaaagagggagcggccgtcatctattataaagcgcagcggcggcggcgcgagcgcgaggcgttcttcaaacaaagacggacgcgctgggagagcgcgtgaggaaaacacctgcggtggcaaaaaagcgggggggacaccccttctggggagagaaaagagaggagccacctctctatttctgctgtggggcgtgggagagcgacaaaactatgtgggggcgccacaagcactcctctgcgaccaaggaac

SEQ ID NO: 428798 - DNA, 1140 bp, Homo sapiens
aggtgcggctactcccccggccccggcagacctgcgactggcccagtcgcccctggggccctttgccactcccttggcaaggagagccgagacctcagttcccggcggctcttgcggggcacaggtgagccctggctgcgcgcgcgggccctcctccccggcgcctcccagatgggggctccggaggtggcgcccaggctctgagctaccctaggtctgcagactagcgggcattggccagagacatggcccagccactggccttcatcctcgatgtccctgagaccccaggggaccagggccagggccccagcccctatgatgaaagcgaagtgcacgactccttccagcagctcatccaggagcagagccagtgcacggcccaggaggggctggagctgcagcagagagagcgggaggtgacaggaagtagccagcagacactctggcggcccgagggcacccagagcacggccacactccgcatcctggccagcatgcccagccgcaccattggccgcagccgaggtgccatcatctcccagtactacaaccgcacggtgcagcttcggtgcaggagcagccggcccctgctcgggaactttgtccgctccgcctggcccagcctccgcctgtacgacctggagctggaccccacggccctggaggaggaggagaagcagagcctcctggtgaaggagctccagagcctggcagtggcacagcgggaccacatgcttcgcgggatgcccttaagcctggctgagaaacgcagcctgcgagagaagagcaggaccccgagggggaagtggaggggccagccgggcagcggcggggtctgctcctgctgtggccggctcagatatgcctgcgtgctggccttgcacagcctgggcctggcgctgctctccgccctgcaggccctgatgccgtggcgctacgccctgaagcgcatcgggggccagttcggctccagcgtgctctcctacttcctctttctcaagaagtttcgcctctcgaaagccgcagctgcgcctaggctggagctggaagggtgggtgaatccggcttgggcatccccaatgaactctgccctgcctgggactctatttattctgattaaaggggttttgcaaatgg

SEQ ID NO: 428799 - DNA, 672 bp, Homo sapiens
ggcagagccagtacgtggcagggctggttttaaattgagtcaggctggctctgggctgctgattacatttcccttttcactttggccactaggaagcttagatccacacatacgcccacttcctggctcttggtttttccttgtccttgtttggtggccctttcaccttttcttttatgtttttgctgcttgcgatgttgaatacacctcgtgagttttccctcaaatgcagtttggaacaggatggctctggatgggctgatggatgatttctcctcccctttgtgttctggcctttctaggagggtgaggacaaaatcttcttaatcaacaagcttcactccatctacgagaggaaggagagggaggagaggagcagggttgggacaaccgaggaggctgcggcaccccctgccctgctcacagatgaacaggatgcctagggggacggcgatgggcctcacgggcccgcccagcaccctgagaccacactgttgcctcccagtgaccctgctgggacaccaggacaaggaagacagtttcgcctctcgaaagccgcagctgcgcctaggctggagctggaagggtgggtgaatccggcttgggcatccccaatgaactctgccctgcctgggactctatttattctgattaaaggggttttgcaaatgg

SEQ ID NO: 428800 - DNA, 281 bp, Homo sapiens
gccacgctgaaccagccgtgtggcagccccctggatggcagccagtgcacacccagggtgggtggcctgccctacaacatgcccctggcctacctctccactgtgggcgtgagcttctttatcacctgcatcaccctggtgtacaggtaatgcctccacctcatgacccaggctccgagctccactcatccatccattcatctttcgacccattcattgattcttccctcttcctttcttccttctgtccatctacctgtctgctctcatccactcaccta

SEQ ID NO: 428801 - DNA, 309 bp, Homo sapiens
cgaggtgccatcatctcccagtactacaaccgcacggtgcagcttcggtgcaggagcagccggcccctgctcgggaactttgtccgctccgcctggcccagcctccgcctgtacgacctggagctggaccccacggccctggaggaggagggtgagtgagtgggcactggagccccagtggcggacaccggcctggggtggggtgcaagaggccagcctggcctgggcggtggctggggtgctgcagagccagaggcccctctcctatcccttagcaggctgcctgaaggcccccccgtccctctgcag

SEQ ID NO: 428802 - DNA, 2090 bp, Homo sapiens
ggcacggccacactccgcatcctggccagcatgcccagccgcaccattggccgcagccgaggtgccatcatctcccagatgggggctccggaggtggcgcccaggctctgagctaccctaggtctgcagactagcgggcattggccagagacatggcccagccactggccttcatcctcgatgtccctgagaccccaggggaccagggccagggccccagcccctatgatgaaagcgaagtgcacgactccttccagcagctcatccaggagcagagccagtgcacggcccaggaggggctggagctgcagcagagagagcgggaggtgacaggaagtagccagcagacactctggcggcccgagggcacccagagcacggccacactccgctccgcctggcccagcctccgcctgtacgacctggagctggaccccacggccctggaggaggaggagaagcagagcctcctggtgaaggagctccagagcctggcagtggcacagcgggaccacatgcttcgcgggatgcccttaagcctggctgagaaacgcagcctgcgagagaagagcaggaccccgagggggaagtggaggggccagccgggcagcggcggggtctgctcctgctgtggccggctcagatatgcctgcgtgctgccctgctggctttcaatgccctcctgctgctgctgctggtggccttcatcatgggccctcaggtcgccttcccacccgccctgccgggccctgcccccgtctgcacaggcctggagctcctcacaggcgcgggttgcttcacccacaccgtcatgtactacggccactacagtaacgccacgctgaaccagccgtgtggcagccccctggatggcagccagtgcacacccagggtgggtggcctgccctacaacatgcccctggcctacctctccactgtgggcgtgagcttctttatcacctgcatcaccctggtgtacagcatggctcactctttcggggagagctaccgggtgggcagcacctctggcatccacgccatcaccgtcttctgctcctgggactacaaggtgacgcagaagcgggcctcccgcctccagcaggacaatattcgcacccggctgaaggagctgctggccgagtggcagctgcggcacagccccaggagcgtgtgcgggaggctgcggcaggcggctgtgctggggcttgtgtggctgctgtgtctggggaccgcgctgggctgcgccgtggccgtccacgtcttctcggagttcatgatccagagtccagaggctgctggccaggaggctgtgctgctggtcctgcccctggtggttggcctcctcaacctgggggccccctacctgtgccgtgtcctggccgccctggagccgcatgactccccggtactggaggtgtacgtggccatctgcaggaacctcatcctcaagctggccatcctggggacactgtgctaccactggctgggccgcagggtgggcgtcctgcagggccagtgctgggaggattttgtgggccaggagctgtaccggttcctggtgatggacttcgtcctcatgttgctggacacgctttttggggaactggtgtggaggtgagggggtcctgggcggactgggtggtgagtgttctccccttagtggccgggacgtgtggccgggaggttctcaggcctggacctttcccatcagggccctgtgtctccacccttcagaggaagactcaggaaatagaaccgaactcatttttagattggaaaggaaaacaggtttcaaagtgatgtgtatggccaggcatggtggctcatgcctgtaatcccagcactttgggaggctgaggtgagtggatcacctgaggtcaggagtttgagaccagcctggccagcatggcaaaaccccgtctctactaaaaatacaaaaattagcagggcgtggtggcgcacaccagtagtcccagctactcgggaggcagaggcatgagaatcgcttgaacctgggaagcggaggttgtagtgagctgagattgcgcctctgcactccagcccgggcgacagagcaagactgtgttgcc

SEQ ID NO: 428803 - DNA, 715 bp, Homo sapiens
  misc_feature (674)..(674): n is a, c, g, or t
  misc_feature (697)..(697): n is a, c, g, or t
  misc_feature (706)..(706): n is a, c, g, or t
aggtgcggctactcccccggccccggcagacctgcgactggcccagtcgcccctggggccctttgccactcccttggcaaggagagccgagacctcagttcccggcggctcttgcggggcacaggtgagccctggctgcgcgcgcgggccctcctccccggcgcctcccagccagggccccagcccctatgatgaaagcgaagtgcacgactccttccagcagctcatccaggagcagagccagtgcacggcccaggaggggctggagctgcagcagagagagcgggaggtgacaggaagtagccagcagacactctggcggcccgagggcacccagagcacggccacactccgcatcctggccagcatgcccagccgcaccattggccgcagccgaggtgccatcatctcccagtactacaaccgcacggtgcagcttcggtgcaggagcagccggcccctgctcgggaactttgtccgctccgcctggcccagcctccgcctgtacgacctggagctggaccccacggccctggaggaggaggagaagcagagcctcctggtgaaggagctccagagcctggcagtggcacagcgggaccacatgcttcgcgggatgcccttaagcctggctgagaaacgcagcctgcgcttgacagctggcctggcctgtntcgcctgaggcctgatgcgggcntccctgacnatgggcagt

SEQ ID NO: 428804 - DNA, 2546 bp, Homo sapiens
ggcacggccacactccgcatcctggccagcatgcccagccgcaccattggccgcagccgaggtgccatcatctcccagatgggggctccggaggtggcgcccaggctctgagctaccctaggtctgcagactagcgggcattggccagagacatggcccagccactggccttcatcctcgatgtccctgagaccccaggggaccagggccagggccccagcccctatgatgaaagcgaagtgcacgactccttccagcagctcatccaggagcagagccagtgcacggcccaggaggggctggagctgcagcagagagagcgggaggtgacaggaagtagccagcagacactctggcggcccgagggcacccagagcacggccacactccgctccgcctggcccagcctccgcctgtacgacctggagctggaccccacggccctggaggaggaggagaagcagagcctcctggtgaaggagctccagagcctggcagtggcacagcgggaccacatgcttcgcgggatgcccttaagcctggctgagaaacgcagcctgcgagagaagagcaggaccccgagggggaagtggaggggccagccgggcagcggcggggtctgctcctgctgtggccggctcagatatgcctgcgtgctgccctgctggctttcaatgccctcctgctgctgctgctggtggccttcatcatgggccctcaggtcgccttcccacccgccctgccgggccctgcccccgtctgcacaggcctggagctcctcacaggcgcgggttgcttcacccacaccgtcatgtactacggccactacagtaacgccacgctgaaccagccgtgtggcagccccctggatggcagccagtgcacacccagggtgggtggcctgccctacaacatgcccctggcctacctctccactgtgggcgtgagcttctttatcacctgcatcaccctggtgtacagcatggctcactctttcggggagagctaccgggtgggcagcacctctggcatccacgccatcaccgtcttctgctcctgggactacaaggtgacgcagaagcgggcctcccgcctccagcaggacaatattcgcacccggctgaaggagctgctggccgagtggcagctgcggcacagccccaggagcgtgtgcgggaggctgcggcaggcggctgtgctggggcttgtgtggctgctgtgtctggggaccgcgctgggctgcgccgtggccgtccacgtcttctcggagttcatgatccagagtccagaggctgctggccaggaggctgtgctgctggtcctgcccctggtggttggcctcctcaacctgggggccccctacctgtgccgtgtcctggccgccctggagccgcatgactccccggtactggaggtgtacgtggccatctgcaggaacctcatcctcaagctggccatcctggggacactgtgctaccactggctgggccgcagggtgggcgtcctgcagggccagtgctgggaggattttgtgggccaggagctgtaccggttcctggtgatggacttcgtcctcatgttgctggacacgctttttggggaactggtgtggaggattatctccgagaagaagctgaagaggaggcggaagccggagtttgacattgcccggaatgtcctggagctgatttatgggcagactctgacctggctgggggtgctcttctcgcccctcctccccgccgtgcagatcatcaagctgctgctcgtcttctatgtcaagaagaccagccttctggccaactgccaggcgccgcgccggccctggctggcctcacacatgagcaccgtcttcctcacgctgctctgcttccccgccttcctgggcgccgctgtcttcctctgctacgccgtctggcaggtgaagccctcgagcacctgcggccccttccggaccctggacaccatgtacgaggccggcagggtgtgggtgcgccacctggaggcggcaggccccagggtctcctggctgccctgggtgcaccggtacctgatggaaaacaccttctttgtcttcctggtgtcagccctgctgctggccgtgatctacctcaacatccaggtggtgcggggccagcgcaaggtcatctgcctgctcaaggagcagatcagcaatgagggtgaggacaaaatcttcttaatcaacaagcttcactccatctacgagaggaaggagagggaggagaggagcagggttgggacaaccgaggaggctgcggcaccccctgccctgctcacagatgaacaggatgcctagggggacggcgatgggcctcacgggcccgcccagcaccctgagaccacactgttgcctcccagtgaccctgctgggacaccaggacaaggaagacagtttcgcctctcgaaagccgcagctgcgcctaggctggagctggaagggtgggtgaatccggcttgggcatccccaatgaactctgccctgcctgggactctatttattctgattaaaggggttttgcaaatgg

SEQ ID NO: 428805 - DNA, 2790 bp, Homo sapiens
gcaggaagcggaggaaggtgaagtaggaccgaattcctgtgccgaagaggcctgcagtgggagagcaggatgggggctccggaggtggcgcccaggctctgagctaccctaggtctgcagactagcgggcattggccagagacatggcccagccactggccttcatcctcgatgtccctgagaccccaggggaccagggccagggccccagcccctatgatgaaagcgaagtgcacgactccttccagcagctcatccaggagcagagccagtgcacggcccaggaggggctggagctgcagcagagagagcgggaggtgacaggaagtagccagcagacactctggcggcccgagggcacccagagcacggccacactccgcatcctggccagcatgcccagccgcaccattggccgcagccgaggtgccatcatctcccagtactacaaccgcacggtgcagcttcggtgcaggagcagccggcccctgctcgggaactttgtccgctccgcctggcccagcctccgcctgtacgacctggagctggaccccacggccctggaggaggaggagaagcagagcctcctggtgaaggagctccagagcctggcagtggcacagcgggaccacatgcttcgcgggatgcccttaagcctggctgagaaacgcagcctgcgagagaagagcaggaccccgagggggaagtggaggggccagccgggcagcggcggggtctgctcctgctgtggccggctcagatatgcctgcgtgctggccttgcacagcctgggcctggcgctgctctccgccctgcaggccctgatgccgtggcgctacgccctgaagcgcatcgggggccagttcggctccagcgtgctctcctacttcctctttctcaagaccctgctggctttcaatgccctcctgctgctgctgctggtggccttcatcatgggccctcaggtcgccttcccacccgccctgccgggccctgcccccgtctgcacaggcctggagctcctcacaggcgcgggttgcttcacccacaccgtcatgtactacggccactacagtaacgccacgctgaaccagccgtgtggcagccccctggatggcagccagtgcacacccagggtgggtggcctgccctacaacatgcccctggcctacctctccactgtgggcgtgagcttctttatcacctgcatcaccctggtgtacagcatggctcactctttcggggagagctaccgggtgggcagcacctctggcatccacgccatcaccgtcttctgctcctgggactacaaggtgacgcagaagcgggcctcccgcctccagcaggacaatattcgcacccggctgaaggagctgctggccgagtggcagctgcggcacagccccaggagcgtgtgcgggaggctgcggcaggcggctgtgctggggcttgtgtggctgctgtgtctggggaccgcgctgggctgcgccgtggccgtccacgtcttctcggagttcatgatccagagtccagaggctgctggccaggaggctgtgctgctggtcctgcccctggtggttggcctcctcaacctgggggccccctacctgtgccgtgtcctggccgccctggagccgcatgactccccggtactggaggtgtacgtggccatctgcaggaacctcatcctcaagctggccatcctggggacactgtgctaccactggctgggccgcagggtgggcgtcctgcagggccagtgctgggaggattttgtgggccaggagctgtaccggttcctggtgatggacttcgtcctcatgttgctggacacgctttttggggaactggtgtggaggattatctccgagaagaagctgaagaggaggcggaagccggagtttgacattgcccggaatgtcctggagctgatttatgggcagactctgacctggctgggggtgctcttctcgcccctcctccccgccgtgcagatcatcaagctgctgctcgtcttctatgtcaagaagaccagccttctggccaactgccaggcgccgcgccggccctggctggcctcacacatgagcaccgtcttcctcacgctgctctgcttccccgccttcctgggcgccgctgtcttcctctgctacgccgtctggcaggtgaagccctcgagcacctgcggccccttccggaccctggacaccatgtacgaggccggcagggtgtgggtgcgccacctggaggcggcaggccccagggtctcctggctgccctgggtgcaccggtacctgatggaaaacaccttctttgtcttcctggtgtcagccctgctgctggccgtgatctacctcaacatccaggtggtgcggggccagcgcaaggtcatctgcctgctcaaggagcagatcagcaatgagggtgaggacaaaatcttcttaatcaacaagcttcactccatctacgagaggaaggagagggaggagaggagcagggttgggacaaccgaggaggctgcggcaccccctgccctgctcacagatgaacaggatgcctagggggacggcgatgggcctcacgggcccgcccagcaccctgagaccacactgttgcctcccagtgaccctgctgggacaccaggacaaggaagacagtttcgcctctcgaaagccgcagctgcgcctaggctggagctggaagggtgggtgaatccggcttgggcatccccaatgaactctgccctgcctgggactctatttattctgattaaaggggttttgcaaatgg

SEQ ID NO: 428806 - DNA, 1867 bp, Homo sapiens
cctcactgcccctgcctggcctcctcctgctctgcccctgtggctgtcaggcctgagggtcgggtggggcgtggggaaagtccctgactcggctggatctccctgtggcagggttgcttcacccacaccgtcatgtactacggccactacagtaacgccacgctgaaccagccgtgtggcagccccctggatggcagccagtgcacacccagggtgggtggcctgccctacaacatgcccctggcctacctctccactgtgggcgtgagcttctttatcacctgcatcaccctggtgtacagcatggctcactctttcggggagagctaccgggtgggcagcacctctggcatccacgccatcaccgtcttctgctcctgggactacaaggtgacgcagaagcgggcctcccgcctccagcaggacaatattcgcacccggctgaaggagctgctggccgagtggcagctgcggcacagccccaggagcgtgtgcgggaggctgcggcaggcggctgtgctggggcttgtgtggctgctgtgtctggggaccgcgctgggctgcgccgtggccgtccacgtcttctcggagttcatgatccagagtccagaggctgctggccaggaggctgtgctgctggtcctgcccctggtggttggcctcctcaacctgggggccccctacctgtgccgtgtcctggccgccctggagccgcatgactccccggtactggaggtgtacgtggccatctgcaggaacctcatcctcaagctggccatcctggggacactgtgctaccactggctgggccgcagggtgggcgtcctgcagggccagtgctgggaggattttgtgggccaggagctgtaccggttcctggtgatggacttcgtcctcatgttgctggacacgctttttggggaactggtgtggaggattatctccgagaagaagctgaagaggaggcggaagccggagtttgacattgcccggaatgtcctggagctgatttatgggcagactctgacctggctgggggtgctcttctcgcccctcctccccgccgtgcagatcatcaagctgctgctcgtcttctatgtcaagaagaccagccttctggccaactgccaggcgccgcgccggccctggctggcctcacacatgagcaccgtcttcctcacgctgctctgcttccccgccttcctgggcgccgctgtcttcctctgctacgccgtctggcaggtgaagccctcgagcacctgcggccccttccggaccctggacaccatgtacgaggccggcagggtgtgggtgcgccacctggaggcggcaggccccagggtctcctggctgccctgggtgcaccggtacctgatggaaaacaccttctttgtcttcctggtgtcagccctgctgctggccgtgatctacctcaacatccaggtggtgcggggccagcgcaaggtcatctgcctgctcaaggagcagatcagcaatgagggtgaggacaaaatcttcttaatcaacaagcttcactccatctacgagaggaaggagagggaggagaggagcagggttgggacaaccgaggaggctgcggcaccccctgccctgctcacagatgaacaggatgcctagggggacggcgatgggcctcacgggcccgcccagcaccctgagaccacactgttgcctcccagtgaccctgctgggacaccaggacaaggaagacagtttcgcctctcgaaagccgcagctgcgcctaggctggagctggaagggtgggtgaatccggcttgggcatccccaatgaactctgccctgcctgggactctatttattctgattaaaggggttttgcaaatgg

SEQ ID NO: 428807 - DNA, 2712 bp, Homo sapiens
aggtgcggctactcccccggccccggcagacctgcgactggcccagtcgcccctggggccctttgccactcccttggcaaggagagccgagacctcagttcccggcggctcttgcggggcacaggtgagccctggctgcgcgcgcgggccctcctccccggcgcctcccagatgggggctccggaggtggcgcccaggctctgagctaccctaggtctgcagactagcgggcattggccagagacatggcccagccactggccttcatcctcgatgtccctgagaccccaggggaccagggccagggccccagcccctatgatgaaagcgaagtgcacgactccttccagcagctcatccaggagcagagccagtgcacggcccaggaggggctggagctgcagcagagagagcgggaggtgacaggaagtagccagcagacactctggcggcccgagggcacccagagcacggccacactccgcatcctggccagcatgcccagccgcaccattggccgcagccgaggtgccatcatctcccagtactacaaccgcacggtgcagcttcggtgcaggagcagccggcccctgctcgggaactttgtccgctccgcctggcccagcctccgcctgtacgacctggagctggaccccacggccctggaggaggaggagaagcagagcctcctggtgaaggagctccagagcctggcagtggcacagcgggaccacatgcttcgcgggatgcccttaagcctggctgagaaacgcagcctgcgagagaagagcaggaccccgagggggaagtggaggggccagccgggcagcggcggggtctgctcctgctgtggccggctcagatatgcctgcgtgctggccttgcacagcctgggcctggcgctgctctccgccctgcaggccctgatgccgtggcgctacgccctgaagcgcatcgggggccagttcggctccagcgtgctctcctacttcctctttctcaagaccctgctggctttcaatgccctcctgctgctgctgctggtggccttcatcatgggccctcaggtcgccttcccacccgccctgccgggccctgcccccgtctgcacaggcctggagctcctcacaggcgcgggttgcttcacccacaccgtcatgtactacggccactacagtaacgccacgctgaaccagccgtgtggcagccccctggatggcagccagtgcacacccagggtgggtggcctgccctacaacatgcccctggcctacctctccactgtgggcgtgagcttctttatcacctgcatcaccctggtgtacagcatggctcactctttcggggagagctaccgggtgggcagcacctctggcatccacgccatcaccgtcttctgctcctgggactacaaggtgacgcagaagcgggcctcccgcctccagcaggacaatattcgcacccggctgaaggagctgctggccgagtggcagctgcggcacagccccaggagcgtgtgcgggaggctgcggcaggcggctgtgctggggcttgtgtggctgctgtgtctggggaccgcgctgggctgcgccgtggccgtccacgtcttctcggagttcatgatccagagtccagaggctgctggccaggaggctgtgctgctggtcctgcccctggtggttggcctcctcaacctgggggccccctacctgtgccgtgtcctggccgccctggagccgcatgactccccggtactggaggtgtacgtggccatctgcaggattatctccgagaagaagctgaagaggaggcggaagccggagtttgacattgcccggaatgtcctggagctgatttatgggcagactctgacctggctgggggtgctcttctcgcccctcctccccgccgtgcagatcatcaagctgctgctcgtcttctatgtcaagaagaccagccttctggccaactgccaggcgccgcgccggccctggctggcctcacacatgagcaccgtcttcctcacgctgctctgcttccccgccttcctgggcgccgctgtcttcctctgctacgccgtctggcaggtgaagccctcgagcacctgcggccccttccggaccctggacaccatgtacgaggccggcagggtgtgggtgcgccacctggaggcggcaggccccagggtctcctggctgccctgggtgcaccggtacctgatggaaaacaccttctttgtcttcctggtgtcagccctgctgctggccgtgatctacctcaacatccaggtggtgcggggccagcgcaaggtcatctgcctgctcaaggagcagatcagcaatgagggtgaggacaaaatcttcttaatcaacaagcttcactccatctacgagaggaaggagagggaggagaggagcagggttgggacaaccgaggaggctgcggcaccccctgccctgctcacagatgaacaggatgcctagggggacggcgatgggcctcacgggcccgcccagcaccctgagaccacactgttgcctcccagtgaccctgctgggacaccaggacaaggaagacagtttcgcctctcgaaagccgcagctgcgcctaggctggagctggaagggtgggtgaatccggcttgggcatccccaatgaactctgccctgcctgggactctatttattctgattaaaggggttttgcaaatgg

SEQ ID NO: 428808 - DNA, 1377 bp, Homo sapiens
tcttggaggagggaggtgctacctgccagttccaccccgggcccttccctgtagctgcccgctcccaccatggatggggggcttccatgacaccgctccctgcacccctgcagagtccagaggctgctggccaggaggctgtgctgctggtcctgcccctggtggttggcctcctcaacctgggggccccctacctgtgccgtgtcctggccgccctggagccgcatgactccccggtactggaggtgtacgtggccatctgcaggaacctcatcctcaagctggccatcctggggacactgtgctaccactggctgggccgcagggtgggcgtcctgcagggccagtgctgggaggattttgtgggccaggagctgtaccggttcctggtgatggacttcgtcctcatgttgctggacacgctttttggggaactggtgtggaggattatctccgagaagaagctgaagaggaggcggaagccggagtttgacattgcccggaatgtcctggagctgatttatgggcagactctgacctggctgggggtgctcttctcgcccctcctccccgccgtgcagatcatcaagctgctgctcgtcttctatgtcaagaagaccagccttctggccaactgccaggcgccgcgccggccctggctggcctcacacatgagcaccgtcttcctcacgctgctctgcttccccgccttcctgggcgccgctgtcttcctctgctacgccgtctggcaggtgaagccctcgagcacctgcggccccttccggaccctggacaccatgtacgaggccggcagggtgtgggtgcgccacctggaggcggcaggccccagggtctcctggctgccctgggtgcaccggtacctgatggaaaacaccttctttgtcttcctggtgtcagccctgctgctggccgtgatctacctcaacatccaggtggtgcggggccagcgcaaggtcatctgcctgctcaaggagcagatcagcaatgagggtgaggacaaaatcttcttaatcaacaagcttcactccatctacgagaggaaggagagggaggagaggagcagggttgggacaaccgaggaggctgcggcaccccctgccctgctcacagatgaacaggatgcctagggggacggcgatgggcctcacgggcccgcccagcaccctgagaccacactgttgcctcccagtgaccctgctgggacaccaggacaaggaagacagtttcgcctctcgaaagccgcagctgcgcctaggctggagctggaagggtgggtgaatccggcttgggcatccccaatgaactctgccctgcctgggactctatttattctgattaaaggggttttgcaaatgg

SEQ ID NO: 428809 - DNA, 2502 bp, Homo sapiens
aggtgcggctactcccccggccccggcagacctgcgactggcccagtcgcccctggggccctttgccactcccttggcaaggagagccgagacctcagttcccggcggctcttgcggggcacaggtgagccctggctgcgcgcgcgggccctcctccccggcgcctcccagatgggggctccggaggtggcgcccaggctctgagctaccctaggtctgcagactagcgggcattggccagagacatggcccagccactggccttcatcctcgatgtccctgagaccccaggggaccagggccagggccccagcccctatgatgaaagcgaagtgcacgactccttccagcagctcatccaggagcagagccagtgcacggcccaggaggggctggagctgcagcagagagagcgggaggtgacaggaagtagccagcagacactctggcggcccgagggcacccagagcacggccacactccgcatcctggccagcatgcccagccgcaccattggccgcagccgaggtgccatcatctcccagtactacaaccgcacggtgcagcttcggtgcaggagcagccggcccctgctcgggaactttgtccgctccgcctggcccagcctccgcctgtacgacctggagctggaccccacggccctggaggaggaggagaagcagagcctcctggtgaaggagctccagagcctggcagtggcacagcgggaccacatgcttcgcgggatgcccttaagcctggctgagaaacgcagcctgcgagagaagagcaggaccccgagggggaagtggaggggccagccgggcagcggcggggtctgctcctgctgtggccggctcagatatgcctgcgtgctggccttgcacagcctgggcctggcgctgctctccgccctgcaggccctgatgccgtggcgctacgccctgaagcgcatcgggggccagttcggctccagcgtgctctcctacttcctctttctcaagaccctgctggctttcaatgccctcctgctgctgctgctggtggccttcatcatgggccctcaggtcgccttcccacccgccctgccgggccctgcccccgtctgcacaggcctggagctcctcacaggcgcgggttgcttcacccacaccgtcatgtactacggccactacagtaacgccacgctgaaccagccgtgtggcagccccctggatggcagccagtgcacacccagggtgggtggcctgccctacaacatgcccctggcctacctctccactgtgggcgtgagcttctttatcacctgcatcaccctggtgtacagcatggctcactctttcggggagagctaccgggtgggcagcacctctggcatccacgccatcaccgtcttctgctcctgggactacaaggtgacgcagaagcgggcctcccgcctccagcaggacaatattcgcacccggctgaaggagctgctggccgagtggcagctgcggcacagccccaggagcgtgtgcgggaggctgcggcaggcggctgtgctggggcttgtgtggctgctgtgtctggggaccgcgctgggctgcgccgtggccgtccacgtcttctcggagttcatgatccagagtccagaggctgctggccaggaggctgtgctgctggtcctgcccctggtggttggcctcctcaacctgggggccccctacctgtgccgtgtcctggccgccctggagccgcatgactccccggtactggaggtgtacgtggccatctgcaggaacctcatcctcaagctggccatcctggggacactgtgctaccactggctgggccgcagggtgggcgtcctgcagggccagtgctgggaggattttgtgggccaggagctgtaccggttcctggtgatggacttcgtcctcatgttgctggacacgctttttggggaactggtgtggaggattatctccgagaagaagctgaagaggaggcggaagccggagtttgacattgcccggaatgtcctggagctgatttatgggcagactctgacctggctgggggtgctcttctcgcccctcctccccgccgtgcagatcatcaagctgctgctcgtcttctatgtcaagaaggagggtgaggacaaaatcttcttaatcaacaagcttcactccatctacgagaggaaggagagggaggagaggagcagggttgggacaaccgaggaggctgcggcaccccctgccctgctcacagatgaacaggatgcctagggggacggcgatgggcctcacgggcccgcccagcaccctgagaccacactgttgcctcccagtgaccctgctgggacaccaggacaaggaagacagtttcgcctctcgaaagccgcagctgcgcctaggctggagctggaagggtgggtgaatccggcttgggcatccccaatgaactctgccctgcctgggactctatttattctgattaaaggggttttgcaaatgg

SEQ ID NO: 428810 - DNA, 1862 bp, Homo sapiens
aggtgcggctactcccccggccccggcagacctgcgactggcccagtcgcccctggggccctttgccactcccttggcaaggagagccgagacctcagttcccggcggctcttgcggggcacaggtgagccctggctgcgcgcgcgggccctcctccccggcgcctcccagatgggggctccggaggtggcgcccaggctctgagctaccctaggtctgcagactagcgggcattggccagagacatggcccagccactggccttcatcctcgatgtccctgagaccccaggggaccagggccagggccccagcccctatgatgaaagcgaagtgcacgactccttccagcagctcatccaggagcagagccagtgcacggcccaggaggggctggagctgcagcagagagagcgggaggtgacaggaagtagccagcagacactctggcggcccgagggcacccagagcacggccacactccgcatcctggccagcatgcccagccgcaccattggccgcagccgaggtgccatcatctcccagtactacaaccgcacggtgcagcttcggtgcaggagcagccggcccctgctcgggaactttgtccgctccgcctggcccagcctccgcctgtacgacctggagctggaccccacggccctggaggaggaggagaagcagagcctcctggtgaaggagctccagagcctggcagtggcacagcgggaccacatgcttcgcgggatgcccttaagcctggctgagaaacgcagcctgcgagagaagagcaggaccccgagggggaagtggaggggccagccgggcagcggcggggtctgctcctgctgtggccggctcagatatgcctgcgtgctggccttgcacagcctgggcctggcgctgctctccgccctgcaggccctgatgccgtggcgctacgccctgaagcgcatcgggggccagttcggctccagcgtgctctcctacttcctctttctcaagaccctgctggctttcaatgccctcctgctgctgctgctggtggccttcatcatgggccctcaggtcgccttcccacccgccctgccgggccctgcccccgtctgcacaggcctggagctcctcacaggcgcgggttgcttcacccacaccgtcatgtactacggccactacagtaacgccacgctgaaccagccgtgtggcagccccctggatggcagccagtgcacacccagggtgggtggcctgccctacaacatgcccctggcctacctctccactgtgggcgtgagcttctttatcacctgcatcaccctggtgtacagcatggctcactctttcggggagagctaccgggtgggcagcacctctggcatccacgccatcaccgtcttctgctcctgggactacaaggtgacgcagaagcgggcctcccgcctccagcaggacaatattcgcacccggctgaaggagctgctggccgagtggcagctgcggcacagccccaggagcgtgtgcgggaggctgcggcaggcggctgtgctggggcttgtgtggctgctgtgtctggggaccgcgctgggctgcgccgtggccgtccacgtcttctcggagttcatgatccaggtgcggggatggggggagcctggcccttgcttggaacgtgtccccagtgactctgggcacctgccccctggggaggcagccttgcctctcctcctccacccagccagcccagggtgccacgtacgctgtgccccgtgctggggccccctccgagccccacttctcagccccttgtcctgtctcacggttttattttttggtttctggtttcttttccactacttgtacccctcc

SEQ ID NO: 428811 - DNA, 371 bp, Homo sapiens
gggattacaggcatgagccaccgcacctggccatcctggctcctgtctcgtctggccttttgtttcctcatccctgcagtggggaccatgttccagtggggactgagggaggtggtgtgtacagtgttgtgtgcagagcctggcatggcagcgaccttcagcagatggaggtgctgttggcatcacccgtttgcgtgcaagtgaccggcaggcttctgtcttcctctgtaaatgaggaggctgcagggagcagggtccaggctctgcctggacgcacagccctggtcgcccttccctcttgagctcccccagggcttggaggggtgctgaggggtagcaggatggtggcagagcgcagcctttccccacag

SEQ ID NO: 428812 - DNA, 2650 bp, Homo sapiens
actcccaagaggccacgcgtagacggggcgcttcatgcggaagtcagcggcgtccggtcccagcctcctctgggagcgggcagttggcgaccctgcactgacccgcgtccctccgtcccgagcccgcgcgccctcagagggtgcccggacagactgaagccatggcgattctttttgctgttgttgccagggggaccactatccttgccaaacatgcttggtgtggaggaaacttcctggaggtgacagagcagattctggctaagataccttctgaaaataacaaactaacgtactcacatggcaattatttgtttcattacatctgccaagacaggattgtatatctttgtatcactgatgatgattttgaacgttcccgagcctttaattttctgaatgagataaagaagaggttccagactacttacggttcaagagcacagacagcacttccatatgccatgaatagcgagttctcaagtgtcttagctgcacagctgaagcatcactctgagaataagggcctagacaaagtgatggagactcaagcccaagtggatgaactgaaaggaatcatggtcagaaacatagatctggtagctcagcgaggagaaagattggaattattgattgacaaaacagaaaatcttgtggattcttctgtcaccttcaaaactaccagcagaaatcttgctcgagccatgtgtatgaagaacctcaagctcactattatcatcatcatcgtatcaattgtgttcatctatatcattgtttcacctctctgtggtggatttacatggccaagctgtgtgaagaaataggaaagaagaagttaccattaaccaaggatatgagagaacaaggagttaaaagcaatccatgtgactcaagcctttcacatactgacagatggtatctgccagtctcttcaaccctcttctcactttttaaaatcttgttccatgcctccaggtttatctttgtcttatctaccagtttattcctgtgaacttcagattgaaccattcattgcagcagtagccttaaaaaggcttttgtttatttctttggtttgttaactagtgtcatctatttagagaaacatttttgtttttaattgctcaaagctgtcgccgctagtcttatgagctatctactaaaactatggagaaactttgtatgtgcacacaaaagtattcaagagacagtattgctaacatctcatcttaatgtcttttgttattgagaagttttaggtgcttcaaaacaatataaatggataatagttgttatttggggaattgtaatgatgttggtgctgcttccttctaagagctcagacaagtaaagtatgaaacattcttatttcagttagatggggaacattttgctagcccattagaagcacacagaattatccttgtcctcctaatattgactttcaggaataaagttcagtgtgctgatcattcacaatacagtggatagcttgatatcttctgttttcccattgcagttgatttgagaagatgaaggtttaaatattgttgaaagttgcagttttttaaatgtgttcctttttcttctgtgaatatttagggcaatcgtgtcgctaatagaatatgtagtagagggggtggggaggtaaattcctctgacttgccaaagaaaaagaagggaaccacagtggatatgctagcattttagctgtgcaaagggaggtagtgtgggaaaagtgtttccattctgggaaaagcccaaaccgaatacggtcagcagtcaactccagggtttgggcttgattcctgttgaataatagttttgagcattctttgtggttaaataaattcttaaatctgcctagttttgatgaattcttttgtgaaacttgaaagagaatagacagtatgacatatagaattaatacaaaacagtttaacaaccatttaactgcagtgtaagaaaattggactgtaatcatatcgctactggcatctgttatctagtatgcatttctggtgtgtatctgaaaggaagacattttctaccctagatccaattgcatttatttatcaataagtgccattaaattgaaattatattacattttacactttctcaatgaatgaacaaattagtctgtagaatctagccacctgtttagcctagtcatgtgccttgaacatatatgtgtcccataatctggctcatggtacctgttcttctatccaaacctttcaattcatgctacctgattcatttatttgacatagatcttaggcccacttgaactcttttcttgtttatctagcatagcacaaacgtttttccagtcttctttatcaacactaatgcctcttaattgcatcagtatttcctattggaaaatacatctgttccagaaaaacatttggcattcctgaataatttccaaatgtttttaatccaaagaaaaaggtttaaagcttatttccctttcttatacacacctgaataaaattgatgtgcatgttttagggatcaattacctaactgttccttggtctatttatgtataagaatgctttttaaagcacatgtctcattttaaatgacgcacaaactgaagatgttaataaaatttaagagtaatacaatgaaaaaattg

SEQ ID NO: 428813 - DNA, 2582 bp, Homo sapiens
actcccaagaggccacgcgtagacggggcgcttcatgcggaagtcagcggcgtccggtcccagcctcctctgggagcgggcagttggcgaccctgcactgacccgcgtccctccgtcccgagcccgcgcgccctcagagggtgcccggacagactgaagccatggcgattctttttgctgttgttgccagggggaccactatccttgccaaacatgcttggtgtggaggaaacttcctggaggtgacagagcagattctggctaagataccttctgaaaataacaaactaacgtactcacatggcaattatttgtttcattacatctgccaagacaggattgtatatctttgtatcactgatgatgattttgaacgttcccgagcctttaattttctgaatgagataaagaagaggttccagactacttacggttcaagagcacagacagcacttccatatgccatgaatagcgagttctcaagtgtcttagctgcacagctgaagcatcactctgagaataagggcctagacaaagtgatggagactcaagcccaagtggatgaactgaaaggaatcatggtcagaaacatagtctgtcaccttcaaaactaccagcagaaatcttgctcgagccatgtgtatgaagaacctcaagctcactattatcatcatcatcgtatcaattgtgttcatctatatcattgtttcacctctctgtggtggatttacatggccaagctgtgtgaagaaataggaaagaagaagttaccattaaccaaggatatgagagaacaaggagttaaaagcaatccatgtgactcaagcctttcacatactgacagatggtatctgccagtctcttcaaccctcttctcactttttaaaatcttgttccatgcctccaggtttatctttgtcttatctaccagtttattcctgtgaacttcagattgaaccattcattgcagcagtagccttaaaaaggcttttgtttatttctttggtttgttaactagtgtcatctatttagagaaacatttttgtttttaattgctcaaagctgtcgccgctagtcttatgagctatctactaaaactatggagaaactttgtatgtgcacacaaaagtattcaagagacagtattgctaacatctcatcttaatgtcttttgttattgagaagttttaggtgcttcaaaacaatataaatggataatagttgttatttggggaattgtaatgatgttggtgctgcttccttctaagagctcagacaagtaaagtatgaaacattcttatttcagttagatggggaacattttgctagcccattagaagcacacagaattatccttgtcctcctaatattgactttcaggaataaagttcagtgtgctgatcattcacaatacagtggatagcttgatatcttctgttttcccattgcagttgatttgagaagatgaaggtttaaatattgttgaaagttgcagttttttaaatgtgttcctttttcttctgtgaatatttagggcaatcgtgtcgctaatagaatatgtagtagagggggtggggaggtaaattcctctgacttgccaaagaaaaagaagggaaccacagtggatatgctagcattttagctgtgcaaagggaggtagtgtgggaaaagtgtttccattctgggaaaagcccaaaccgaatacggtcagcagtcaactccagggtttgggcttgattcctgttgaataatagttttgagcattctttgtggttaaataaattcttaaatctgcctagttttgatgaattcttttgtgaaacttgaaagagaatagacagtatgacatatagaattaatacaaaacagtttaacaaccatttaactgcagtgtaagaaaattggactgtaatcatatcgctactggcatctgttatctagtatgcatttctggtgtgtatctgaaaggaagacattttctaccctagatccaattgcatttatttatcaataagtgccattaaattgaaattatattacattttacactttctcaatgaatgaacaaattagtctgtagaatctagccacctgtttagcctagtcatgtgccttgaacatatatgtgtcccataatctggctcatggtacctgttcttctatccaaacctttcaattcatgctacctgattcatttatttgacatagatcttaggcccacttgaactcttttcttgtttatctagcatagcacaaacgtttttccagtcttctttatcaacactaatgcctcttaattgcatcagtatttcctattggaaaatacatctgttccagaaaaacatttggcattcctgaataatttccaaatgtttttaatccaaagaaaaaggtttaaagcttatttccctttcttatacacacctgaataaaattgatgtgcatgttttagggatcaattacctaactgttccttggtctatttatgtataagaatgctttttaaagcacatgtctcattttaaatgacgcacaaactgaagatgttaataaaatttaagagtaatacaatgaaaaaattg

SEQ ID NO: 428814 - DNA, 2592 bp, Homo sapiens
actcccaagaggccacgcgtagacggggcgcttcatgcggaagtcagcggcgtccggtcccagcctcctctgggagcgggcagttggcgaccctgcactgacccgcgtccctccgtcccgagcccgcgcgccctcagagggtgcccggacagactgaagccatggcgattctttttgctgttgttgccagggggaccactatccttgccaaacatgcttggtgtggaggaaacttcctggaggtgacagagcagattctggctaagataccttctgaaaataacaaactaacgtactcacatggcaagattttgaacgttcccgagcctttaattttctgaatgagataaagaagaggttccagactacttacggttcaagagcacagacagcacttccatatgccatgaatagcgagttctcaagtgtcttagctgcacagctgaagcatcactctgagaataagggcctagacaaagtgatggagactcaagcccaagtggatgaactgaaaggaatcatggtcagaaacatagatctggtagctcagcgaggagaaagattggaattattgattgacaaaacagaaaatcttgtggattcttctgtcaccttcaaaactaccagcagaaatcttgctcgagccatgtgtatgaagaacctcaagctcactattatcatcatcatcgtatcaattgtgttcatctatatcattgtttcacctctctgtggtggatttacatggccaagctgtgtgaagaaataggaaagaagaagttaccattaaccaaggatatgagagaacaaggagttaaaagcaatccatgtgactcaagcctttcacatactgacagatggtatctgccagtctcttcaaccctcttctcactttttaaaatcttgttccatgcctccaggtttatctttgtcttatctaccagtttattcctgtgaacttcagattgaaccattcattgcagcagtagccttaaaaaggcttttgtttatttctttggtttgttaactagtgtcatctatttagagaaacatttttgtttttaattgctcaaagctgtcgccgctagtcttatgagctatctactaaaactatggagaaactttgtatgtgcacacaaaagtattcaagagacagtattgctaacatctcatcttaatgtcttttgttattgagaagttttaggtgcttcaaaacaatataaatggataatagttgttatttggggaattgtaatgatgttggtgctgcttccttctaagagctcagacaagtaaagtatgaaacattcttatttcagttagatggggaacattttgctagcccattagaagcacacagaattatccttgtcctcctaatattgactttcaggaataaagttcagtgtgctgatcattcacaatacagtggatagcttgatatcttctgttttcccattgcagttgatttgagaagatgaaggtttaaatattgttgaaagttgcagttttttaaatgtgttcctttttcttctgtgaatatttagggcaatcgtgtcgctaatagaatatgtagtagagggggtggggaggtaaattcctctgacttgccaaagaaaaagaagggaaccacagtggatatgctagcattttagctgtgcaaagggaggtagtgtgggaaaagtgtttccattctgggaaaagcccaaaccgaatacggtcagcagtcaactccagggtttgggcttgattcctgttgaataatagttttgagcattctttgtggttaaataaattcttaaatctgcctagttttgatgaattcttttgtgaaacttgaaagagaatagacagtatgacatatagaattaatacaaaacagtttaacaaccatttaactgcagtgtaagaaaattggactgtaatcatatcgctactggcatctgttatctagtatgcatttctggtgtgtatctgaaaggaagacattttctaccctagatccaattgcatttatttatcaataagtgccattaaattgaaattatattacattttacactttctcaatgaatgaacaaattagtctgtagaatctagccacctgtttagcctagtcatgtgccttgaacatatatgtgtcccataatctggctcatggtacctgttcttctatccaaacctttcaattcatgctacctgattcatttatttgacatagatcttaggcccacttgaactcttttcttgtttatctagcatagcacaaacgtttttccagtcttctttatcaacactaatgcctcttaattgcatcagtatttcctattggaaaatacatctgttccagaaaaacatttggcattcctgaataatttccaaatgtttttaatccaaagaaaaaggtttaaagcttatttccctttcttatacacacctgaataaaattgatgtgcatgttttagggatcaattacctaactgttccttggtctatttatgtataagaatgctttttaaagcacatgtctcattttaaatgacgcacaaactgaagatgttaataaaatttaagagtaatacaatgaaaaaattg

SEQ ID NO: 428815 - DNA, 2606 bp, Homo sapiens
tgcggcgtcaggtcctgttcaactcttgtttcaggcagtgggcgaccctaggaggaccttcgcccctcagtcaatagctggagtgcccgccagacggtactcggtcagactgaagccatggcgattctttttgctgttgttgccagggggaccactatccttgccaaacatgcttggtgtggaggaaacttcctggaggtgacagagcagattctggctaagataccttctgaaaataacaaactaacgtactcacatggcaattatttgtttcattacatctgccaagacaggattgtatatctttgtatcactgatgatgattttgaacgttcccgagcctttaattttctgaatgagataaagaagaggttccagactacttacggttcaagagcacagacagcacttccatatgccatgaatagcgagttctcaagtgtcttagctgcacagctgaagcatcactctgagaataagggcctagacaaagtgatggagactcaagcccaagtggatgaactgaaaggaatcatggtcagaaacatagatctggtagctcagcgaggagaaagattggaattattgattgacaaaacagaaaatcttgtggattcttctgtcaccttcaaaactaccagcagaaatcttgctcgagccatgtgtatgaagaacctcaagctcactattatcatcatcatcgtatcaattgtgttcatctatatcattgtttcacctctctgtggtggatttacatggccaagctgtgtgaagaaataggaaagaagaagttaccattaaccaaggatatgagagaacaaggagttaaaagcaatccatgtgactcaagcctttcacatactgacagatggtatctgccagtctcttcaaccctcttctcactttttaaaatcttgttccatgcctccaggtttatctttgtcttatctaccagtttattcctgtgaacttcagattgaaccattcattgcagcagtagccttaaaaaggcttttgtttatttctttggtttgttaactagtgtcatctatttagagaaacatttttgtttttaattgctcaaagctgtcgccgctagtcttatgagctatctactaaaactatggagaaactttgtatgtgcacacaaaagtattcaagagacagtattgctaacatctcatcttaatgtcttttgttattgagaagttttaggtgcttcaaaacaatataaatggataatagttgttatttggggaattgtaatgatgttggtgctgcttccttctaagagctcagacaagtaaagtatgaaacattcttatttcagttagatggggaacattttgctagcccattagaagcacacagaattatccttgtcctcctaatattgactttcaggaataaagttcagtgtgctgatcattcacaatacagtggatagcttgatatcttctgttttcccattgcagttgatttgagaagatgaaggtttaaatattgttgaaagttgcagttttttaaatgtgttcctttttcttctgtgaatatttagggcaatcgtgtcgctaatagaatatgtagtagagggggtggggaggtaaattcctctgacttgccaaagaaaaagaagggaaccacagtggatatgctagcattttagctgtgcaaagggaggtagtgtgggaaaagtgtttccattctgggaaaagcccaaaccgaatacggtcagcagtcaactccagggtttgggcttgattcctgttgaataatagttttgagcattctttgtggttaaataaattcttaaatctgcctagttttgatgaattcttttgtgaaacttgaaagagaatagacagtatgacatatagaattaatacaaaacagtttaacaaccatttaactgcagtgtaagaaaattggactgtaatcatatcgctactggcatctgttatctagtatgcatttctggtgtgtatctgaaaggaagacattttctaccctagatccaattgcatttatttatcaataagtgccattaaattgaaattatattacattttacactttctcaatgaatgaacaaattagtctgtagaatctagccacctgtttagcctagtcatgtgccttgaacatatatgtgtcccataatctggctcatggtacctgttcttctatccaaacctttcaattcatgctacctgattcatttatttgacatagatcttaggcccacttgaactcttttcttgtttatctagcatagcacaaacgtttttccagtcttctttatcaacactaatgcctcttaattgcatcagtatttcctattggaaaatacatctgttccagaaaaacatttggcattcctgaataatttccaaatgtttttaatccaaagaaaaaggtttaaagcttatttccctttcttatacacacctgaataaaattgatgtgcatgttttagggatcaattacctaactgttccttggtctatttatgtataagaatgctttttaaagcacatgtctcattttaaatgacgcacaaactgaagatgttaataaaatttaagagtaatacaatgaaaaaattg

SEQ ID NO: 428816 - DNA, 2527 bp, Homo sapiens
actcccaagaggccacgcgtagacggggcgcttcatgcggaagtcagcggcgtccggtcccagcctcctctgggagcgggcagttggcgaccctgcactgacccgcgtccctccgtcccgagcccgcgcgccctcagagggtgcccggacagactgaagccatggcgattctttttgctgttgttgccagggggaccactatccttgccaaacatgcttggtgtggaggaaacttcctggaggattttgaacgttcccgagcctttaattttctgaatgagataaagaagaggttccagactacttacggttcaagagcacagacagcacttccatatgccatgaatagcgagttctcaagtgtcttagctgcacagctgaagcatcactctgagaataagggcctagacaaagtgatggagactcaagcccaagtggatgaactgaaaggaatcatggtcagaaacatagatctggtagctcagcgaggagaaagattggaattattgattgacaaaacagaaaatcttgtggattcttctgtcaccttcaaaactaccagcagaaatcttgctcgagccatgtgtatgaagaacctcaagctcactattatcatcatcatcgtatcaattgtgttcatctatatcattgtttcacctctctgtggtggatttacatggccaagctgtgtgaagaaataggaaagaagaagttaccattaaccaaggatatgagagaacaaggagttaaaagcaatccatgtgactcaagcctttcacatactgacagatggtatctgccagtctcttcaaccctcttctcactttttaaaatcttgttccatgcctccaggtttatctttgtcttatctaccagtttattcctgtgaacttcagattgaaccattcattgcagcagtagccttaaaaaggcttttgtttatttctttggtttgttaactagtgtcatctatttagagaaacatttttgtttttaattgctcaaagctgtcgccgctagtcttatgagctatctactaaaactatggagaaactttgtatgtgcacacaaaagtattcaagagacagtattgctaacatctcatcttaatgtcttttgttattgagaagttttaggtgcttcaaaacaatataaatggataatagttgttatttggggaattgtaatgatgttggtgctgcttccttctaagagctcagacaagtaaagtatgaaacattcttatttcagttagatggggaacattttgctagcccattagaagcacacagaattatccttgtcctcctaatattgactttcaggaataaagttcagtgtgctgatcattcacaatacagtggatagcttgatatcttctgttttcccattgcagttgatttgagaagatgaaggtttaaatattgttgaaagttgcagttttttaaatgtgttcctttttcttctgtgaatatttagggcaatcgtgtcgctaatagaatatgtagtagagggggtggggaggtaaattcctctgacttgccaaagaaaaagaagggaaccacagtggatatgctagcattttagctgtgcaaagggaggtagtgtgggaaaagtgtttccattctgggaaaagcccaaaccgaatacggtcagcagtcaactccagggtttgggcttgattcctgttgaataatagttttgagcattctttgtggttaaataaattcttaaatctgcctagttttgatgaattcttttgtgaaacttgaaagagaatagacagtatgacatatagaattaatacaaaacagtttaacaaccatttaactgcagtgtaagaaaattggactgtaatcatatcgctactggcatctgttatctagtatgcatttctggtgtgtatctgaaaggaagacattttctaccctagatccaattgcatttatttatcaataagtgccattaaattgaaattatattacattttacactttctcaatgaatgaacaaattagtctgtagaatctagccacctgtttagcctagtcatgtgccttgaacatatatgtgtcccataatctggctcatggtacctgttcttctatccaaacctttcaattcatgctacctgattcatttatttgacatagatcttaggcccacttgaactcttttcttgtttatctagcatagcacaaacgtttttccagtcttctttatcaacactaatgcctcttaattgcatcagtatttcctattggaaaatacatctgttccagaaaaacatttggcattcctgaataatttccaaatgtttttaatccaaagaaaaaggtttaaagcttatttccctttcttatacacacctgaataaaattgatgtgcatgttttagggatcaattacctaactgttccttggtctatttatgtataagaatgctttttaaagcacatgtctcattttaaatgacgcacaaactgaagatgttaataaaatttaagagtaatacaatgaaaaaattg

SEQ ID NO: 428817 - DNA, 2671 bp, Homo sapiens
actcccaagaggccacgcgtagacggggcgcttcatgcggaagtcagcggcgtccggtcccagcctcctctgggagcgggcagttggcgaccctgcactgacccgcgtccctccgtcccgagcccgcgcgccctcagagggtgcccggacagactgaagccatggcgattctttttgctgttgttgccagggggaccactatccttgccaaacatgcttggtgtggaggaaacttcctggaggtgacagagcagattctggctaagataccttctgaaaataacaaactaacgtactcacatggcaagtgagttctgttctgcatgtgttatttgtttcattacatctgccaagacaggattgtatatctttgtatcactgatgatgattttgaacgttcccgagcctttaattttctgaatgagataaagaagaggttccagactacttacggttcaagagcacagacagcacttccatatgccatgaatagcgagttctcaagtgtcttagctgcacagctgaagcatcactctgagaataagggcctagacaaagtgatggagactcaagcccaagtggatgaactgaaaggaatcatggtcagaaacatagatctggtagctcagcgaggagaaagattggaattattgattgacaaaacagaaaatcttgtggattcttctgtcaccttcaaaactaccagcagaaatcttgctcgagccatgtgtatgaagaacctcaagctcactattatcatcatcatcgtatcaattgtgttcatctatatcattgtttcacctctctgtggtggatttacatggccaagctgtgtgaagaaataggaaagaagaagttaccattaaccaaggatatgagagaacaaggagttaaaagcaatccatgtgactcaagcctttcacatactgacagatggtatctgccagtctcttcaaccctcttctcactttttaaaatcttgttccatgcctccaggtttatctttgtcttatctaccagtttattcctgtgaacttcagattgaaccattcattgcagcagtagccttaaaaaggcttttgtttatttctttggtttgttaactagtgtcatctatttagagaaacatttttgtttttaattgctcaaagctgtcgccgctagtcttatgagctatctactaaaactatggagaaactttgtatgtgcacacaaaagtattcaagagacagtattgctaacatctcatcttaatgtcttttgttattgagaagttttaggtgcttcaaaacaatataaatggataatagttgttatttggggaattgtaatgatgttggtgctgcttccttctaagagctcagacaagtaaagtatgaaacattcttatttcagttagatggggaacattttgctagcccattagaagcacacagaattatccttgtcctcctaatattgactttcaggaataaagttcagtgtgctgatcattcacaatacagtggatagcttgatatcttctgttttcccattgcagttgatttgagaagatgaaggtttaaatattgttgaaagttgcagttttttaaatgtgttcctttttcttctgtgaatatttagggcaatcgtgtcgctaatagaatatgtagtagagggggtggggaggtaaattcctctgacttgccaaagaaaaagaagggaaccacagtggatatgctagcattttagctgtgcaaagggaggtagtgtgggaaaagtgtttccattctgggaaaagcccaaaccgaatacggtcagcagtcaactccagggtttgggcttgattcctgttgaataatagttttgagcattctttgtggttaaataaattcttaaatctgcctagttttgatgaattcttttgtgaaacttgaaagagaatagacagtatgacatatagaattaatacaaaacagtttaacaaccatttaactgcagtgtaagaaaattggactgtaatcatatcgctactggcatctgttatctagtatgcatttctggtgtgtatctgaaaggaagacattttctaccctagatccaattgcatttatttatcaataagtgccattaaattgaaattatattacattttacactttctcaatgaatgaacaaattagtctgtagaatctagccacctgtttagcctagtcatgtgccttgaacatatatgtgtcccataatctggctcatggtacctgttcttctatccaaacctttcaattcatgctacctgattcatttatttgacatagatcttaggcccacttgaactcttttcttgtttatctagcatagcacaaacgtttttccagtcttctttatcaacactaatgcctcttaattgcatcagtatttcctattggaaaatacatctgttccagaaaaacatttggcattcctgaataatttccaaatgtttttaatccaaagaaaaaggtttaaagcttatttccctttcttatacacacctgaataaaattgatgtgcatgttttagggatcaattacctaactgttccttggtctatttatgtataagaatgctttttaaagcacatgtctcattttaaatgacgcacaaactgaagatgttaataaaatttaagagtaatacaatgaaaaaattg

SEQ ID NO: 428818 - DNA, 814 bp, Homo sapiens
tccaagccaaggaacaccaaggattgcctagttttgatgaattcttttgtgaaacttgaaagagaatagacagtatgacatatagaattaatacaaaacagtttaacaaccatttaactgcagtgtaagaaaattggactgtaatcatatcgctactggcatctgttatctagtatgcatttctggtgtgtatctgaaaggaagacattttctaccctagatccaattgcatttatttatcaataagtgccattaaattgaaattatattacattttacactttctcaatgaatgaacaaattagtctgtagaatctagccacctgtttagcctagtcatgtgccttgaacatatatgtgtcccataatctggctcatggtacctgttcttctatccaaacctttcaattcatgctacctgattcatttatttgacatagatcttaggcccacttgaactcttttcttgtttatctagcatagcacaaacgtttttccagtcttctttatcaacactaatgcctcttaattgcatcagtatttcctattggaaaatacatctgttccagaaaaacatttggcattcctgaataatttccaaatgtttttaatccaaagaaaaaggtttaaagcttatttccctttcttatacacacctgaataaaattgatgtgcatgttttagggatcaattacctaactgttccttggtctatttatgtataagaatgctttttaaagcacatgtctcattttaaatgacgcacaaactgaagatgttaataaaatttaagagtaatacaatgaaaaaattg

SEQ ID NO: 428819 - DNA, 441 bp, Homo sapiens
actcccaagaggccacgcgtagacggggcgcttcatgcggaagtcagcggcgtccggtcccagcctcctctgggagcgggcagttggcgaccctgcactgacccgcgtccctccgtcccgagcccgcgcgccctcagagggtgcccggacaggtaaatggagtggggtgcgcctgcgggaggcggggagagaactgcggagggagggcggaggtgtcgatggaaaggtgctggggtggagcgaggaggcagtgcaggggtgacttgggcttctctggtgtcgacagttccagttgtcgggcaggaccagttttggcgaggtgcgtcttatgccactggaaaggcctcgagttaaagagtgtcagaatgcgtcacttaagctgtcattacaggagggaaaaaatgttaactttctctcagtttgtattctacaagacctttc

SEQ ID NO: 428820 - DNA, 4959 bp, Homo sapiens
cggcgctgcagccatggcgggcggcgtgcggctgctctgggtgtcgctattggtgctgctggcgcagctagggccgcagcctggactgggccggctcggagagcgtctccgcgtgcgcttcaccccggtcgtgtgcggcctgcgctgcgtccatgggccgaccggctcccgctgtaccccgacctgcgcgccccgcaacgccaccagcgtggacagcggcgctcccggcggggcggccccggggggacccggcttccgcgccttcctgtgtcccttgatctgtcacaatggcggtgtgtgcgtgaagcctgaccgctgcctctgtcccccggacttcgctggcaagttctgccagttgcactcctcgggcgcccggcccccggccccggctgtaccaggcctcacccgctccgtgtacactatgccactggccaaccaccgcgacgacgagcacggcgtggcatctatggtgagcgtccacgtggagcacccgcaggaggcgtcggtggtggtgcaccaggtggagcgtgtgtctggcccttgggaggaggcggacgctgaggcggtggcgcgggcggaagcggcggcgcgggcggaggcggcagcgccctacacggtgttggcacagagcgcgccgcgggaggacggctactcagatgcctcgggcttcggttactgctttcgggagctgcgcggaggcgaatgcgcgtccccgctgcccgggctccggacgcaggaggtctgctgccgaggggccggcttggcctggggcgttcacgactgtcagctgtgctccgagcgcctggggaactccgaaagagtgagcgccccagatggaccttgtccaaccggctttgaaagagttaatgggtcctgcgaagatgtggatgagtgcgcgactggcgggcgctgccagcacggcgagtgtgcaaacacgcgcggcgggtacacgtgtgtgtgccccgacggctttctgctcgactcgtcccgcagcagctgcatctcccaacacgtgatctcagaggccaaagggccctgcttccgcgtgctccgcgacggcggctgttcgctgcccattctgcggaacatcactaaacagatctgctgctgcagccgcgtaggcaaggcctggggccggggctgccagctctgcccacccttcggctcagagggtttccgggagatctgcccggctggtcctggttaccactactcggcctccgacctccgctacaacaccagacccctgggccaggagccaccccgagtgtcactcagccagcctcgtaccctgccagccacctctcggccatctgcaggctttctgcccacccatcgcctggagccccggcctgaaccccggcccgatccccggcccggccctgagcttcccttgcccagcatccctgcctggactggtcctgagattcctgaatcaggtccctcctccggcatgtgtcagcgcaacccccaggtctgcggcccaggacgctgcatttcccggcccagcggctacacctgcgcttgcgactctggcttccggctcagcccccagggcacccgatgcattgatgtggacgaatgtcgccgcgtgcccccgccctgtgctcccgggcgctgcgagaactcaccaggcagcttccgctgcgtgtgcggcccgggcttccgagccggcccacgggctgcggaatgcctggatgtggacgagtgccaccgcgtgccgccgccgtgtgacctcgggcgctgcgagaacacgccaggcagcttcctgtgcgtgtgccccgccgggtaccaggctgcaccgcacggagccagctgccaggatgtggatgaatgcacccagagcccaggcctgtgtggccgaggggcctgcaagaacctgcctggctctttccgctgtgtttgcccggctggcttccggggctcggcgtgtgaagaggatgtggatgagtgtgcccaggagccgccgccctgtgggcccggccgctgtgacaacacggcaggctcctttcactgtgcctgccctgctggcttccgctcccgagggcccggggccccctgccaagatgtggatgagtgtgcccgaagccccccaccctgcacctacggccggtgtgagaacacagaaggcagcttccagtgtgtctgccccatgggcttccaacccaacactgctggctccgagtgcgaggatgtggatgagtgtgagaaccacctcgcatgccctgggcaggagtgtgtgaactcgcccggctccttccagtgcaggacctgtccttctggccaccacctgcaccgtggcagatgcactgatgtggacgaatgcagttcgggtgcccctccctgtggtccccacggccactgcactaacaccgaaggctccttccgctgcagctgcgcgccaggctaccgggcgccgtcgggtcggcccgggccctgcgcagacgtgaacgagtgcctggagggcgatttctgcttccctcacggcgagtgcctcaacactgacggctcctttgcctgtacttgtgcccctggctaccgacccggaccccgcggagcctcttgcctcgacgttgacgagtgcagcgaggaggacctttgccagagcggcatctgtaccaacaccgacggctccttcgagtgcatctgtcctccgggacaccgcgctggcccggacctcgcctcctgcctcgacgtggacgaatgtcgcgagcgaggcccagccctgtgcgggtcgcagcgctgtgagaactctcccggctcctaccgctgtgtccgggactgcgatcctgggtaccacgcgggccccgagggcacctgtgacgatgtggatgagtgccaagaatatggtcccgagatttgtggagcccagcgttgtgagaacacccctggctcctaccgctgcacaccagcctgtgaccctggctatcagcccacgccagggggcggatgccaggatgtggacgaatgccggaaccggtccttctgcggtgcccacgccgtgtgccagaacctgcccggctccttccagtgcctctgtgaccagggttacgagggggcacgggatgggcgtcactgcgtggatgtgaacgagtgtgaaacactacagggtgtatgtggagctgccctgtgtgaaaatgtcgaaggctccttcctctgtgtctgccccaacagcccggaagagtttgaccccatgactggacgctgtgttcccccacgaacttctgctggcacgttcccaggctcgcagccccaggcacctgctagccccgttctgcccgccaggccacctccgccacccctgccccgccgacccagcacacctaggcagggccctgtggggagtgggcgccgggagtgctactttgacacagcggccccggatgcatgtgacaacatcctggctcggaatgtgacatggcaggagtgctgctgtactgtgggtgagggctggggcagcggctgccgcatccagcagtgcccgggcaccgagacagctgagtaccagtcattgtgccctcacggccggggctacctggcgcccagtggagacctgagcctccggagagacgtggacgaatgtcagctcttccgagaccaggtgtgcaagagtggcgtgtgtgtgaacacggccccgggctactcatgctattgcagcaacggctactactaccacacacagcggctggagtgcatcgacaatgacgagtgcgccgatgaggaaccggcctgtgagggcggccgctgtgtcaacactgtgggctcttatcactgtacctgcgagcccccactggtgctggatggctcgcagcgccgctgcgtctccaacgagagccagagcctcgatgacaatctgggagtgtgctggcaggaagtgggggctgacctcgtgtgcagccaccctcggctggaccgtcaggccacctacacagagtgctgctgcctgtatggagaggcctggggcatggactgcgccctctgccctgcgcaggactcagatgacttcgaggccctgtgcaatgtgctacgcccccccgcatatagccccccgcgaccaggtggctttggactcccctacgagtacggcccagacttaggtccaccttaccagggcctcccatatgggcctgagttgtacccaccacctgcgctaccctacgacccctacccaccgccacctgggcccttcgcccgccgggaggctccttatggggcaccccgcttcgacatgccagactttgaggacgatggtggcccctatggcgaatctgaggctcctgcgccacctggcccgggcacccgctggccctatcggtcccgggacacccgccgctccttcccagagcccgaggagcctcctgaaggtggaagctatgctggttccctggctgagccctacgaggagctggaggcggaggagtgcgggatcctggacggctgcaccaacggccgctgcgtgcgcgtccccgaaggcttcacctgccgttgcttcgacggctaccgcctggacatgacccgcatggcctgcgttgacatcaacgagtgtgatgaggccgaggctgcctccccgctgtgcgtcaacgcgcgttgcctcaacacggatggctccttccgctgcatctgccgcccgggattcgcacccacgcaccagccgcaccactgtgcgcccgcacggccccgggcctgagccctggcacccgctggccgcccacccgcgcccgccactcggggcccctgccgcgcatcctgcagcccgcttagtctgatgacgaggaagcccgccagaaagtccagaagaaggaacgacggacgcaaagcggcgccgcctaccatgcctcccccccccaccaccaccccccccaactgtggtcgtccccgcccggcccaccccgcccccatttctccccccttctttcaataaaaatttcaatcataaaaaaccacctataaaaaaaaaaa

SEQ ID NO: 428821 - DNA, 315 bp, Homo sapiens
accgtacctctgatggctgaacaactggactgggccaatgctgatgccagaattggggcggggccacatgacagctaagggcggagcgacttagaaatgaatgataccttgagggagtagggaccccaggagaacctgccaggaatggtggcgcccctgagtgtcctcgttctcctcccagtcctgtgtcccttgatctgtcacaatggcggtgtgtgcgtgaagcctgaccgctgcctcgttgcagccagataacttcgctctgatagaggtggaggatatacctatggttctcccacacgagtgcctcgtggg

SEQ ID NO: 428822 - DNA, 5048 bp, Homo sapiens
gctgtgattggcgggaagttcgcagcccgtggctggactgtggagaaagtgagtcggcctcgggcgggggcgggggcgggggcaggggcggggccggggctagcctgacccgctggacagaccgcccgcccggagcgggactcggcgcccgacacgatgccgaggcctggcaccagcggccgccgccccctcctgctggtgctgttgctgccgctcttcgcagccgccacctccgccgccagccccagccccagccccagccaggtcgtcgaggtcccgggggtccccagccgcccggccagcgttgctgtttgtcgctgctgcccgggccagacgtctaggaggagccgctgcatccgagccttctgcagggtccgaagctgccagcccaaaaagtgtgcaggcccccagcggtgcctgaacccagtgcctgcagtgcccagtcccagccccagcgtgaggaagagacaggtgtccctcaactggcagccactgacgctccaggaggccagagctctactgaagcggcggcggccccgggggccagggggccggggactactgagaaggaggcccccacagcgtgcccccgctggcaaggccccggtcctgtgtcccttgatctgtcacaatggcggtgtgtgcgtgaagcctgaccgctgcctctgtcccccggacttcgctggcaagttctgccagttgcactcctcgggcgcccggcccccggccccggctgtaccaggcctcacccgctccgtgtacactatgccactggccaaccaccgcgacgacgagcacggcgtggcatctatggtgagcgtccacgtggagcacccgcaggaggcgtcggtggtggtgcaccaggtggagcgtgtgtctggcccttgggaggaggcggacgctgaggcggtggcgcgggcggaagcggcggcgcgggcggaggcggcagcgccctacacggtgttggcacagagcgcgccgcgggaggacggctactcagatgcctcgggcttcggttactgctttcgggagctgcgcggaggcgaatgcgcgtccccgctgcccgggctccggacgcaggaggtctgctgccgaggggccggcttggcctggggcgttcacgactgtcagctgtgctccgagcgcctggggaactccgaaagagtgagcgccccagatggaccttgtccaaccggctttgaaagagttaatgggtcctgcgaagatgtggatgagtgcgcgactggcgggcgctgccagcacggcgagtgtgcaaacacgcgcggcgggtacacgtgtgtgtgccccgacggctttctgctcgactcgtcccgcagcagctgcatctcccaacacgtgatctcagaggccaaagggccctgcttccgcgtgctccgcgacggcggctgttcgctgcccattctgcggaacatcactaaacagatctgctgctgcagccgcgtaggcaaggcctggggccggggctgccagctctgcccacccttcggctcagagggtttccgggagatctgcccggctggtcctggttaccactactcggcctccgacctccgctacaacaccagacccctgggccaggagccaccccgagtgtcactcagccagcctcgtaccctgccagccacctctcggccatctgcaggctttctgcccacccatcgcctggagccccggcctgaaccccggcccgatccccggcccggccctgagcttcccttgcccagcatccctgcctggactggtcctgagattcctgaatcaggtccctcctccggcatgtgtcagcgcaacccccaggtctgcggcccaggacgctgcatttcccggcccagcggctacacctgcgcttgcgactctggcttccggctcagcccccagggcacccgatgcattgatgtggacgaatgtcgccgcgtgcccccgccctgtgctcccgggcgctgcgagaactcaccaggcagcttccgctgcgtgtgcggcccgggcttccgagccggcccacgggctgcggaatgcctggatgtggacgagtgccaccgcgtgccgccgccgtgtgacctcgggcgctgcgagaacacgccaggcagcttcctgtgcgtgtgccccgccgggtaccaggctgcaccgcacggagccagctgccaggatgtggatgaatgcacccagagcccaggcctgtgtggccgaggggcctgcaagaacctgcctggctctttccgctgtgtttgcccggctggcttccggggctcggcgtgtgaagaggatgtggatgagtgtgcccaggagccgccgccctgtgggcccggccgctgtgacaacacggcaggctcctttcactgtgcctgccctgctggcttccgctcccgagggcccggggccccctgccaagatgtggatgagtgtgcccgaagccccccaccctgcacctacggccggtgtgagaacacagaaggcagcttccagtgtgtctgccccatgggcttccaacccaacactgctggctccgagtgcgaggatgtggatgagtgtgagaaccacctcgcatgccctgggcaggagtgtgtgaactcgcccggctccttccagtgcaggacctgtccttctggccaccacctgcaccgtggcagatgcactgatgtggacgaatgcagttcgggtgcccctccctgtggtccccacggccactgcactaacaccgaaggctccttccgctgcagctgcgcgccaggctaccgggcgccgtcgggtcggcccgggccctgcgcagacgtgaacgagtgcctggagggcgatttctgcttccctcacggcgagtgcctcaacactgacggctcctttgcctgtacttgtgcccctggctaccgacccggaccccgcggagcctcttgcctcgacgttgacgagtgcagcgaggaggacctttgccagagcggcatctgtaccaacaccgacggctccttcgagtgcatctgtcctccgggacaccgcgctggcccggacctcgcctcctgcctcgacgtggacgaatgtcgcgagcgaggcccagccctgtgcgggtcgcagcgctgtgagaactctcccggctcctaccgctgtgtccgggactgcgatcctgggtaccacgcgggccccgagggcacctgtgacgatgtgaacgagtgtgaaacactacagggtgtatgtggagctgccctgtgtgaaaatgtcgaaggctccttcctctgtgtctgccccaacagcccggaagagtttgaccccatgactggacgctgtgttcccccacgaacttctgctggcacgttcccaggctcgcagccccaggcacctgctagccccgttctgcccgccaggccacctccgccacccctgccccgccgacccagcacacctaggcagggccctgtggggagtgggcgccgggagtgctactttgacacagcggccccggatgcatgtgacaacatcctggctcggaatgtgacatggcaggagtgctgctgtactgtgggtgagggctggggcagcggctgccgcatccagcagtgcccgggcaccgagacagctgagtaccagtcattgtgccctcacggccggggctacctggcgcccagtggagacctgagcctccggagagacgtggacgaatgtcagctcttccgagaccaggtgtgcaagagtggcgtgtgtgtgaacacggccccgggctactcatgctattgcagcaacggctactactaccacacacagcggctggagtgcatcgacaatgacgagtgcgccgatgaggaaccggcctgtgagggcggccgctgtgtcaacactgtgggctcttatcactgtacctgcgagcccccactggtgctggatggctcgcagcgccgctgcgtctccaacgagagccagagcctcgatgacaatctgggagtgtgctggcaggaagtgggggctgacctcgtgtgcagccaccctcggctggaccgtcaggccacctacacagagtgctgctgcctgtatggagaggcctggggcatggactgcgccctctgccctgcgcaggactcagatgacttcgaggccctgtgcaatgtgctacgcccccccgcatatagccccccgcgaccaggtggctttggactcccctacgagtacggcccagacttaggtccaccttaccagggcctcccatatgggcctgagttgtacccaccacctgcgctaccctacgacccctacccaccgccacctgggcccttcgcccgccgggaggctccttatggggcaccccgcttcgacatgccagactttgaggacgatggtggcccctatggcgaatctgaggctcctgcgccacctggcccgggcacccgctggccctatcggtcccgggacacccgccgctccttcccagagcccgaggagcctcctgaaggtggaagctatgctggttccctggctgagccctacgaggagctggaggcggaggagtgcgggatcctggacggctgcaccaacggccgctgcgtgcgcgtccccgaaggcttcacctgccgttgcttcgacggctaccgcctggacatgacccgcatggcctgcgttgacatcaacgagtgtgatgaggccgaggctgcctccccgctgtgcgtcaacgcgcgttgcctcaacacggatggctccttccgctgcatctgccgcccgggattcgcacccacgcaccagccgcaccactgtgcgcccgcacggccccgggcctgagccctggcacccgctggccgcccacccgcgcccgccactcggggcccctgccgcgcatcctgcagcccgcttatgcgtatgtgcacggggccgcccgcctggacctggagaagggacctacggacgcctggaagctgcgacgccctgcactgctcccgcctccaccagcgcctcccactgatgtcgtggtcccgggcctggcccaggggcccctttacatgccctctcccttttataaaattttccattaaaaaccacctattttctaaaaaatg

SEQ ID NO: 428823 - DNA, 5046 bp, Homo sapiens
agtttctgacaaaaaggacctgaaaaatcactgattctagaataggggagtgtcaaggggagttcatacccatgaatctccaccggtaggaatatcttgcatgccaggatgtctggaatgctgagaattataggatacagaaaggaacctggattactaggaaatctagagaatgggagagatcctggactatccgcccttccagagcactggaaggtttgtttgcgttccaagaaatccataatggcaggagattccggattatcagagaatctggaacacaaatgggagacgtaaaagcgttgctgtttgtcgctgctgcccgggccagacgtctaggaggagccgctgcatccgagccttctgcagggtccgaagctgccagcccaaaaagtgtgcaggcccccagcggtgcctgaacccagtgcctgcagtgcccagtcccagccccagcgtgaggaagagacaggtgtccctcaactggcagccactgacgctccaggaggccagagctctactgaagcggcggcggccccgggggccagggggccggggactactgagaaggaggcccccacagcgtgcccccgctggcaaggccccggtcctgtgtcccttgatctgtcacaatggcggtgtgtgcgtgaagcctgaccgctgcctctgtcccccggacttcgctggcaagttctgccagttgcactcctcgggcgcccggcccccggccccggctgtaccaggcctcacccgctccgtgtacactatgccactggccaaccaccgcgacgacgagcacggcgtggcatctatggtgagcgtccacgtggagcacccgcaggaggcgtcggtggtggtgcaccaggtggagcgtgtgtctggcccttgggaggaggcggacgctgaggcggtggcgcgggcggaagcggcggcgcgggcggaggcggcagcgccctacacggtgttggcacagagcgcgccgcgggaggacggctactcagatgcctcgggcttcggttactgctttcgggagctgcgcggaggcgaatgcgcgtccccgctgcccgggctccggacgcaggaggtctgctgccgaggggccggcttggcctggggcgttcacgactgtcagctgtgctccgagcgcctggggaactccgaaagagtgagcgccccagatggaccttgtccaaccggctttgaaagagttaatgggtcctgcgaagatgtggatgagtgcgcgactggcgggcgctgccagcacggcgagtgtgcaaacacgcgcggcgggtacacgtgtgtgtgccccgacggctttctgctcgactcgtcccgcagcagctgcatctcccaacacgtgatctcagaggccaaagggccctgcttccgcgtgctccgcgacggcggctgttcgctgcccattctgcggaacatcactaaacagatctgctgctgcagccgcgtaggcaaggcctggggccggggctgccagctctgcccacccttcggctcagagggtttccgggagatctgcccggctggtcctggttaccactactcggcctccgacctccgctacaacaccagacccctgggccaggagccaccccgagtgtcactcagccagcctcgtaccctgccagccacctctcggccatctgcaggctttctgcccacccatcgcctggagccccggcctgaaccccggcccgatccccggcccggccctgagcttcccttgcccagcatccctgcctggactggtcctgagattcctgaatcaggtccctcctccggcatgtgtcagcgcaacccccaggtctgcggcccaggacgctgcatttcccggcccagcggctacacctgcgcttgcgactctggcttccggctcagcccccagggcacccgatgcattgatgtggacgaatgtcgccgcgtgcccccgccctgtgctcccgggcgctgcgagaactcaccaggcagcttccgctgcgtgtgcggcccgggcttccgagccggcccacgggctgcggaatgcctggatgtggacgagtgccaccgcgtgccgccgccgtgtgacctcgggcgctgcgagaacacgccaggcagcttcctgtgcgtgtgccccgccgggtaccaggctgcaccgcacggagccagctgccaggatgtggatgaatgcacccagagcccaggcctgtgtggccgaggggcctgcaagaacctgcctggctctttccgctgtgtttgcccggctggcttccggggctcggcgtgtgaagaggatgtggatgagtgtgcccaggagccgccgccctgtgggcccggccgctgtgacaacacggcaggctcctttcactgtgcctgccctgctggcttccgctcccgagggcccggggccccctgccaagatgtggatgagtgtgcccgaagccccccaccctgcacctacggccggtgtgagaacacagaaggcagcttccagtgtgtctgccccatgggcttccaacccaacactgctggctccgagtgcgaggatgtggatgagtgtgagaaccacctcgcatgccctgggcaggagtgtgtgaactcgcccggctccttccagtgcaggacctgtccttctggccaccacctgcaccgtggcagatgcactgatgtggacgaatgcagttcgggtgcccctccctgtggtccccacggccactgcactaacaccgaaggctccttccgctgcagctgcgcgccaggctaccgggcgccgtcgggtcggcccgggccctgcgcagacgtgaacgagtgcctggagggcgatttctgcttccctcacggcgagtgcctcaacactgacggctcctttgcctgtacttgtgcccctggctaccgacccggaccccgcggagcctcttgcctcgacgttgacgagtgcagcgaggaggacctttgccagagcggcatctgtaccaacaccgacggctccttcgagtgcatctgtcctccgggacaccgcgctggcccggacctcgcctcctgcctcgacgtggacgaatgtcgcgagcgaggcccagccctgtgcgggtcgcagcgctgtgagaactctcccggctcctaccgctgtgtccgggactgcgatcctgggtaccacgcgggccccgagggcacctgtgacgatgtgaacgagtgtgaaacactacagggtgtatgtggagctgccctgtgtgaaaatgtcgaaggctccttcctctgtgtctgccccaacagcccggaagagtttgaccccatgactggacgctgtgttcccccacgaacttctgctggcacgttcccaggctcgcagccccaggcacctgctagccccgttctgcccgccaggccacctccgccacccctgccccgccgacccagcacacctaggcagggccctgtggggagtgggcgccgggagtgctactttgacacagcggccccggatgcatgtgacaacatcctggctcggaatgtgacatggcaggagtgctgctgtactgtgggtgagggctggggcagcggctgccgcatccagcagtgcccgggcaccgagacagctgagtaccagtcattgtgccctcacggccggggctacctggcgcccagtggagacctgagcctccggagagacgtggacgaatgtcagctcttccgagaccaggtgtgcaagagtggcgtgtgtgtgaacacggccccgggctactcatgctattgcagcaacggctactactaccacacacagcggctggagtgcatcgacaatgacgagtgcgccgatgaggaaccggcctgtgagggcggccgctgtgtcaacactgtgggctcttatcactgtacctgcgagcccccactggtgctggatggctcgcagcgccgctgcgtctccaacgagagccagagcctcgatgacaatctgggagtgtgctggcaggaagtgggggctgacctcgtgtgcagccaccctcggctggaccgtcaggccacctacacagagtgctgctgcctgtatggagaggcctggggcatggactgcgccctctgccctgcgcaggactcagatgacttcgaggccctgtgcaatgtgctacgcccccccgcatatagccccccgcgaccaggtggctttggactcccctacgagtacggcccagacttaggtccaccttaccagggcctcccatatgggcctgagttgtacccaccacctgcgctaccctacgacccctacccaccgccacctgggcccttcgcccgccgggaggctccttatggggcaccccgcttcgacatgccagactttgaggacgatggtggcccctatggcgaatctgaggctcctgcgccacctggcccgggcacccgctggccctatcggtcccgggacacccgccgctccttcccagagcccgaggagcctcctgaaggtggaagctatgctggttccctggctgagccctacgaggagctggaggcggaggagtgcgggatcctggacggctgcaccaacggccgctgcgtgcgcgtccccgaaggcttcacctgccgttgcttcgacggctaccgcctggacatgacccgcatggcctgcgttgacatcaacgagtgtgatgaggccgaggctgcctccccgctgtgcgtcaacgcgcgttgcctcaacacggatggctccttccgctgcatctgccgcccgggattcgcacccacgcaccagccgcaccactgtgcgcccgcacggccccgggcctgagccctggcacccgctggccgcccacccgcgcccgccactcggggcccctgccgcgcatcctgcagcccgcttatgcgtatgtgcacggggccgcccgcctggacctggagaagggacctacggacgcctggaagctgcgacgccctgcactgctcccgcctccaccagcgcctcccactgatgtcgtggtcccgggcctggcccaggggcccctttacatgccctctcccttttataaaattttccattaaaaaccacctattttctaaaaaatg

SEQ ID NO: 428824 - DNA, 4635 bp, Homo sapiens
agacattttcctggcatggaggccctttggtggggaggtcagtttaacccggtgacagcagcttttccgtcctctcccacccaggctccaggaggccagagctctactgaagcggcggcggccccgggggccagggggccggggactactgagaaggaggcccccacagcgtgcccccgctggcaaggccccggtcctgtgtcccttgatctgtcacaatggcggtgtgtgcgtgaagcctgaccgctgcctctgtcccccggacttcgctggcaagttctgccagttgcactcctcgggcgcccggcccccggccccggctgtaccaggcctcacccgctccgtgtacactatgccactggccaaccaccgcgacgacgagcacggcgtggcatctatggtgagcgtccacgtggagcacccgcaggaggcgtcggtggtggtgcaccaggtggagcgtgtgtctggcccttgggaggaggcggacgctgaggcggtggcgcgggcggaagcggcggcgcgggcggaggcggcagcgccctacacggtgttggcacagagcgcgccgcgggaggacggctactcagatgcctcgggcttcggttactgctttcgggagctgcgcggaggcgaatgcgcgtccccgctgcccgggctccggacgcaggaggtctgctgccgaggggccggcttggcctggggcgttcacgactgtcagctgtgctccgagcgcctggggaactccgaaagagtgagcgccccagatggaccttgtccaaccggctttgaaagagttaatgggtcctgcgaagatgtggatgagtgcgcgactggcgggcgctgccagcacggcgagtgtgcaaacacgcgcggcgggtacacgtgtgtgtgccccgacggctttctgctcgactcgtcccgcagcagctgcatctcccaacacgtgatctcagaggccaaagggccctgcttccgcgtgctccgcgacggcggctgttcgctgcccattctgcggaacatcactaaacagatctgctgctgcagccgcgtaggcaaggcctggggccggggctgccagctctgcccacccttcggctcagagggtttccgggagatctgcccggctggtcctggttaccactactcggcctccgacctccgctacaacaccagacccctgggccaggagccaccccgagtgtcactcagccagcctcgtaccctgccagccacctctcggccatctgcaggctttctgcccacccatcgcctggagccccggcctgaaccccggcccgatccccggcccggccctgagcttcccttgcccagcatccctgcctggactggtcctgagattcctgaatcaggtccctcctccggcatgtgtcagcgcaacccccaggtctgcggcccaggacgctgcatttcccggcccagcggctacacctgcgcttgcgactctggcttccggctcagcccccagggcacccgatgcattgatgtggacgaatgtcgccgcgtgcccccgccctgtgctcccgggcgctgcgagaactcaccaggcagcttccgctgcgtgtgcggcccgggcttccgagccggcccacgggctgcggaatgcctggatgtggacgagtgccaccgcgtgccgccgccgtgtgacctcgggcgctgcgagaacacgccaggcagcttcctgtgcgtgtgccccgccgggtaccaggctgcaccgcacggagccagctgccaggatgtggatgaatgcacccagagcccaggcctgtgtggccgaggggcctgcaagaacctgcctggctctttccgctgtgtttgcccggctggcttccggggctcggcgtgtgaagaggatgtggatgagtgtgcccaggagccgccgccctgtgggcccggccgctgtgacaacacggcaggctcctttcactgtgcctgccctgctggcttccgctcccgagggcccggggccccctgccaagatgtggatgagtgtgcccgaagccccccaccctgcacctacggccggtgtgagaacacagaaggcagcttccagtgtgtctgccccatgggcttccaacccaacactgctggctccgagtgcgaggatgtggatgagtgtgagaaccacctcgcatgccctgggcaggagtgtgtgaactcgcccggctccttccagtgcaggacctgtccttctggccaccacctgcaccgtggcagatgcactgatgtggacgaatgcagttcgggtgcccctccctgtggtccccacggccactgcactaacaccgaaggctccttccgctgcagctgcgcgccaggctaccgggcgccgtcgggtcggcccgggccctgcgcagacgtgaacgagtgcctggagggcgatttctgcttccctcacggcgagtgcctcaacactgacggctcctttgcctgtacttgtgcccctggctaccgacccggaccccgcggagcctcttgcctcgacgttgacgagtgcagcgaggaggacctttgccagagcggcatctgtaccaacaccgacggctccttcgagtgcatctgtcctccgggacaccgcgctggcccggacctcgcctcctgcctcgacgtggacgaatgtcgcgagcgaggcccagccctgtgcgggtcgcagcgctgtgagaactctcccggctcctaccgctgtgtccgggactgcgatcctgggtaccacgcgggccccgagggcacctgtgacgatgtgaacgagtgtgaaacactacagggtgtatgtggagctgccctgtgtgaaaatgtcgaaggctccttcctctgtgtctgccccaacagcccggaagagtttgaccccatgactggacgctgtgttcccccacgaacttctgctggcacgttcccaggctcgcagccccaggcacctgctagccccgttctgcccgccaggccacctccgccacccctgccccgccgacccagcacacctaggcagggccctgtggggagtgggcgccgggagtgctactttgacacagcggccccggatgcatgtgacaacatcctggctcggaatgtgacatggcaggagtgctgctgtactgtgggtgagggctggggcagcggctgccgcatccagcagtgcccgggcaccgagacagctgagtaccagtcattgtgccctcacggccggggctacctggcgcccagtggagacctgagcctccggagagacgtggacgaatgtcagctcttccgagaccaggtgtgcaagagtggcgtgtgtgtgaacacggccccgggctactcatgctattgcagcaacggctactactaccacacacagcggctggagtgcatcgacaatgacgagtgcgccgatgaggaaccggcctgtgagggcggccgctgtgtcaacactgtgggctcttatcactgtacctgcgagcccccactggtgctggatggctcgcagcgccgctgcgtctccaacgagagccagagcctcgatgacaatctgggagtgtgctggcaggaagtgggggctgacctcgtgtgcagccaccctcggctggaccgtcaggccacctacacagagtgctgctgcctgtatggagaggcctggggcatggactgcgccctctgccctgcgcaggactcagatgacttcgaggccctgtgcaatgtgctacgcccccccgcatatagccccccgcgaccaggtggctttggactcccctacgagtacggcccagacttaggtccaccttaccagggcctcccatatgggcctgagttgtacccaccacctgcgctaccctacgacccctacccaccgccacctgggcccttcgcccgccgggaggctccttatggggcaccccgcttcgacatgccagactttgaggacgatggtggcccctatggcgaatctgaggctcctgcgccacctggcccgggcacccgctggccctatcggtcccgggacacccgccgctccttcccagagcccgaggagcctcctgaaggtggaagctatgctggttccctggctgagccctacgaggagctggaggcggaggagtgcgggatcctggacggctgcaccaacggccgctgcgtgcgcgtccccgaaggcttcacctgccgttgcttcgacggctaccgcctggacatgacccgcatggcctgcgttgacatcaacgagtgtgatgaggccgaggctgcctccccgctgtgcgtcaacgcgcgttgcctcaacacggatggctccttccgctgcatctgccgcccgggattcgcacccacgcaccagccgcaccactgtgcgcccgcacggccccgggcctgagccctggcacccgctggccgcccacccgcgcccgccactcggggcccctgccgcgcatcctgcagcccgcttatgcgtatgtgcacggggccgcccgcctggacctggagaagggacctacggacgcctggaagctgcgacgccctgcactgctcccgcctccaccagcgcctcccactgatgtcgtggtcccgggcctggcccaggggcccctttacatgccctctcccttttataaaattttccattaaaaaccacctattttctaaaaaatg

SEQ ID NO: 428825 - DNA, 5081 bp, Homo sapiens
gctgtgattggcgggaagttcgcagcccgtggctggactgtggagaaagtgagtcggcctcgggcgggggcgggggcgggggcaggggcggggccggggctagcctgacccgctggacagaccgcccgcccggagcgggactcggcgcccgacacgatgccgaggcctggcaccagcggccgccgccccctcctgctggtgctgttgctgccgctcttcgcagccgccacctccgccgccagccccagccccagccccagccaggtcgtcgaggtcccgggggtccccagccgcccggccagcgttgctgtttgtcgctgctgcccgggccagacgtctaggaggagccgctgcatccgagccttctgcagggtccgaagctgccagcccaaaaagtgtgcaggcccccagcggtgcctgaacccagtgcctgcagtgcccagtcccagccccagcgtgaggaagagacaggtgtccctcaactggcagccactgacgctccaggaggccagagctctactgaagcggcggcggccccgggggccagggggccggggactactgagaaggaggcccccacagcgtgcccccgctggcaaggccccggtcctgtgtcccttgatctgtcacaatggcggtgtgtgcgtgaagcctgaccgctgcctctgtcccccggacttcgctggcaagttctgccagttgcactcctcgggcgcccggcccccggccccggctgtaccaggcctcacccgctccgtgtacactatgccactggccaaccaccgcgacgacgagcacggcgtggcatctatggtgagcgtccacgtggagcacccgcaggaggcgtcggtggtggtgcaccaggtggagcgtgtgtctggcccttgggaggaggcggacgctgaggcggtggcgcgggcggaagcggcggcgcgggcggaggcggcagcgccctacacggtgttggcacagagcgcgccgcgggaggacggctactcagatgcctcgggcttcggttactgctttcgggagctgcgcggaggcgaatgcgcgtccccgctgcccgggctccggacgcaggaggtctgctgccgaggggccggcttggcctggggcgttcacgactgtcagctgtgctccgagcgcctggggaactccgaaagagtgagcgccccagatggaccttgtccaaccggctttgaaagagttaatgggtcctgcgaagatgtggatgagtgcgcgactggcgggcgctgccagcacggcgagtgtgcaaacacgcgcggcgggtacacgtgtgtgtgccccgacggctttctgctcgactcgtcccgcagcagctgcatctcccaacacgtgatctcagaggccaaagggccctgcttccgcgtgctccgcgacggcggctgttcgctgcccattctgcggaacatcactaaacagatctgctgctgcagccgcgtaggcaaggcctggggccggggctgccagctctgcccacccttcggctcagagggtttccgggagatctgcccggctggtcctggttaccactactcggcctccgacctccgctacaacaccagacccctgggccaggagccaccccgagtgtcactcagccagcctcgtaccctgccagccacctctcggccatctgcaggctttctgcccacccatcgcctggagccccggcctgaaccccggcccgatccccggcccggccctgagcttcccttgcccagcatccctgcctggactggtcctgagattcctgaatcaggtccctcctccggcatgtgtcagcgcaacccccaggtctgcggcccaggacgctgcatttcccggcccagcggctacacctgcgcttgcgactctggcttccggctcagcccccagggcacccgatgcattgatgtggacgaatgtcgccgcgtgcccccgccctgtgctcccgggcgctgcgagaactcaccaggcagcttccgctgcgtgtgcggcccgggcttccgagccggcccacgggctgcggaatgcctggatgtggacgagtgccaccgcgtgccgccgccgtgtgacctcgggcgctgcgagaacacgccaggcagcttcctgtgcgtgtgccccgccgggtaccaggctgcaccgcacggagccagctgccaggatgtggatgaatgcacccagagcccaggcctgtgtggccgaggggcctgcaagaacctgcctggctctttccgctgtgtttgcccggctggcttccggggctcggcgtgtgaagaggatgtggatgagtgtgcccaggagccgccgccctgtgggcccggccgctgtgacaacacggcaggctcctttcactgtgcctgccctgctggcttccgctcccgagggcccggggccccctgccaagatgtggatgagtgtgcccgaagccccccaccctgcacctacggccggtgtgagaacacagaaggcagcttccagtgtgtctgccccatgggcttccaacccaacactgctggctccgagtgcgaggatgtggatgagtgtgagaaccacctcgcatgccctgggcaggagtgtgtgaactcgcccggctccttccagtgcaggacctgtccttctggccaccacctgcaccgtggcagatgcactgatgtggacgaatgcagttcgggtgcccctccctgtggtccccacggccactgcactaacaccgaaggctccttccgctgcagctgcgcgccaggctaccgggcgccgtcgggtcggcccgggccctgcgcagacgtgaacgagtgcctggagggcgatttctgcttccctcacggcgagtgcctcaacactgacggctcctttgcctgtacttgtgcccctggctaccgacccggaccccgcggagcctcttgcctcgacgttgacgagtgcagcgaggaggacctttgccagagcggcatctgtaccaacaccgacggctccttcgagtgcatctgtcctccgggacaccgcgctggcccggacctcgcctcctgcctcgacgtggacgaatgtcgcgagcgaggcccagccctgtgcgggtcgcagcgctgtgagaactctcccggctcctaccgctgtgtccgggactgcgatcctgggtaccacgcgggccccgagggcacctgtgacgatgtgaacgagtgtgaaacactacagggtgtatgtggagctgccctgtgtgaaaatgtcgaaggctccttcctctgtgtctgccccaacagcccggaagagtttgaccccatgactggacgctgtgttcccccacgaacttctgctggcacgttcccaggctcgcagccccaggcacctgctagccccgttctgcccgccaggccacctccgccacccctgccccgccgacccagcacacctaggcagggccctgtggggagtgggcgccgggagtgctactttgacacagcggccccggatgcatgtgacaacatcctggctcggaatgtgacatggcaggagtgctgctgtactgtgggtgagggctggggcagcggctgccgcatccagcagtgcccgggcaccgagacagctgagtaccagtcattgtgccctcacggccggggctacctggcgcccagtggagacctgagcctccggagagacgtggacgaatgtcagctcttccgagaccaggtgtgcaagagtggcgtgtgtgtgaacacggccccgggctactcatgctattgcagcaacggctactactaccacacacagcggctggagtgcatcgacaatgacgagtgcgccgatgaggaaccggcctgtgagggcggccgctgtgtcaacactgtgggctcttatcactgtacctgcgagcccccactggtgctggatggctcgcagcgccgctgcgtctccaacgagagccagagcctcgatgacaatctgggagtgtgctggcaggaagtgggggctgacctcgtgtgcagccaccctcggctggaccgtcaggccacctacacagagtgctgctgcctgtatggagaggcctggggcatggactgcgccctctgccctgcgcaggactcagatgacttcgaggccctgtgcaatgtgctacgcccccccgcatatagccccccgcgaccaggtggctttggactcccctacgagtacggcccagacttaggtccaccttaccagggcctcccatatgggcctgagttgtacccaccacctgcgctaccctacgacccctacccaccgccacctgggcccttcgcccgccgggaggctccttatggggcaccccgcttcgacatgccagactttgaggacgatggtggcccctatggcgaatctgaggctcctgcgccacctggcccgggcacccgctggccctatcggtcccgggacacccgccgctccttcccagagcccgaggagcctcctgaaggtggaagctatgctggttccctggctgagccctacgaggagctggaggcggaggagtgcgggatcctggacggctgcaccaacggccgctgcgtgcgcgtccccgaaggcttcacctgccgttgcttcgacggctaccgcctggacatgacccgcatggcctgcgttgccttcagcagcgatcgttgtctcccctccgcagacatcaacgagtgtgatgaggccgaggctgcctccccgctgtgcgtcaacgcgcgttgcctcaacacggatggctccttccgctgcatctgccgcccgggattcgcacccacgcaccagccgcaccactgtgcgcccgcacggccccgggcctgagccctggcacccgctggccgcccacccgcgcccgccactcggggcccctgccgcgcatcctgcagcccgcttatgcgtatgtgcacggggccgcccgcctggacctggagaagggacctacggacgcctggaagctgcgacgccctgcactgctcccgcctccaccagcgcctcccactgatgtcgtggtcccgggcctggcccaggggcccctttacatgccctctcccttttataaaattttccattaaaaaccacctattttctaaaaaatg

SEQ ID NO: 428826 - DNA, 5012 bp, Homo sapiens
gctgtgattggcgggaagttcgcagcccgtggctggactgtggagaaagtgagtcggcctcgggcgggggcgggggcgggggcaggggcggggccggggctagcctgacccgctggacagaccgcccgcccggagcgggactcggcgcccgacacgatgccgaggcctggcaccagcggccgccgccccctcctgctggtgctgttgctgccgctcttcgcagccgccacctccgccgccagccccagccccagccccagccaggtcgtcgaggtcccgggggtccccagccgcccggccagcgttgctgtttgtcgctgctgcccgggccagacgtctaggaggagccgctgcatccgagccttctgcagggtccgaagctgccagcccaaaaagtgtgcaggcccccagcggtgcctgaacccagtgcctgcagtgcccagtcccagccccagcgtgaggaagagacaggtgtccctcaactggcagccactgacgctccaggaggccagagctctactgaagcggcggcggccccgggggccagggggccggggactactgagaaggaggcccccacagcgtgcccccgctggcaaggccccggtcctgtgtcccttgatctgtcacaatggcggtgtgtgcgtgaagcctgaccgctgcctctgtcccccggacttcgctggcaagttctgccagttgcactcctcgggcgcccggcccccggccccggctgtaccaggcctcacccgctccgtgtacactatgccactggccaaccaccgcgacgacgagcacggcgtggcatctatggtgagcgtccacgtggagcacccgcaggaggcgtcggtggtggtgcaccaggtggagcgtgtgtctggcccttgggaggaggcggacgctgaggcggtggcgcgggcggaagcggcggcgcgggcggaggcggcagcgccctacacggtgttggcacagagcgcgccgcgggaggacggctactcagatgcctcgggcttcggttactgctttcgggagctgcgcggaggcgaatgcgcgtccccgctgcccgggctccggacgcaggaggtctgctgccgaggggccggcttggcctggggcgttcacgactgtcagctgtgctccgagcgcctggggaactccgaaagagtgagcgccccagatggaccttgtccaaccggctttgaaagagttaatgggtcctgcgaagatgtggatgagtgcgcgactggcgggcgctgccagcacggcgagtgtgcaaacacgcgcggcgggtacacgtgtgtgtgccccgacggctttctgctcgactcgtcccgcagcagctgcatctcccaacacgtgatctcagaggccaaagggccctgcttccgcgtgctccgcgacggcggctgttcgctgcccattctgcggaacatcactaaacagatctgctgctgcagccgcgtaggcaaggcctggggccggggctgccagctctgcccacccttcggctcagagggtttccgggagatctgcccggctggtcctggttaccactactcggcctccgacctccgctacaacaccagacccctgggccaggagccaccccgagtgtcactcagccagcctcgtaccctgccagccacctctcggccatctgcaggctttctgcccacccatcgcctggagccccggcctgaaccccggcccgatccccggcccggccctgagcttcccttgcccagcatccctgcctggactggtcctgagattcctgaatcaggtccctcctccggcatgtgtcagcgcaacccccaggtctgcggcccaggacgctgcatttcccggcccagcggctacacctgcgcttgcgactctggcttccggctcagcccccagggcacccgatgcattgatgtggacgaatgtcgccgcgtgcccccgccctgtgctcccgggcgctgcgagaactcaccaggcagcttccgctgcgtgtgcggcccgggcttccgagccggcccacgggctgcggaatgcctggatgtggacgagtgccaccgcgtgccgccgccgtgtgacctcgggcgctgcgagaacacgccaggcagcttcctgtgcgtgtgccccgccgggtaccaggctgcaccgcacggagccagctgccaggatgtggatgaatgcacccagagcccaggcctgtgtggccgaggggcctgcaagaacctgcctggctctttccgctgtgtttgcccggctggcttccggggctcggcgtgtgaagaggatgtggatgagtgtgcccaggagccgccgccctgtgggcccggccgctgtgacaacacggcaggctcctttcactgtgcctgccctgctggcttccgctcccgagggcccggggccccctgccaagatgtggatgagtgtgcccgaagccccccaccctgcacctacggccggtgtgagaacacagaaggcagcttccagtgtgtctgccccatgggcttccaacccaacactgctggctccgagtgcgaggatgtggatgagtgtgagaaccacctcgcatgccctgggcaggagtgtgtgaactcgcccggctccttccagtgcaggacctgtccttctggccaccacctgcaccgtggcagatgcactgatgtggacgaatgcagttcgggtgcccctccctgtggtccccacggccactgcactaacaccgaaggctccttccgctgcagctgcgcgccaggctaccgggcgccgtcgggtcggcccgggccctgcgcagacgtgaacgagtgcctggagggcgatttctgcttccctcacggcgagtgcctcaacactgacggctcctttgcctgtacttgtgcccctggctaccgacccggaccccgcggagcctcttgcctcgacgttgacgagtgcagcgaggaggacctttgccagagcggcatctgtaccaacaccgacggctccttcgagtgcatctgtcctccgggacaccgcgctggcccggacctcgcctcctgcctcgacgtggacgaatgtcgcgagcgaggcccagccctgtgcgggtcgcagcgctgtgagaactctcccggctcctaccgctgtgtccgggactgcgatcctgggtaccacgcgggccccgagggcacctgtgacgatgtgaacgagtgtgaaacactacagggtgtatgtggagctgccctgtgtgaaaatgtcgaaggctccttcctctgtgtctgccccaacagcccggaagagtttgaccccatgactggacgctgtgttcccccacgaacttctgctggcacgttcccaggctcgcagccccaggcacctgctagccccgttctgcccgccaggccacctccgccacccctgccccgccgacccagcacacctaggcagggccctgtggggagtgggcgccgggagtgctactttgacacagcggccccggatgcatgtgacaacatcctggctcggaatgtgacatggcaggagtgctgctgtactgtgggtgagggctggggcagcggctgccgcatccagcagtgcccgggcaccgagacagctgagtaccagtcattgtgccctcacggccggggctacctggcgcccagtggagacctgagcctccggagagacgtggacgaatgtcagctcttccgagaccaggtgtgcaagagtggcgtgtgtgtgaacacggccccgggctactcatgctattgcagcaacggctactactaccacacacagcggctggagtgcatcgacaatgacgagtgcgccgatgaggaaccggcctgtgagggcggccgctgtgtcaacactgtgggctcttatcactgtacctgcgagcccccactggtgctggatggctcgcagcgccgctgcgtctccaacgagagccagagcctcgatgacaatctgggagtgtgctggcaggaagtgggggctgacctcgtgtgcagccaccctcggctggaccgtcaggccacctacacagagtgctgctgcctgtatggagaggcctggggcatggactgcgccctctgccctgcgcaggactcagatgacttcgaggccctgtgcaatgtgctacgcccccccgcatatagccccccgcgaccaggtggctttggactcccctacgagtacggcccagacttaggtccaccttaccagggcctcccatatgggcctgagttgtacccaccacctgcgctaccctacgacccctacccaccgccacctgggcccttcgcccgccgggaggctccttatggggcaccccgcttcgacatgccagactttgaggacgatggtggcccctatggcgaatctgaggctcctgcgccacctggcccgggcacccgctggccctatcggtcccgggacacccgccgctccttcccagagcccgaggagcctcctgaaggtggaagctatgctggttccctggctgagccctacgaggagctggaggcggaggagtgcgggatcctggacggctgcaccaacggccgctgcgtgcgcgtccccgaaggcttcacctgccgttgcttcgacggctaccgcctggacatgacccgcatggcctgcgttgacatcaacgagtgtgatgaggccgaggctgcctccccgctgtgcgtcaacgcgcgttgcctcaacacggatggctccttccgctgcatctgccgcccgggattcgcacccacgcaccagccgcaccactgtgctggccgcccacccgcgcccgccactcggggcccctgccgcgcatcctgcagcccgcttatgcgtatgtgcacggggccgcccgcctggacctggagaagggacctacggacgcctggaagctgcgacgccctgcactgctcccgcctccaccagcgcctcccactgatgtcgtggtcccgggcctggcccaggggcccctttacatgccctctcccttttataaaattttccattaaaaaccacctattttctaaaaaatg

SEQ ID NO: 428827 - DNA, 5566 bp, Homo sapiens
gctgtgattggcgggaagttcgcagcccgtggctggactgtggagaaagtgagtcggcctcgggcgggggcgggggcgggggcaggggcggggccggggctagcctgacccgctggacagaccgcccgcccggagcgggactcggcgcccgacacgatgccgaggcctggcaccagcggccgccgccccctcctgctggtgctgttgctgccgctcttcgcagccgccacctccgccgccagccccagccccagccccagccaggtcgtcgaggtcccgggggtccccagccgcccggccagcgttgctgtttgtcgctgctgcccgggccagacgtctaggaggagccgctgcatccgagccttctgcagggtccgaagctgccagcccaaaaagtgtgcaggcccccagcggtgcctgaacccagtgcctgcagtgcccagtcccagccccagcgtgaggaagagacaggtgtccctcaactggcagccactgacgctccaggaggccagagctctactgaagcggcggcggccccgggggccagggggccggggactactgagaaggaggcccccacagcgtgcccccgctggcaaggccccggtcctgtgtcccttgatctgtcacaatggcggtgtgtgcgtgaagcctgaccgctgcctctgtcccccggacttcgctggcaagttctgccagttgcactcctcgggcgcccggcccccggccccggctgtaccaggcctcacccgctccgtgtacactatgccactggccaaccaccgcgacgacgagcacggcgtggcatctatggtgagcgtccacgtggagcacccgcaggaggcgtcggtggtggtgcaccaggtggagcgtgtgtctggcccttgggaggaggcggacgctgaggcggtggcgcgggcggaagcggcggcgcgggcggaggcggcagcgccctacacggtgttggcacagagcgcgccgcgggaggacggctactcagatgcctcgggcttcggttactgctttcgggagctgcgcggaggcgaatgcgcgtccccgctgcccgggctccggacgcaggaggtctgctgccgaggggccggcttggcctggggcgttcacgactgtcagctgtgctccgagcgcctggggaactccgaaagagtgagcgccccagatggaccttgtccaaccggctttgaaagagttaatgggtcctgcgaagatgtggatgagtgcgcgactggcgggcgctgccagcacggcgagtgtgcaaacacgcgcggcgggtacacgtgtgtgtgccccgacggctttctgctcgactcgtcccgcagcagctgcatctcccaacacgtgatctcagaggccaaagggccctgcttccgcgtgctccgcgacggcggctgttcgctgcccattctgcggaacatcactaaacagatctgctgctgcagccgcgtaggcaaggcctggggccggggctgccagctctgcccacccttcggctcagagggtttccgggagatctgcccggctggtcctggttaccactactcggcctccgacctccgctacaacaccagacccctgggccaggagccaccccgagtgtcactcagccagcctcgtaccctgccagccacctctcggccatctgcaggctttctgcccacccatcgcctggagccccggcctgaaccccggcccgatccccggcccggccctgagcttcccttgcccagcatccctgcctggactggtcctgagattcctgaatcaggtccctcctccggcatgtgtcagcgcaacccccaggtctgcggcccaggacgctgcatttcccggcccagcggctacacctgcgcttgcgactctggcttccggctcagcccccagggcacccgatgcattgatgtggacgaatgtcgccgcgtgcccccgccctgtgctcccgggcgctgcgagaactcaccaggcagcttccgctgcgtgtgcggcccgggcttccgagccggcccacgggctgcggaatgcctggatgtggacgagtgccaccgcgtgccgccgccgtgtgacctcgggcgctgcgagaacacgccaggcagcttcctgtgcgtgtgccccgccgggtaccaggctgcaccgcacggagccagctgccaggatgtggatgaatgcacccagagcccaggcctgtgtggccgaggggcctgcaagaacctgcctggctctttccgctgtgtttgcccggctggcttccggggctcggcgtgtgaagaggatgtggatgagtgtgcccaggagccgccgccctgtgggcccggccgctgtgacaacacggcaggctcctttcactgtgcctgccctgctggcttccgctcccgagggcccggggccccctgccaagatgtggatgagtgtgcccgaagccccccaccctgcacctacggccggtgtgagaacacagaaggcagcttccagtgtgtctgccccatgggcttccaacccaacactgctggctccgagtgcgaggatgtggatgagtgtgagaaccacctcgcatgccctgggcaggagtgtgtgaactcgcccggctccttccagtgcaggacctgtccttctggccaccacctgcaccgtggcagatgcactgatgtggacgaatgcagttcgggtgcccctccctgtggtccccacggccactgcactaacaccgaaggctccttccgctgcagctgcgcgccaggctaccgggcgccgtcgggtcggcccgggccctgcgcagacgtgaacgagtgcctggagggcgatttctgcttccctcacggcgagtgcctcaacactgacggctcctttgcctgtacttgtgcccctggctaccgacccggaccccgcggagcctcttgcctcggttcgtacccgggctgatcctggccccggaaagggtgggcttagggcaggaaaaggcgggacggggagaagagggcgaaaaggggaaaacgagtttttagccggggtattccagcaggatcagggggcagctggtgggagtctcgaggcagtgagggggggcggggcgtggagatgaaagggccgagtctgggtatttggaccgtgattgtaaagaagctgttctaaacccgtcggggggcggtgtttgcagggagggaagtagcgtgaggcaggttggggaaggcgtgagaggcctaggagagccgaggggcggtggaggggtgtggcctagaatgttaggcggagcgggaggtgggccgggccttcggacgccctgtcccgcagacgttgacgagtgcagcgaggaggacctttgccagagcggcatctgtaccaacaccgacggctccttcgagtgcatctgtcctccgggacaccgcgctggcccggacctcgcctcctgcctcgacgtggacgaatgtcgcgagcgaggcccagccctgtgcgggtcgcagcgctgtgagaactctcccggctcctaccgctgtgtccgggactgcgatcctgggtaccacgcgggccccgagggcacctgtgacgatgtggatgagtgccaagaatatggtcccgagatttgtggagcccagcgttgtgagaacacccctggctcctaccgctgcacaccagcctgtgaccctggctatcagcccacgccagggggcggatgccaggatgtgaacgagtgtgaaacactacagggtgtatgtggagctgccctgtgtgaaaatgtcgaaggctccttcctctgtgtctgccccaacagcccggaagagtttgaccccatgactggacgctgtgttcccccacgaacttctgctggcacgttcccaggctcgcagccccaggcacctgctagccccgttctgcccgccaggccacctccgccacccctgccccgccgacccagcacacctaggcagggccctgtggggagtgggcgccgggagtgctactttgacacagcggccccggatgcatgtgacaacatcctggctcggaatgtgacatggcaggagtgctgctgtactgtgggtgagggctggggcagcggctgccgcatccagcagtgcccgggcaccgagacagctgagtaccagtcattgtgccctcacggccggggctacctggcgcccagtggagacctgagcctccggagagacgtggacgaatgtcagctcttccgagaccaggtgtgcaagagtggcgtgtgtgtgaacacggccccgggctactcatgctattgcagcaacggctactactaccacacacagcggctggagtgcatcgacaatgacgagtgcgccgatgaggaaccggcctgtgagggcggccgctgtgtcaacactgtgggctcttatcactgtacctgcgagcccccactggtgctggatggctcgcagcgccgctgcgtctccaacgagagccagagcctcgatgacaatctgggagtgtgctggcaggaagtgggggctgacctcgtgtgcagccaccctcggctggaccgtcaggccacctacacagagtgctgctgcctgtatggagaggcctggggcatggactgcgccctctgccctgcgcaggactcagatgacttcgaggccctgtgcaatgtgctacgcccccccgcatatagccccccgcgaccaggtggctttggactcccctacgagtacggcccagacttaggtccaccttaccagggcctcccatatgggcctgagttgtacccaccacctgcgctaccctacgacccctacccaccgccacctgggcccttcgcccgccgggaggctccttatggggcaccccgcttcgacatgccagactttgaggacgatggtggcccctatggcgaatctgaggctcctgcgccacctggcccgggcacccgctggccctatcggtcccgggacacccgccgctccttcccagagcccgaggagcctcctgaaggtggaagctatgctggttccctggctgagccctacgaggagctggaggcggaggagtgcgggatcctggacggctgcaccaacggccgctgcgtgcgcgtccccgaaggcttcacctgccgttgcttcgacggctaccgcctggacatgacccgcatggcctgcgttgacatcaacgagtgtgatgaggccgaggctgcctccccgctgtgcgtcaacgcgcgttgcctcaacacggatggctccttccgctgcatctgccgcccgggattcgcacccacgcaccagccgcaccactgtgcgcccgcacggccccgggcctgagccctggcacccgctggccgcccacccgcgcccgccactcggggcccctgccgcgcatcctgcagcccgcttatgcgtatgtgcacggggccgcccgcctggacctggagaagggacctacggacgcctggaagctgcgacgccctgcactgctcccgcctccaccagcgcctcccactgatgtcgtggtcccgggcctggcccaggggcccctttacatgccctctcccttttataaaattttccattaaaaaccacctattttctaaaaaatg

SEQ ID NO: 428828 - DNA, 4910 bp, Homo sapiens
gctgtgattggcgggaagttcgcagcccgtggctggactgtggagaaagtgagtcggcctcgggcgggggcgggggcgggggcaggggcggggccggggctagcctgacccgctggacagaccgcccgcccggagcgggactcggcgcccgacacgatgccgaggcctggcaccagcggccgccgccccctcctgctggtgctgttgctgccgctcttcgcagccgccacctccgccgccagccccagccccagccccagccaggtcgtcgaggtcccgggggtccccagccgcccggccagcgttgctgtttgtcgctgctgcccgggccagacgtctaggaggagccgctgcatccgagccttctgcagggtccgaagctgccagcccaaaaagtgtgcaggcccccagcggtgcctgaacccagtgcctgcagtgcccagtcccagccccagcgtgaggaagagacaggtgtccctcaactggcagccactgacgctccaggaggccagagctctactgaagcggcggcggccccgggggccagggggccggggactactgagaaggaggcccccacagcgtgcccccgctggcaaggccccggtcctgtgtcccttgatctgtcacaatggcggtgtgtgcgtgaagcctgaccgctgcctctgtcccccggacttcgctggcaagttctgccagttgcactcctcgggcgcccggcccccggccccggctgtaccaggcctcacccgctccgtgtacactatgccactggccaaccaccgcgacgacgagcacggcgtggcatctatggtgagcgtccacgtggagcacccgcaggaggcgtcggtggtggtgcaccaggtggagcgtgtgtctggcccttgggaggaggcggacgctgaggcggtggcgcgggcggaagcggcggcgcgggcggaggcggcagcgccctacacggtgttggcacagagcgcgccgcgggaggacggctactcagatgcctcgggcttcggttactgctttcgggagctgcgcggaggcgaatgcgcgtccccgctgcccgggctccggacgcaggaggtctgctgccgaggggccggcttggcctggggcgttcacgactgtcagctgtgctccgagcgcctggggaactccgaaagagtgagcgccccagatggaccttgtccaaccggctttgaaagagttaatgggtcctgcgaagatgtggatgagtgcgcgactggcgggcgctgccagcacggcgagtgtgcaaacacgcgcggcgggtacacgtgtgtgtgccccgacggctttctgctcgactcgtcccgcagcagctgcatctcccaacacgtgatctcagaggccaaagggccctgcttccgcgtgctccgcgacggcggctgttcgctgcccattctgcggaacatcactaaacagatctgctgctgcagccgcgtaggcaaggcctggggccggggctgccagctctgcccacccttcggctcagagggtttccgggagatctgcccggctggtcctggttaccactactcggcctccgacctccgctacaacaccagacccctgggccaggagccaccccgagtgtcactcagccagcctcgtaccctgccagccacctctcggccatctgcaggctttctgcccacccatcgcctggagccccggcctgaaccccggcccgatccccggcccggccctgagcttcccttgcccagcatccctgcctggactggtcctgagattcctgaatcaggtccctcctccggcatgtgtcagcgcaacccccaggtctgcggcccaggacgctgcatttcccggcccagcggctacacctgcgcttgcgactctggcttccggctcagcccccagggcacccgatgcattgatgtggacgaatgtcgccgcgtgcccccgccctgtgctcccgggcgctgcgagaactcaccaggcagcttccgctgcgtgtgcggcccgggcttccgagccggcccacgggctgcggaatgcctggatgtggacgagtgccaccgcgtgccgccgccgtgtgacctcgggcgctgcgagaacacgccaggcagcttcctgtgcgtgtgccccgccgggtaccaggctgcaccgcacggagccagctgccaggatgtggatgaatgcacccagagcccaggcctgtgtggccgaggggcctgcaagaacctgcctggctctttccgctgtgtttgcccggctggcttccggggctcggcgtgtgaagaggatgtggatgagtgtgcccaggagccgccgccctgtgggcccggccgctgtgacaacacggcaggctcctttcactgtgcctgccctgctggcttccgctcccgagggcccggggccccctgccaagatgtggatgagtgtgcccgaagccccccaccctgcacctacggccggtgtgagaacacagaaggcagcttccagtgtgtctgccccatgggcttccaacccaacactgctggctccgagtgcgaggatgtggatgagtgtgagaaccacctcgcatgccctgggcaggagtgtgtgaactcgcccggctccttccagtgcaggacctgtccttctggccaccacctgcaccgtggcagatgcactgatgtggacgaatgcagttcgggtgcccctccctgtggtccccacggccactgcactaacaccgaaggctccttccgctgcagctgcgcgccaggctaccgggcgccgtcgggtcggcccgggccctgcgcagacgtgaacgagtgcctggagggcgatttctgcttccctcacggcgagtgcctcaacactgacggctcctttgcctgtacttgtgcccctggctaccgacccggaccccgcggagcctcttgcctcgacgttgacgagtgcagcgaggaggacctttgccagagcggcatctgtaccaacaccgacggctccttcgagtgcatctgtcctccgggacaccgcgctggcccggacctcgcctcctgcctcgacgtggacgaatgtcgcgagcgaggcccagccctgtgcgggtcgcagcgctgtgagaactctcccggctcctaccgctgtgtccgggactgcgatcctgggtaccacgcgggccccgagggcacctgtgacgatgtgaacgagtgtgaaacactacagggtgtatgtggagctgccctgtgtgaaaatgtcgaaggctccttcctctgtgtctgccccaacagcccggaagagtttgaccccatgactggacgctgtgttcccccacgaacttctgctggcacgttcccaggctcgcagccccaggcacctgctagccccgttctgcccgccaggccacctccgccacccctgccccgccgacccagcacacctaggcagggccctgtggggagtgggcgccgggagtgctactttgacacagcggccccggatgcatgtgacaacatcctggctcggaatgtgacatggcaggagtgctgctgtactgtgggtgagggctggggcagcggctgccgcatccagcagtgcccgggcaccgagacagctgagtaccagtcattgtgccctcacggccggggctacctggcgcccagtggagacctgagcctccggagagacgtggacgaatgtcagctcttccgagaccaggtgtgcaagagtggcgtgtgtgtgaacacggccccgggctactcatgctattgcagcaacggctactactaccacacacagcggctggagtgcatcgacaatgacgagtgcgccgatgaggaaccggcctgtgagggcggccgctgtgtcaacactgtgggctcttatcactgtacctgcgagcccccactggtgctggatggctcgcagcgccgctgcgtctccaacgagagccagagcctcgatgacaatctgggagtgtgctggcaggaagtgggggctgacctcgtgtgcagccaccctcggctggaccgtcaggccacctacacagagtgctgctgcctgtatggagaggcctggggcatggactgcgccctctgccctgcgcaggactcagatgacttcgaggccctgtgcaatgtgctacgcccccccgcatatagccccccgcgaccaggtggctttggactcccctacgagtacggcccagacttaggtccaccttaccagggcctcccatatgggcctgagttgtacccaccacctgcgctaccctacgacccctacccaccgccacctgggcccttcgcccgccgggaggctccttatggggcaccccgcttcgacatgccagactttgaggacgatggtggcccctatggcgaatctgaggcggaggagtgcgggatcctggacggctgcaccaacggccgctgcgtgcgcgtccccgaaggcttcacctgccgttgcttcgacggctaccgcctggacatgacccgcatggcctgcgttgacatcaacgagtgtgatgaggccgaggctgcctccccgctgtgcgtcaacgcgcgttgcctcaacacggatggctccttccgctgcatctgccgcccgggattcgcacccacgcaccagccgcaccactgtgcgcccgcacggccccgggcctgagccctggcacccgctggccgcccacccgcgcccgccactcggggcccctgccgcgcatcctgcagcccgcttatgcgtatgtgcacggggccgcccgcctggacctggagaagggacctacggacgcctggaagctgcgacgccctgcactgctcccgcctccaccagcgcctcccactgatgtcgtggtcccgggcctggcccaggggcccctttacatgccctctcccttttataaaattttccattaaaaaccacctattttctaaaaaatg

SEQ ID NO: 428829 - DNA, 4497 bp, Homo sapiens
gctgtgattggcgggaagttcgcagcccgtggctggactgtggagaaagtgagtcggcctcgggcgggggcgggggcgggggcaggggcggggccggggctagcctgacccgctggacagaccgcccgcccggagcgggactcggcgcccgacacgatgccgaggcctggcaccagcggccgccgccccctcctgctggtgctgttgctgccgctcttcgcagccgccacctccgccgccagccccagccccagccccagccaggtcgtcgaggtcccgggggtccccagccgcccggccagcgttgctgtttgtcgctgctgcccgggccagacgtctaggaggagccgctgcatccgagccttctgcagggtccgaagctgccagcccaaaaagtgtgcaggcccccagcggtgcctgaacccagtgcctgcagtgcccagtcccagccccagcgtgaggaagagacaggtgtccctcaactggcagccactgacgctccaggaggccagagctctactgaagcggcggcggccccgggggccagggggccggggactactgagaaggaggcccccacagcgtgcccccgctggcaaggccccggtcctgtgtcccttgatctgtcacaatggcggtgtgtgcgtgaagcctgaccgctgcctctgtcccccggacttcgctggcaagttctgccagttgcactcctcgggcgcccggcccccggccccggctgtaccaggcctcacccgctccgtgtacactatgccactggccaaccaccgcgacgacgagcacggcgtggcatctatggtgagcgtccacgtggagcacccgcaggaggcgtcggtggtggtgcaccaggtggagcgtgtgtctggcccttgggaggaggcggacgctgaggcggtggcgcgggcggaagcggcggcgcgggcggaggcggcagcgccctacacggtgttggcacagagcgcgccgcgggaggacggctactcagatgcctcgggcttcggttactgctttcgggagctgcgcggaggcgaatgcgcgtccccgctgcccgggctccggacgcaggaggtctgctgccgaggggccggcttggcctggggcgttcacgactgtcagctgtgctccgagcgcctggggaactccgaaagagtgagcgccccagatggaccttgtccaaccggctttgaaagagttaatgggtcctgcgaagatgtggatgagtgcgcgactggcgggcgctgccagcacggcgagtgtgcaaacacgcgcggcgggtacacgtgtgtgtgccccgacggctttctgctcgactcgtcccgcagcagctgcatctcccaacacgtgatctcagaggccaaagggccctgcttccgcgtgctccgcgacggcggctgttcgctgcccattctgcggaacatcactaaacagatctgctgctgcagccgcgtaggcaaggcctggggccggggctgccagctctgcccacccttcggctcagagggtttccgggagatctgcccggctggtcctggttaccactactcggcctccgacctccgctacaacaccagacccctgggccaggagccaccccgagtgtcactcagccagcctcgtaccctgccagccacctctcggccatctgcaggctttctgcccacccatcgcctggagccccggcctgaaccccggcccgatccccggcccggccctgagcttcccttgcccagcatccctgcctggactggtcctgagattcctgaatcaggtccctcctccggcatgtgtcagcgcaacccccaggtctgcggcccaggacgctgcatttcccggcccagcggctacacctgcgcttgcgactctggcttccggctcagcccccagggcacccgatgcattgatgtggacgaatgtcgccgcgtgcccccgccctgtgctcccgggcgctgcgagaactcaccaggcagcttccgctgcgtgtgcggcccgggcttccgagccggcccacgggctgcggaatgcctggatgtggacgagtgccaccgcgtgccgccgccgtgtgacctcgggcgctgcgagaacacgccaggcagcttcctgtgcgtgtgccccgccgggtaccaggctgcaccgcacggagccagctgccaggatgtggatgaatgcacccagagcccaggcctgtgtggccgaggggcctgcaagaacctgcctggctctttccgctgtgtttgcccggctggcttccggggctcggcgtgtgaagaggatgtggatgagtgtgcccaggagccgccgccctgtgggcccggccgctgtgacaacacggcaggctcctttcactgtgcctgccctgctggcttccgctcccgagggcccggggccccctgccaagatgtggatgagtgtgcccgaagccccccaccctgcacctacggccggtgtgagaacacagaaggcagcttccagtgtgtctgccccatgggcttccaacccaacactgctggctccgagtgcgaggatgtggatgagtgtgagaaccacctcgcatgccctgggcaggagtgtgtgaactcgcccggctccttccagtgcaggacctgtccttctggccaccacctgcaccgtggcagatgcactgatgtggacgaatgcagttcgggtgcccctccctgtggtccccacggccactgcactaacaccgaaggctccttccgctgcagctgcgcgccaggctaccgggcgccgtcgggtcggcccgggccctgcgcagacgtgaacgagtgcctggagggcgatttctgcttccctcacggcgagtgcctcaacactgacggctcctttgcctgtacttgtgcccctggctaccgacccggaccccgcggagcctcttgcctcgacgttgacgagtgcagcgaggaggacctttgccagagcggcatctgtaccaacaccgacggctccttcgagtgcatctgtcctccgggacaccgcgctggcccggacctcgcctcctgcctcgacgtggacgaatgtcgcgagcgaggcccagccctgtgcgggtcgcagcgctgtgagaactctcccggctcctaccgctgtgtccgggactgcgatcctgggtaccacgcgggccccgagggcacctgtgacgatgtgaacgagtgtgaaacactacagggtgtatgtggagctgccctgtgtgaaaatgtcgaaggctccttcctctgtgtctgccccaacagcccggaagagtttgaccccatgactggacgctgtgttcccccacgaacttctgctggcacgttcccaggctcgcagccccaggcacctgctagccccgttctgcccgccaggccacctccgccacccctgccccgccgacccagcacacctaggcagggccctgtggggagtgggcgccgggagtgctactttgacacagcggccccggatgcatgtgacaacatcctggctcggaatgtgacatggcaggagtgctgctgtactgtgggtgagggctggggcagcggctgccgcatccagcagtgcccgggcaccgagacagctgagtaccagtcattgtgccctcacggccggggctacctggcgcccagtggagacctgagcctccggagagacgtggacgaatgtcagctcttccgagaccaggtgtgcaagagtggcgtgtgtgtgaacacggccccgggctactcatgctattgcagcaacggctactactaccacacacagcggctggagtgcatcgacaatgacgagtgcgccgatgaggaaccggcctgtgagggcggccgctgtgtcaacactgtgggctcttatcactgtacctgcgagcccccactggtgctggatggctcgcagcgccgctgcgtctccaacgagagccagagcctcgatgacaatctgggagtgtgctggcaggaagtgggggctgacctcgtgtgcagccaccctcggctggaccgtcaggccacctacacagagtgctgctgcctgtatggagaggcctggggcatggactgcgccctctgccctgcgcaggactcagatgacttcgaggccctgtgcaatgtgctacgcccccccgcatatagccccccgcgaccaggtggctttggactcccctacgagtacggcccagacttaggtccaccttaccagggcctcccatatgggcctgagttgtacccaccacctgcgtggccgcccacccgcgcccgccactcggggcccctgccgcgcatcctgcagcccgcttatgcgtatgtgcacggggccgcccgcctggacctggagaagggacctacggacgcctggaagctgcgacgccctgcactgctcccgcctccaccagcgcctcccactgatgtcgtggtcccgggcctggcccaggggcccctttacatgccctctcccttttataaaattttccattaaaaaccacctattttctaaaaaatg

SEQ ID NO: 428830 - DNA, 4472 bp, Homo sapiens
  misc_feature (4183)..(4183): n is a, c, g, or t
gctgtgattggcgggaagttcgcagcccgtggctggactgtggagaaagtgagtcggcctcgggcgggggcgggggcgggggcaggggcggggccggggctagcctgacccgctggacagaccgcccgcccggagcgggactcggcgcccgacacgatgccgaggcctggcaccagcggccgccgccccctcctgctggtgctgttgctgccgctcttcgcagccgccacctccgccgccagccccagccccagccccagccaggtcgtcgaggtcccgggggtccccagccgcccggccagcgttgctgtttgtcgctgctgcccgggccagacgtctaggaggagccgctgcatccgagccttctgcagggtccgaagctgccagcccaaaaagtgtgcaggcccccagcggtgcctgaacccagtgcctgcagtgcccagtcccagccccagcgtgaggaagagacaggtgtccctcaactggcagccactgacgctccaggaggccagagctctactgaagcggcggcggccccgggggccagggggccggggactactgagaaggaggcccccacagcgtgcccccgctggcaaggccccggtcctgtgtcccttgatctgtcacaatggcggtgtgtgcgtgaagcctgaccgctgcctctgtcccccggacttcgctggcaagttctgccagttgcactcctcgggcgcccggcccccggccccggctgtaccaggcctcacccgctccgtgtacactatgccactggccaaccaccgcgacgacgagcacggcgtggcatctatggtgagcgtccacgtggagcacccgcaggaggcgtcggtggtggtgcaccaggtggagcgtgtgtctggcccttgggaggaggcggacgctgaggcggtggcgcgggcggaagcggcggcgcgggcggaggcggcagcgccctacacggtgttggcacagagcgcgccgcgggaggacggctactcagatgcctcgggcttcggttactgctttcgggagctgcgcggaggcgaatgcgcgtccccgctgcccgggctccggacgcaggaggtctgctgccgaggggccggcttggcctggggcgttcacgactgtcagctgtgctccgagcgcctggggaactccgaaagagtgagcgccccagatggaccttgtccaaccggctttgaaagagttaatgggtcctgcgaagatgtggatgagtgcgcgactggcgggcgctgccagcacggcgagtgtgcaaacacgcgcggcgggtacacgtgtgtgtgccccgacggctttctgctcgactcgtcccgcagcagctgcatctcccaacacgtgatctcagaggccaaagggccctgcttccgcgtgctccgcgacggcggctgttcgctgcccattctgcggaacatcactaaacagatctgctgctgcagccgcgtaggcaaggcctggggccggggctgccagctctgcccacccttcggctcagagggtttccgggagatctgcccggctggtcctggttaccactactcggcctccgacctccgctacaacaccagacccctgggccaggagccaccccgagtgtcactcagccagcctcgtaccctgccagccacctctcggccatctgcaggctttctgcccacccatcgcctggagccccggcctgaaccccggcccgatccccggcccggccctgagcttcccttgcccagcatccctgcctggactggtcctgagattcctgaatcaggtccctcctccggcatgtgtcagcgcaacccccaggtctgcggcccaggacgctgcatttcccggcccagcggctacacctgcgcttgcgactctggcttccggctcagcccccagggcacccgatgcattgatgtggacgaatgtcgccgcgtgcccccgccctgtgctcccgggcgctgcgagaactcaccaggcagcttccgctgcgtgtgcggcccgggcttccgagccggcccacgggctgcggaatgcctggatgtggacgagtgccaccgcgtgccgccgccgtgtgacctcgggcgctgcgagaacacgccaggcagcttcctgtgcgtgtgccccgccgggtaccaggctgcaccgcacggagccagctgccaggatgtggatgaatgcacccagagcccaggcctgtgtggccgaggggcctgcaagaacctgcctggctctttccgctgtgtttgcccggctggcttccggggctcggcgtgtgaagaggatgtggatgagtgtgcccaggagccgccgccctgtgggcccggccgctgtgacaacacggcaggctcctttcactgtgcctgccctgctggcttccgctcccgagggcccggggccccctgccaagatgtggatgagtgtgcccgaagccccccaccctgcacctacggccggtgtgagaacacagaaggcagcttccagtgtgtctgccccatgggcttccaacccaacactgctggctccgagtgcgaggatgtggatgagtgtgagaaccacctcgcatgccctgggcaggagtgtgtgaactcgcccggctccttccagtgcaggacctgtccttctggccaccacctgcaccgtggcagatgcactgatgtggacgaatgcagttcgggtgcccctccctgtggtccccacggccactgcactaacaccgaaggctccttccgctgcagctgcgcgccaggctaccgggcgccgtcgggtcggcccgggccctgcgcagacgtgaacgagtgcctggagggcgatttctgcttccctcacggcgagtgcctcaacactgacggctcctttgcctgtacttgtgcccctggctaccgacccggaccccgcggagcctcttgcctcgacgttgacgagtgcagcgaggaggacctttgccagagcggcatctgtaccaacaccgacggctccttcgagtgcatctgtcctccgggacaccgcgctggcccggacctcgcctcctgcctcgacgtggacgaatgtcgcgagcgaggcccagccctgtgcgggtcgcagcgctgtgagaactctcccggctcctaccgctgtgtccgggactgcgatcctgggtaccacgcgggccccgagggcacctgtgacgatgtgaacgagtgtgaaacactacagggtgtatgtggagctgccctgtgtgaaaatgtcgaaggctccttcctctgtgtctgccccaacagcccggaagagtttgaccccatgactggacgctgtgttcccccacgaacttctgctggcacgttcccaggctcgcagccccaggcacctgctagccccgttctgcccgccaggccacctccgccacccctgccccgccgacccagcacacctaggcagggccctgtggggagtgggcgccgggagtgctactttgacacagcggccccggatgcatgtgacaacatcctggctcggaatgtgacatggcaggagtgctgctgtactgtgggtgagggctggggcagcggctgccgcatccagcagtgcccgggcaccgagacagctgagtaccagtcattgtgccctcacggccggggctacctggcgcccagtggagacctgagcctccggagagacgtggacgaatgtcagctcttccgagaccaggtgtgcaagagtggcgtgtgtgtgaacacggccccgggctactcatgctattgcagcaacggctactactaccacacacagcggctggagtgcatcgacaatgacgagtgcgccgatgaggaaccggcctgtgagggcggccgctgtgtcaacactgtgggctcttatcactgtacctgcgagcccccactggtgctggatggctcgcagcgccgctgcgtctccaacgagagccagagcctcgatgacaatctgggagtgtgctggcaggaagtgggggctgacctcgtgtgcagccaccctcggctggaccgtcaggccacctacacagagtgctgctgcctgtatggagaggcctggggcatggactgcgccctctgccctgcgcaggactcagatgacttcgaggccctgtgcaatgtgctacgcccccccgcatatagccccccgcgaccaggtggctttggactccccgtcggtccccagcccagctggncagggcacgaggaagcgatggggggtactgggaggaatcgatgggggtatggggtccaagacgaggagggggcagggacgcggggacagacactccaagtctggaaagtttgggcacagaaggtggagttggaggcagcgactcgttgagaccagcgagctcgtgtcccagggttggaggcgggggtagggtagtaggtgtgtgtggaggggtgcacactcgatccccgaacccgactgacccgtcgttcccccagccccgcccgcttccccagcccggggatcgtcgt

SEQ ID NO: 428831 - DNA, 5509 bp, Homo sapiens
gctgtgattggcgggaagttcgcagcccgtggctggactgtggagaaagtgagtcggcctcgggcgggggcgggggcgggggcaggggcggggccggggctagcctgacccgctggacagaccgcccgcccggagcgggactcggcgcccgacacgatgccgaggcctggcaccagcggccgccgccccctcctgctggtgctgttgctgccgctcttcgcagccgccacctccgccgccagccccagccccagccccagccaggtcgtcgaggtcccgggggtccccagccgcccggccagcgttgctgtttgtcgctgctgcccgggccagacgtctaggaggagccgctgcatccgagccttctgcagggtccgaagctgccagcccaaaaagtgtgcaggcccccagcggtgcctgaacccagtgcctgcagtgcccagtcccagccccagcgtgaggaagagacaggtgtccctcaactggcagccactgacgctccaggaggccagagctctactgaagcggcggcggccccgggggccagggggccggggactactgagaaggaggcccccacagcgtgcccccgctggcaaggccccggtcctgtgtcccttgatctgtcacaatggcggtgtgtgcgtgaagcctgaccgctgcctctgtcccccggacttcgctggcaagttctgccagttgcactcctcgggcgcccggcccccggccccggctgtaccaggcctcacccgctccgtgtacactatgccactggccaaccaccgcgacgacgagcacggcgtggcatctatggtgagcgtccacgtggagcacccgcaggaggcgtcggtggtggtgcaccaggtggagcgtgtgtctggcccttgggaggaggcggacgctgaggcggtggcgcgggcggaagcggcggcgcgggcggaggcggcagcgccctacacggtgttggcacagagcgcgccgcgggaggacggctactcagatgcctcgggcttcggttactgctttcgggagctgcgcggaggcgaatgcgcgtccccgctgcccgggctccggacgcaggaggtctgctgccgaggggccggcttggcctggggcgttcacgactgtcagctgtgctccgagcgcctggggaactccgaaagagtgagcgccccagatggaccttgtccaaccggctttgaaagagttaatgggtcctgcgaagatgtggatgagtgcgcgactggcgggcgctgccagcacggcgagtgtgcaaacacgcgcggcgggtacacgtgtgtgtgccccgacggctttctgctcgactcgtcccgcagcagctgcatctcccaacacgtgatctcagaggccaaagggccctgcttccgcgtgctccgcgacggcggctgttcgctgcccattctgcggaacatcactaaacagatctgctgctgcagccgcgtaggcaaggcctggggccggggctgccagctctgcccacccttcggctcagagggtttccgggagatctgcccggctggtcctggttaccactactcggcctccgacctccgctacaacaccagacccctgggccaggagccaccccgagtgtcactcagccagcctcgtaccctgccagccacctctcggccatctgcaggctttctgcccacccatcgcctggagccccggcctgaaccccggcccgatccccggcccggccctgagcttcccttgcccagcatccctgcctggactggtcctgagattcctgaatcaggtccctcctccggcatgtgtcagcgcaacccccaggtctgcggcccaggacgctgcatttcccggcccagcggctacacctgcgcttgcgactctggcttccggctcagcccccagggcacccgatgcattgatgtggacgaatgtcgccgcgtgcccccgccctgtgctcccgggcgctgcgagaactcaccaggcagcttccgctgcgtgtgcggcccgggcttccgagccggcccacgggctgcggaatgcctggatgtggacgagtgccaccgcgtgccgccgccgtgtgacctcgggcgctgcgagaacacgccaggcagcttcctgtgcgtgtgccccgccgggtaccaggctgcaccgcacggagccagctgccaggatgtggatgaatgcacccagagcccaggcctgtgtggccgaggggcctgcaagaacctgcctggctctttccgctgtgtttgcccggctggcttccggggctcggcgtgtgaagaggatgtggatgagtgtgcccaggagccgccgccctgtgggcccggccgctgtgacaacacggcaggctcctttcactgtgcctgccctgctggcttccgctcccgagggcccggggccccctgccaagatgtggatgagtgtgcccgaagccccccaccctgcacctacggccggtgtgagaacacagaaggcagcttccagtgtgtctgccccatgggcttccaacccaacactgctggctccgagtgcgaggatgtggatgagtgtgagaaccacctcgcatgccctgggcaggagtgtgtgaactcgcccggctccttccagtgcaggacctgtccttctggccaccacctgcaccgtggcagatgcactgatgtggacgaatgcagttcgggtgcccctccctgtggtccccacggccactgcactaacaccgaaggctccttccgctgcagctgcgcgccaggctaccgggcgccgtcgggtcggcccgggccctgcgcagacgtgaacgagtgcctggagggcgatttctgcttccctcacggcgagtgcctcaacactgacggctcctttgcctgtacttgtgcccctggctaccgacccggaccccgcggagcctcttgcctcgacgttgacgagtgcagcgaggaggacctttgccagagcggcatctgtaccaacaccgacggctccttcgagtgcatctgtcctccgggacaccgcgctggcccggacctcgcctcctgcctcgacgtggacgaatgtcgcgagcgaggcccagccctgtgcgggtcgcagcgctgtgagaactctcccggctcctaccgctgtgtccgggactgcgatcctgggtaccacgcgggccccgagggcacctgtgacgatgtggatgagtgccaagaatatggtcccgagatttgtggagcccagcgttgtgagaacacccctggctcctaccgctgcacaccagcctgtgaccctggctatcagcccacgccagggggcggatgccaggatgtggacgaatgccggaaccggtccttctgcggtgcccacgccgtgtgccagaacctgcccggctccttccagtgcctctgtgaccagggttacgagggggcacgggatgggcgtcactgcgtggatgtgaacgagtgtgaaacactacagggtgtatgtggagctgccctgtgtgaaaatgtcgaaggctccttcctctgtgtctgccccaacagcccggaagagtttgaccccatgactggacgctgtgttcccccacgaacttctgctggcacgttcccaggctcgcagccccaggcacctgctagccccgttctgcccgccaggccacctccgccacccctgccccgccgacccagcacacctaggcagggccctgtggggagtgggcgccgggagtgctactttgacacagcggccccggatgcatgtgacaacatcctggctcggaatgtgacatggcaggagtgctgctgtactgtgggtgagggctggggcagcggctgccgcatccagcagtgcccgggcaccgagacagctgagtaccagtcattgtgccctcacggccggggctacctggcgcccagtggagacctgagcctccggagagacgtggacgaatgtcagctcttccgagaccaggtgtgcaagagtggcgtgtgtgtgaacacggccccgggctactcatgctattgcagcaacggctactactaccacacacagcggctggagtgcatcggtacaagccccacctcccccaacccccggcaactctctccaacccctagccttgccagctcccctctggaatgtggccaccaccagcgggaagtctttcctggagtctagactccatccatcacactgccaatgtgctgggaagagaaatgggaaagggtggggagagttgaaggggatgcctcttaatcatcctctccctagacaatgacgagtgcgccgatgaggaaccggcctgtgagggcggccgctgtgtcaacactgtgggctcttatcactgtacctgcgagcccccactggtgctggatggctcgcagcgccgctgcgtctccaacgagagccagagcctcgatgacaatctgggagtgtgctggcaggaagtgggggctgacctcgtgtgcagccaccctcggctggaccgtcaggccacctacacagagtgctgctgcctgtatggagaggcctggggcatggactgcgccctctgccctgcgcaggactcagatgacttcgaggccctgtgcaatgtgctacgcccccccgcatatagccccccgcgaccaggtggctttggactcccctacgagtacggcccagacttaggtccaccttaccagggcctcccatatgggcctgagttgtacccaccacctgcgctaccctacgacccctacccaccgccacctgggcccttcgcccgccgggaggctccttatggggcaccccgcttcgacatgccagactttgaggacgatggtggcccctatggcgaatctgaggctcctgcgccacctggcccgggcacccgctggccctatcggtcccgggacacccgccgctccttcccagagcccgaggagcctcctgaaggtggaagctatgctggttccctggctgagccctacgaggagctggaggcggaggagtgcgggatcctggacggctgcaccaacggccgctgcgtgcgcgtccccgaaggcttcacctgccgttgcttcgacggctaccgcctggacatgacccgcatggcctgcgttgacatcaacgagtgtgatgaggccgaggctgcctccccgctgtgcgtcaacgcgcgttgcctcaacacggatggctccttccgctgcatctgccgcccgggattcgcacccacgcaccagccgcaccactgtgcgcccgcacggccccgggcctgagccctggcacccgctggccgcccacccgcgcccgccactcggggcccctgccgcgcatcctgcagcccgcttatgcgtatgtgcacggggccgcccgcctggacctggagaagggacctacggacgcctggaagctgcgacgccctgcactgctcccgcctccaccagcgcctcccactgatgtcgtggtcccgggcctggcccaggggcccctttacatgccctctcccttttataaaattttccattaaaaaccacctattttctaaaaaatg

SEQ ID NO: 428832 - DNA, 5234 bp, Homo sapiens
gctgtgattggcgggaagttcgcagcccgtggctggactgtggagaaagtgagtcggcctcgggcgggggcgggggcgggggcaggggcggggccggggctagcctgacccgctggacagaccgcccgcccggagcgggactcggcgcccgacacgatgccgaggcctggcaccagcggccgccgccccctcctgctggtgctgttgctgccgctcttcgcagccgccacctccgccgccagccccagccccagccccagccaggtcgtcgaggtcccgggggtccccagccgcccggccagcgttgctgtttgtcgctgctgcccgggccagacgtctaggaggagccgctgcatccgagccttctgcagggtccgaagctgccagcccaaaaagtgtgcaggcccccagcggtgcctgaacccagtgcctgcagtgcccagtcccagccccagcgtgaggaagagacaggtgtccctcaactggcagccactgacgctccaggaggccagagctctactgaagcggcggcggccccgggggccagggggccggggactactgagaaggaggcccccacagcgtgcccccgctggcaaggccccggtcctgtgtcccttgatctgtcacaatggcggtgtgtgcgtgaagcctgaccgctgcctctgtcccccggacttcgctggcaagttctgccagttgcactcctcgggcgcccggcccccggccccggctgtaccaggcctcacccgctccgtgtacactatgccactggccaaccaccgcgacgacgagcacggcgtggcatctatggtgagcgtccacgtggagcacccgcaggaggcgtcggtggtggtgcaccaggtggagcgtgtgtctggcccttgggaggaggcggacgctgaggcggtggcgcgggcggaagcggcggcgcgggcggaggcggcagcgccctacacggtgttggcacagagcgcgccgcgggaggacggctactcagatgcctcgggcttcggttactgctttcgggagctgcgcggaggcgaatgcgcgtccccgctgcccgggctccggacgcaggaggtctgctgccgaggggccggcttggcctggggcgttcacgactgtcagctgtgctccgagcgcctggggaactccgaaagagtgagcgccccagatggaccttgtccaaccggctttgaaagagttaatgggtcctgcgaagatgtggatgagtgcgcgactggcgggcgctgccagcacggcgagtgtgcaaacacgcgcggcgggtacacgtgtgtgtgccccgacggctttctgctcgactcgtcccgcagcagctgcatctcccaacacgtgatctcagaggccaaagggccctgcttccgcgtgctccgcgacggcggctgttcgctgcccattctgcggaacatcactaaacagatctgctgctgcagccgcgtaggcaaggcctggggccggggctgccagctctgcccacccttcggctcagagggtttccgggagatctgcccggctggtcctggttaccactactcggcctccgacctccgctacaacaccagacccctgggccaggagccaccccgagtgtcactcagccagcctcgtaccctgccagccacctctcggccatctgcaggctttctgcccacccatcgcctggagccccggcctgaaccccggcccgatccccggcccggccctgagcttcccttgcccagcatccctgcctggactggtcctgagattcctgaatcaggtccctcctccggcatgtgtcagcgcaacccccaggtctgcggcccaggacgctgcatttcccggcccagcggctacacctgcgcttgcgactctggcttccggctcagcccccagggcacccgatgcattgatgtggacgaatgtcgccgcgtgcccccgccctgtgctcccgggcgctgcgagaactcaccaggcagcttccgctgcgtgtgcggcccgggcttccgagccggcccacgggctgcggaatgcctggatgtggacgagtgccaccgcgtgccgccgccgtgtgacctcgggcgctgcgagaacacgccaggcagcttcctgtgcgtgtgccccgccgggtaccaggctgcaccgcacggagccagctgccaggatgtggatgaatgcacccagagcccaggcctgtgtggccgaggggcctgcaagaacctgcctggctctttccgctgtgtttgcccggctggcttccggggctcggcgtgtgaagaggatgtggatgagtgtgcccaggagccgccgccctgtgggcccggccgctgtgacaacacggcaggctcctttcactgtgcctgccctgctggcttccgctcccgagggcccggggccccctgccaagatgtggatgagtgtgcccgaagccccccaccctgcacctacggccggtgtgagaacacagaaggcagcttccagtgtgtctgccccatgggcttccaacccaacactgctggctccgagtgcgaggatgtggatgagtgtgagaaccacctcgcatgccctgggcaggagtgtgtgaactcgcccggctccttccagtgcaggacctgtccttctggccaccacctgcaccgtggcagatgcactgatgtggacgaatgcagttcgggtgcccctccctgtggtccccacggccactgcactaacaccgaaggctccttccgctgcagctgcgcgccaggctaccgggcgccgtcgggtcggcccgggccctgcgcagacgtgaacgagtgcctggagggcgatttctgcttccctcacggcgagtgcctcaacactgacggctcctttgcctgtacttgtgcccctggctaccgacccggaccccgcggagcctcttgcctcgacgttgacgagtgcagcgaggaggacctttgccagagcggcatctgtaccaacaccgacggctccttcgagtgcatctgtcctccgggacaccgcgctggcccggacctcgcctcctgcctcgacgtggacgaatgtcgcgagcgaggcccagccctgtgcgggtcgcagcgctgtgagaactctcccggctcctaccgctgtgtccgggactgcgatcctgggtaccacgcgggccccgagggcacctgtgacgatgtggatgagtgccaagaatatggtcccgagatttgtggagcccagcgttgtgagaacacccctggctcctaccgctgcacaccagcctgtgaccctggctatcagcccacgccagggggcggatgccaggatgtggacgaatgccggaaccggtccttctgcggtgcccacgccgtgtgccagaacctgcccggctccttccagtgcctctgtgaccagggttacgagggggcacgggatgggcgtcactgcgtggatgtgaacgagtgtgaaacactacagggtgtatgtggagctgccctgtgtgaaaatgtcgaaggctccttcctctgtgtctgccccaacagcccggaagagtttgaccccatgactggacgctgtgttcccccacgaacttctgctggcacgttcccaggctcgcagccccaggcacctgctagccccgttctgcccgccaggccacctccgccacccctgccccgccgacccagcacacctaggcagggccctgtggggagtgggcgccgggagtgctactttgacacagcggccccggatgcatgtgacaacatcctggctcggaatgtgacatggcaggagtgctgctgtactgtgggtgagggctggggcagcggctgccgcatccagcagtgcccgggcaccgagacagacgtggacgaatgtcagctcttccgagaccaggtgtgcaagagtggcgtgtgtgtgaacacggccccgggctactcatgctattgcagcaacggctactactaccacacacagcggctggagtgcatcgacaatgacgagtgcgccgatgaggaaccggcctgtgagggcggccgctgtgtcaacactgtgggctcttatcactgtacctgcgagcccccactggtgctggatggctcgcagcgccgctgcgtctccaacgagagccagagcctcgatgacaatctgggagtgtgctggcaggaagtgggggctgacctcgtgtgcagccaccctcggctggaccgtcaggccacctacacagagtgctgctgcctgtatggagaggcctggggcatggactgcgccctctgccctgcgcaggactcagatgacttcgaggccctgtgcaatgtgctacgcccccccgcatatagccccccgcgaccaggtggctttggactcccctacgagtacggcccagacttaggtccaccttaccagggcctcccatatgggcctgagttgtacccaccacctgcgctaccctacgacccctacccaccgccacctgggcccttcgcccgccgggaggctccttatggggcaccccgcttcgacatgccagactttgaggacgatggtggcccctatggcgaatctgaggctcctgcgccacctggcccgggcacccgctggccctatcggtcccgggacacccgccgctccttcccagagcccgaggagcctcctgaaggtggaagctatgctggttccctggctgagccctacgaggagctggaggcggaggagtgcgggatcctggacggctgcaccaacggccgctgcgtgcgcgtccccgaaggcttcacctgccgttgcttcgacggctaccgcctggacatgacccgcatggcctgcgttgacatcaacgagtgtgatgaggccgaggctgcctccccgctgtgcgtcaacgcgcgttgcctcaacacggatggctccttccgctgcatctgccgcccgggattcgcacccacgcaccagccgcaccactgtgcgcccgcacggccccgggcctgagccctggcacccgctggccgcccacccgcgcccgccactcggggcccctgccgcgcatcctgcagcccgcttatgcgtatgtgcacggggccgcccgcctggacctggagaagggacctacggacgcctggaagctgcgacgccctgcactgctcccgcctccaccagcgcctcccactgatgtcgtggtcccgggcctggcccaggggcccctttacatgccctctcccttttataaaattttccattaaaaaccacctattttctaaaaaatg

SEQ ID NO: 428833 - DNA, 4835 bp, Homo sapiens
gctgtgattggcgggaagttcgcagcccgtggctggactgtggagaaagtgagtcggcctcgggcgggggcgggggcgggggcaggggcggggccggggctagcctgacccgctggacagaccgcccgcccggagcgggactcggcgcccgacacgatgccgaggcctggcaccagcggccgccgccccctcctgctggtgctgttgctgccgctcttcgcagccgccacctccgccgccagccccagccccagccccagccaggtcgtcgaggtcccgggggtccccagccgcccggccagcgttgctgtttgtcgctgctgcccgggccagacgtctaggaggagccgctgcatccgagccttctgcagggtccgaagctgccagcccaaaaagtgtgcaggcccccagcggtgcctgaacccagtgcctgcagtgcccagtcccagccccagcgtgaggaagagacaggtgtccctcaactggcagccactgacgctccaggaggccagagctctactgaagcggcggcggccccgggggccagggggccggggactactgagaaggaggcccccacagcgtgcccccgctggcaaggccccggtcctgtgtcccttgatctgtcacaatggcggtgtgtgcgtgaagcctgaccgctgcctctgtcccccggacttcgctggcaagttctgccagttgcactcctcgggcgcccggcccccggccccggctgtaccaggcctcacccgctccgtgtacactatgccactggccaaccaccgcgacgacgagcacggcgtggcatctatggtgagcgtccacgtggagcacccgcaggaggcgtcggtggtggtgcaccaggtggagcgtgtgtctggcccttgggaggaggcggacgctgaggcggtggcgcgggcggaagcggcggcgcgggcggaggcggcagcgccctacacggtgttggcacagagcgcgccgcgggaggacggctactcagatgcctcgggcttcggttactgctttcgggagctgcgcggaggcgaatgcgcgtccccgctgcccgggctccggacgcaggaggtctgctgccgaggggccggcttggcctggggcgttcacgactgtcagctgtgctccgagcgcctggggaactccgaaagagtgagcgccccagatggaccttgtccaaccggctttgaaagagttaatgggtcctgcgaagatgtggatgagtgcgcgactggcgggcgctgccagcacggcgagtgtgcaaacacgcgcggcgggtacacgtgtgtgtgccccgacggctttctgctcgactcgtcccgcagcagctgcatctcccaacacgtgatctcagaggccaaagggccctgcttccgcgtgctccgcgacggcggctgttcgctgcccattctgcggaacatcactaaacagatctgctgctgcagccgcgtaggcaaggcctggggccggggctgccagctctgcccacccttcggctcagagggtttccgggagatctgcccggctggtcctggttaccactactcggcctccgacctccgctacaacaccagacccctgggccaggagccaccccgagtgtcactcagccagcctcgtaccctgccagccacctctcggccatctgcaggctttctgcccacccatcgcctggagccccggcctgaaccccggcccgatccccggcccggccctgagcttcccttgcccagcatccctgcctggactggtcctgagattcctgaatcaggtccctcctccggcatgtgtcagcgcaacccccaggtctgcggcccaggacgctgcatttcccggcccagcggctacacctgcgcttgcgactctggcttccggctcagcccccagggcacccgatgcattgatgtggacgaatgtcgccgcgtgcccccgccctgtgctcccgggcgctgcgagaactcaccaggcagcttccgctgcgtgtgcggcccgggcttccgagccggcccacgggctgcggaatgcctggatgtggacgagtgccaccgcgtgccgccgccgtgtgacctcgggcgctgcgagaacacgccaggcagcttcctgtgcgtgtgccccgccgggtaccaggctgcaccgcacggagccagctgccaggatgtggatgaatgcacccagagcccaggcctgtgtggccgaggggcctgcaagaacctgcctggctctttccgctgtgtttgcccggctggcttccggggctcggcgtgtgaagaggatgtggatgagtgtgcccaggagccgccgccctgtgggcccggccgctgtgacaacacggcaggctcctttcactgtgcctgccctgctggcttccgctcccgagggcccggggccccctgccaagatgtggatgagtgtgcccgaagccccccaccctgcacctacggccggtgtgagaacacagaaggcagcttccagtgtgtctgccccatgggcttccaacccaacactgctggctccgagtgcgaggatgtggatgagtgtgagaaccacctcgcatgccctgggcaggagtgtgtgaactcgcccggctccttccagtgcaggacctgtccttctggccaccacctgcaccgtggcagatgcactgatgtggacgaatgcagttcgggtgcccctccctgtggtccccacggccactgcactaacaccgaaggctccttccgctgcagctgcgcgccaggctaccgggcgccgtcgggtcggcccgggccctgcgcagacgtgaacgagtgcctggagggcgatttctgcttccctcacggcgagtgcctcaacactgacggctcctttgcctgtacttgtgcccctggctaccgacccggaccccgcggagcctcttgcctcgacgttgacgagtgcagcgaggaggacctttgccagagcggcatctgtaccaacaccgacggctccttcgagtgcatctgtcctccgggacaccgcgctggcccggacctcgcctcctgcctcgacgtggacgaatgtcgcgagcgaggcccagccctgtgcgggtcgcagcgctgtgagaactctcccggctcctaccgctgtgtccgggactgcgatcctgggtaccacgcgggccccgagggcacctgtgacgatgtggacgaatgccggaaccggtccttctgcggtgcccacgccgtgtgccagaacctgcccggctccttccagtgcctctgtgaccagggttacgagggggcacgggatgggcgtcactgcgtggatgtgaacgagtgtgaaacactacagggtgtatgtggagctgccctgtgtgaaaatgtcgaaggctccttcctctgtgtctgccccaacagcccggaagagtttgaccccatgactggacgctgtgttcccccacgaacttctgctgacgtggacgaatgtcagctcttccgagaccaggtgtgcaagagtggcgtgtgtgtgaacacggccccgggctactcatgctattgcagcaacggctactactaccacacacagcggctggagtgcatcgacaatgacgagtgcgccgatgaggaaccggcctgtgagggcggccgctgtgtcaacactgtgggctcttatcactgtacctgcgagcccccactggtgctggatggctcgcagcgccgctgcgtctccaacgagagccagagcctcgatgacaatctgggagtgtgctggcaggaagtgggggctgacctcgtgtgcagccaccctcggctggaccgtcaggccacctacacagagtgctgctgcctgtatggagaggcctggggcatggactgcgccctctgccctgcgcaggactcagatgacttcgaggccctgtgcaatgtgctacgcccccccgcatatagccccccgcgaccaggtggctttggactcccctacgagtacggcccagacttaggtccaccttaccagggcctcccatatgggcctgagttgtacccaccacctgcgctaccctacgacccctacccaccgccacctgggcccttcgcccgccgggaggctccttatggggcaccccgcttcgacatgccagactttgaggacgatggtggcccctatggcgaatctgaggctcctgcgccacctggcccgggcacccgctggccctatcggtcccgggacacccgccgctccttcccagagcccgaggagcctcctgaaggtggaagctatgctggttccctggctgagccctacgaggagctggaggcggaggagtgcgggatcctggacggctgcaccaacggccgctgcgtgcgcgtccccgaaggcttcacctgccgttgcttcgacggctaccgcctggacatgacccgcatggcctgcgttgacatcaacgagtgtgatgaggccgaggctgcctccccgctgtgcgtcaacgcgcgttgcctcaacacggatggctccttccgctgcatctgccgcccgggattcgcacccacgcaccagccgcaccactgtgcgcccgcacggccccgggcctgagccctggcacccgctggccgcccacccgcgcccgccactcggggcccctgccgcgcatcctgcagcccgcttatgcgtatgtgcacggggccgcccgcctggacctggagaagggacctacggacgcctggaagctgcgacgccctgcactgctcccgcctccaccagcgcctcccactgatgtcgtggtcccgggcctggcccaggggcccctttacatgccctctcccttttataaaattttccattaaaaaccacctattttctaaaaaatg

SEQ ID NO: 428834 - DNA, 3004 bp, Homo sapiens
gctgtgattggcgggaagttcgcagcccgtggctggactgtggagaaagtgagtcggcctcgggcgggggcgggggcgggggcaggggcggggccggggctagcctgacccgctggacagaccgcccgcccggagcgggactcggcgcccgacacgatgccgaggcctggcaccagcggccgccgccccctcctgctggtgctgttgctgccgctcttcgcagccgccacctccgccgccagccccagccccagccccagccaggtcgtcgaggtcccgggggtccccagccgcccggccagcgttgctgtttgtcgctgctgcccgggccagacgtctaggaggagccgctgcatccgagccttctgcagggtccgaagctgccagcccaaaaagtgtgcaggcccccagcggtgcctgaacccagtgcctgcagtgcccagtcccagccccagcgtgaggaagagacaggtgtccctcaactggcagccactgacgctccaggaggccagagctctactgaagcggcggcggccccgggggccagggggccggggactactgagaaggaggcccccacagcgtgcccccgctggcaaggccccggtcctgtgtcccttgatctgtcacaatggcggtgtgtgcgtgaagcctgaccgctgcctctgtcccccggacttcgctggcaagttctgccagttgcactcctcgggcgcccggcccccggccccggctgtaccaggcctcacccgctccgtgtacactatgccactggccaaccaccgcgacgacgagcacggcgtggcatctatggtgagcgtccacgtggagcacccgcaggaggcgtcggtggtggtgcaccaggtggagcgtgtgtctggcccttgggaggaggcggacgctgaggcggtggcgcgggcggaagcggcggcgcgggcggaggcggcagcgccctacacggtgttggcacagagcgcgccgcgggaggacggctactcagatgcctcgggcttcggttactgctttcgggagctgcgcggaggcgaatgcgcgtccccgctgcccgggctccggacgcaggaggtctgctgccgaggggccggcttggcctggggcgttcacgactgtcagctgtgctccgagcgcctggggaactccgaaagagtgagcgccccagatggaccttgtccaaccggctttgaaagagttaatgggtcctgcgaagatgtggatgagtgcgcgactggcgggcgctgccagcacggcgagtgtgcaaacacgcgcggcgggtacacgtgtgtgtgccccgacggctttctgctcgactcgtcccgcagcagctgcatctcccaacacgtgatctcagaggccaaagggccctgcttccgcgtgctccgcgacggcggctgttcgctgcccattctgcggaacatcactaaacagatctgctgctgcagccgcgtaggcaaggcctggggccggggctgccagctctgcccacccttcggctcagagggtttccgggagatctgcccggctggtcctggttaccactactcggcctccgacctccgtacctggcgcccagtggagacctgagcctccggagagacgtggacgaatgtcagctcttccgagaccaggtgtgcaagagtggcgtgtgtgtgaacacggccccgggctactcatgctattgcagcaacggctactactaccacacacagcggctggagtgcatcgacaatgacgagtgcgccgatgaggaaccggcctgtgagggcggccgctgtgtcaacactgtgggctcttatcactgtacctgcgagcccccactggtgctggatggctcgcagcgccgctgcgtctccaacgagagccagagcctcgatgacaatctgggagtgtgctggcaggaagtgggggctgacctcgtgtgcagccaccctcggctggaccgtcaggccacctacacagagtgctgctgcctgtatggagaggcctggggcatggactgcgccctctgccctgcgcaggactcagatgacttcgaggccctgtgcaatgtgctacgcccccccgcatatagccccccgcgaccaggtggctttggactcccctacgagtacggcccagacttaggtccaccttaccagggcctcccatatgggcctgagttgtacccaccacctgcgctaccctacgacccctacccaccgccacctgggcccttcgcccgccgggaggctccttatggggcaccccgcttcgacatgccagactttgaggacgatggtggcccctatggcgaatctgaggctcctgcgccacctggcccgggcacccgctggccctatcggtcccgggacacccgccgctccttcccagagcccgaggagcctcctgaaggtggaagctatgctggttccctggctgagccctacgaggagctggaggcggaggagtgcgggatcctggacggctgcaccaacggccgctgcgtgcgcgtccccgaaggcttcacctgccgttgcttcgacggctaccgcctggacatgacccgcatggcctgcgttgacatcaacgagtgtgatgaggccgaggctgcctccccgctgtgcgtcaacgcgcgttgcctcaacacggatggctccttccgctgcatctgccgcccgggattcgcacccacgcaccagccgcaccactgtgcgcccgcacggccccgggcctgagccctggcacccgctggccgcccacccgcgcccgccactcggggcccctgccgcgcatcctgcagcccgcttatgcgtatgtgcacggggccgcccgcctggacctggagaagggacctacggacgcctggaagctgcgacgccctgcactgctcccgcctccaccagcgcctcccactgatgtcgtggtcccgggcctggcccaggggcccctttacatgccctctcccttttataaaattttccattaaaaaccacctattttctaaaaaatg

SEQ ID NO: 428835 - DNA, 1714 bp, Homo sapiens
  misc_feature (8)..(8): n is a, c, g, or t
caagcttntacccctggctataacccaacccaggggcggaatcccaggatgtggacgaatgccggaaccggtccttctgcggtgcccacgccgtgtgccagaacctgcccggctccttccagtgcctctgtgaccagggttacgagggggcacgggatgggcgtcactgcgtggatgtgaacgagtgtgaaacactacagggtgtatgtggagctgccctgtgtgaaaatgtcgaaggctccttcctctgtgtctgccccaacagcccggaagagtttgaccccatgactggacgctgtgttcccccacgaacttctgctgacgtggacgaatgtcagctcttccgagaccaggtgtgcaagagtggcgtgtgtgtgaacacggccccgggctactcatgctattgcagcaacggctactactaccacacacagcggctggagtgcatcgacaatgacgagtgcgccgatgaggaaccggcctgtgagggcggccgctgtgtcaacactgtgggctcttatcactgtacctgcgagcccccactggtgctggatggctcgcagcgccgctgcgtctccaacgagagccagagcctcgatgacaatctgggagtgtgctggcaggaagtgggggctgacctcgtgtgcagccaccctcggctggaccgtcaggccacctacacagagtgctgctgcctgtatggagaggcctggggcatggactgcgccctctgccctgcgcaggactcagatgacttcgaggccctgtgcaatgtgctacgcccccccgcatatagccccccgcgaccaggtggctttggactcccctacgagtacggcccagacttaggtccaccttaccagggcctcccatatgggcctgagttgtacccaccacctgcgctaccctacgacccctacccaccgccacctgggcccttcgcccgccgggaggctccttatggggcaccccgcttcgacatgccagactttgaggacgatggtggcccctatggcgaatctgaggctcctgcgccacctggcccgggcacccgctggccctatcggtcccgggacacccgccgctccttcccagagcccgaggagcctcctgaaggtggaagctatgctggttccctggctgagccctacgaggagctggaggcggaggagtgcgggatcctggacggctgcaccaacggccgctgcgtgcgcgtccccgaaggcttcacctgccgttgcttcgacggctaccgcctggacatgacccgcatggcctgcgttgacatcaacgagtgtgatgaggccgaggctgcctccccgctgtgcgtcaacgcgcgttgcctcaacacggatggctccttccgctgcatctgccgcccgggattcgcacccacgcaccagccgcaccactgtgcgcccgcacggccccgggcctgagccctggcacccgctggccgcccacccgcgcccgccactcggggcccctgccgcgcatcctgcagcccgcttatgcgtatgtgcacggggccgcccgcctggacctggagaagggacctacggacgcctggaagctgcgacgccctgcactgctcccgcctccaccagcgcctcccactgatgtcgtggtcccgggcctggcccaggggcccctttacatgccctctcccttttataaaattttccattaaaaaccacctattttctaaaaaatg

SEQ ID NO: 428836 - DNA, 1453 bp, Homo sapiens
cccaacacacagccccagagattcccaagtcttggtttctacaacctctgagtccctcagtcctcagcccttaggaacccagttccaaagccccagtcctgggtcctcagacctccaggtcccagtgcctcagactgtctcccatgcatcctgccccctcaggtccccagcagcaatccctgggattccccagtcctggtccacagaacacccccatctaatttcttcaggtccctagtcctagctcccatgggtcgctccaattccagcctctcagaccctgattcttagcaggcttcattacccttgatctcagcacgtccgaatcccagtctcagccttcagattctcagcgctggctccagaaaccccggggccacccaggaccctccccatccagtcctctgcctcctctcccaaggggggtatgtgagtggtgggtgtgggggccagcaggggctgattgtttgccttggctcctgttcccagatgacttcgaggccctgtgcaatgtgctacgcccccccgcatatagccccccgcgaccaggtggctttggactcccctacgagtacggcccagacttaggtccaccttaccagggcctcccatatgggcctgagttgtacccaccacctgcgctaccctacgacccctacccaccgccacctgggcccttcgcccgccgggaggctccttatggggcaccccgcttcgacatgccagactttgaggacgatggtggcccctatggcgaatctgaggctcctgcgccacctggcccgggcacccgctggccctatcggtcccgggacacccgccgctccttcccagagcccgaggagcctcctgaaggtggaagctatgctggttccctggctgagccctacgaggagctggaggcggaggagtgcgggatcctggacggctgcaccaacggccgctgcgtgcgcgtccccgaaggcttcacctgccgttgcttcgacggctaccgcctggacatgacccgcatggcctgcgttgacatcaacgagtgtgatgaggccgaggctgcctccccgctgtgcgtcaacgcgcgttgcctcaacacggatggctccttccgctgcatctgccgcccgggattcgcacccacgcaccagccgcaccactgtgcgcccgcacggccccgggcctgagccctggcacccgctggccgcccacccgcgcccgccactcggggcccctgccgcgcatcctgcagcccgcttatgcgtatgtgcacggggccgcccgcctggacctggagaagggacctacggacgcctggaagctgcgacgccctgcactgctcccgcctccaccagcgcctcccactgatgtcgtggtcccgggcctggcccaggggcccctttacatgccctctcccttttataaaattttccattaaaaaccacctattttctaaaaaatg

SEQ ID NO: 428837 - DNA, 3134 bp, Homo sapiens
gctgtgattggcgggaagttcgcagcccgtggctggactgtggagaaagtgagtcggcctcgggcgggggcgggggcgggggcaggggcggggccggggctagcctgacccgctggacagaccgcccgcccggagcgggactcggcgcccgacacgatgccgaggcctggcaccagcggccgccgccccctcctgctggtgctgttgctgccgctcttcgcagccgccacctccgccgccagccccagccccagccccagccaggtcgtcgaggtcccgggggtccccagccgcccggccagcgttgctgtttgtcgctgctgcccgggccagacgtctaggaggagccgctgcatccgagccttctgcagggtccgaagctgccagcccaaaaagtgtgcaggcccccagcggtgcctgaacccagtgcctgcagtgcccagtcccagccccagcgtgaggaagagacaggtgtccctcaactggcagccactgacgctccaggaggccagagctctactgaagcggcggcggccccgggggccagggggccggggactactgagaaggaggcccccacagcgtgcccccgctggcaaggccccggtcctgtgtcccttgatctgtcacaatggcggtgtgtgcgtgaagcctgaccgctgcctctgtcccccggacttcgctggcaagttctgccagttgcactcctcgggcgcccggcccccggccccggctgtaccaggcctcacccgctccgtgtacactatgccactggccaaccaccgcgacgacgagcacggcgtggcatctatggtgagcgtccacgtggagcacccgcaggaggcgtcggtggtggtgcaccaggtggagcgtgtgtctggcccttgggaggaggcggacgctgaggcggtggcgcgggcggaagcggcggcgcgggcggaggcggcagcgccctacacggtgttggcacagagcgcgccgcgggaggacggctactcagatgcctcgggcttcggttactgctttcgggagctgcgcggaggcgaatgcgcgtccccgctgcccgggctccggacgcaggaggtctgctgccgaggggccggcttggcctggggcgttcacgactgtcagctgtgctccgagcgcctggggaactccgaaagagtgagcgccccagatggaccttgtccaaccggctttgaaagagttaatgggtcctgcgaagatgtggatgagtgcgcgactggcgggcgctgccagcacggcgagtgtgcaaacacgcgcggcgggtacacgtgtgtgtgccccgacggctttctgctcgactcgtcccgcagcagctgcatctcccaacacgtgatctcagaggccaaagggccctgcttccgcgtgctccgcgacggcggctgttcgctgcccattctgcggaacatcactaaacagatctgctgctgcagccgcgtaggcaaggcctggggccggggctgccagctctgcccacccttcggctcagagggtttccgggagatctgcccggctggtcctggttaccactactcggcctccgacctccgctacaacaccagacccctgggccaggagccaccccgagtgtcactcagccagcctcgtaccctgccagccacctctcggccatctgcaggctttctgcccacccatcgcctggagccccggcctgaaccccggcccgatccccggcccggccctgagcttcccttgcccagcatccctgcctggactggtcctgagattcctgaatcaggtccctcctccggcatgtgtcagcgcaacccccaggtctgcggcccaggacgctgcatttcccggcccagcggctacacctgcgcttgcgactctggcttccggctcagcccccagggcacccgatgcattgatgtggacgaatgtcgccgcgtgcccccgccctgtgctcccgggcgctgcgagaactcaccaggcagcttccgctgcgtgtgcggcccgggcttccgagccggcccacgggctgcggaatgcctggatgtggacgagtgccaccgcgtgccgccgccgtgtgacctcgggcgctgcgagaacacgccaggcagcttcctgtgcgtgtgccccgccgggtaccaggctgcaccgcacggagccagctgccaggatgtggatgaatgcacccagagcccaggcctgtgtggccgaggggcctgcaagaacctgcctggctctttccgctgtgtttgcccggctggcttccggggctcggcgtgtgaagaggatgtggatgagtgtgcccaggagccgccgccctgtgggcccggccgctgtgacaacacggcaggctcctttcactgtgcctgccctgctggcttccgctcccgagggcccggggccccctgccaagatgtggatgagtgtgcccgaagccccccaccctgcacctacggccggtgtgagaacacagaaggcagcttccagtgtgtctgccccatgggcttccaacccaacactgctggctccgagtgcgaggatgtggatgagtgtgagaaccacctcgcatgccctgggcaggagtgtgtgaactcgcccggctccttccagtgcaggacctgtccttctggccaccacctgcaccgtggcagatgcactgatgtggacgaatgcagttcgggtgcccctccctgtggtccccacggccactgcactaacaccgaaggctccttccgctgcagctgcgcgccaggctaccgggcgccgtcgggtcggcccgggccctgcgcagacgtgaacgagtgcctggagggcgatttctgcttccctcacggcgagtgcctcaacactgacggctcctttgcctgtacttgtgcccctggctaccgacccggaccccgcggagcctcttgcctcggttcgtacccgggctgatcctggccccggaaagggtgggcttagggcaggaaaaggcgggacggggagaagagggcgaaaaggggaaaacgagtttttagccggggtattccacgcctcccactgatgtcgtggtcccgggcctggcccaggggcccctttacatgccctctcccttttataaaattttccattaaaaaccacctattttctaaaaaatg

SEQ ID NO: 428838 - DNA, 443 bp, Homo sapiens
gacatcccaaggcctgacccagcagatcccatagtaccagacccacaggcccctgaggtctggtctctcatatgctcagctcctggtctctagaaccaccagacacagcctatgagatgtcctcccctaaatcctgggcccttagacctgaaatgccagttgctcagacctcaccatcctggccccagaccccctggtcacagccccacagacctccaagtcccattgccttagacaccctccaagtcccattgccttacacaccacatccgggtgcctaagaccccaacacacagccccagagattcccaagtcttggtttctacaacctctgagtccctcagtcctcagcccttaggaacccagttccaaagccccagtcctgggtcctcagacctccaggtcccagtgcctcagactgtctcccatgcatcctgccccct

SEQ ID NO: 428839 - DNA, 558 bp, Homo sapiens
agcaaaagcgccaggcctggctttgattgacccagcatgatcactgcctatgtctgaaccagagaaatgccgtcatctgtttggtcattcctggaacttgtgcccacctctcagagtagatatagccctactcaaagaacaggattgaaaatagaggagcacagggttcccaagggaaattcaaggtttctcactagaagaaaaacagatgatgggatctgggccattaaatatacacattatatttgaaagctgagactttcggacctttggaatcatagaagcttataaccactgagtccctctcccctgttgtctcctgcttacagatgtgaacgagtgtgaaacactacagggtgtatgtggagctgccctgtgtgaaaatgtcgaaggctccttcctctgtgtctgccccaacagcccggaagagtttgaccccatgactggacgctgtgttcccccacgaacttctgctggtgagactgatgtgtctatttaactgatggcggctggccccatgggaaaatcacgtggtctaatcattcctgatgtggacag

SEQ ID NO: 428840 - DNA, 702 bp, Homo sapiens
gctgtgattggcgggaagttcgcagcccgtggctggactgtggagaaagtgagtcggcctcgggcgggggcgggggcgggggcaggggcggggccggggctagcctgacccgctggacagaccgcccgcccggagcgggactcggcgcccgacacgatgccgaggcctggcaccagcggccgccgccccctcctgctggtgctgttgctgccgctcttcgcagccgccacctccgccgccagccccagccccagccccagccaggtcgtcgaggtcccgggggtccccagccgcccggccaggtaagccccctgcttccttgtgccccttccacccaataagtctggtggtccaggaggaccacggctttcggattcaggggaaactcgaacccactgcttcgatgtggagatgcaaagagggcccttggatttattaggcgccctcaatttgtaggggttagattcggggagtactgagatttttaggggaaagagtcccctttattgtggtggagaaggctaagtctccagagaatcctggggttagttcggggaaaggtctctagtttattggggcagggggtggggggctgagctctcctagaatgatagagacgtgtggggtcttcgagctaggatggagcgccccaagtttcttgggcgcgtaaggaggaaaggtgttgggggattctggagggac

SEQ ID NO: 428841 - DNA, 5325 bp, Homo sapiens
gctgtgattggcgggaagttcgcagcccgtggctggactgtggagaaagtgagtcggcctcgggcgggggcgggggcgggggcaggggcggggccggggctagcctgacccgctggacagaccgcccgcccggagcgggactcggcgcccgacacgatgccgaggcctggcaccagcggccgccgccccctcctgctggtgctgttgctgccgctcttcgcagccgccacctccgccgccagccccagccccagccccagccaggtcgtcgaggtcccgggggtccccagccgcccggccagcgttgctgtttgtcgctgctgcccgggccagacgtctaggaggagccgctgcatccgagtccctggctgtctccgaagccttctgcagggtccgaagctgccagcccaaaaagtgtgcaggcccccagcggtgcctgaacccagtgcctgcagtgcccagtcccagccccagcgtgaggaagagacaggtgtccctcaactggcagccactgacgctccaggaggccagagctctactgaagcggcggcggccccgggggccagggggccggggactactgagaaggaggcccccacagcgtgcccccgctggcaaggccccggtcctgtgtcccttgatctgtcacaatggcggtgtgtgcgtgaagcctgaccgctgcctctgtcccccggacttcgctggcaagttctgccagttgcactcctcgggcgcccggcccccggccccggctgtaccaggcctcacccgctccgtgtacactatgccactggccaaccaccgcgacgacgagcacggcgtggcatctatggtgagcgtccacgtggagcacccgcaggaggcgtcggtggtggtgcaccaggtggagcgtgtgtctggcccttgggaggaggcggacgctgaggcggtggcgcgggcggaagcggcggcgcgggcggaggcggcagcgccctacacggtgttggcacagagcgcgccgcgggaggacggctactcagatgcctcgggcttcggttactgctttcgggagctgcgcggaggcgaatgcgcgtccccgctgcccgggctccggacgcaggaggtctgctgccgaggggccggcttggcctggggcgttcacgactgtcagctgtgctccgagcgcctggggaactccgaaagagtgagcgccccagatggaccttgtccaaccggctttgaaagagttaatgggtcctgcgaagatgtggatgagtgcgcgactggcgggcgctgccagcacggcgagtgtgcaaacacgcgcggcgggtacacgtgtgtgtgccccgacggctttctgctcgactcgtcccgcagcagctgcatctcccaacacgtgatctcagaggccaaagggccctgcttccgcgtgctccgcgacggcggctgttcgctgcccattctgcggaacatcactaaacagatctgctgctgcagccgcgtaggcaaggcctggggccggggctgccagctctgcccacccttcggctcagagggtttccgggagatctgcccggctggtcctggttaccactactcggcctccgacctccgctacaacaccagacccctgggccaggagccaccccgagtgtcactcagccagcctcgtaccctgccagccacctctcggccatctgcaggctttctgcccacccatcgcctggagccccggcctgaaccccggcccgatccccggcccggccctgagcttcccttgcccagcatccctgcctggactggtcctgagattcctgaatcaggtccctcctccggcatgtgtcagcgcaacccccaggtctgcggcccaggacgctgcatttcccggcccagcggctacacctgcgcttgcgactctggcttccggctcagcccccagggcacccgatgcattgatgtggacgaatgtcgccgcgtgcccccgccctgtgctcccgggcgctgcgagaactcaccaggcagcttccgctgcgtgtgcggcccgggcttccgagccggcccacgggctgcggaatgcctggatgtggacgagtgccaccgcgtgccgccgccgtgtgacctcgggcgctgcgagaacacgccaggcagcttcctgtgcgtgtgccccgccgggtaccaggctgcaccgcacggagccagctgccaggatgtggatgaatgcacccagagcccaggcctgtgtggccgaggggcctgcaagaacctgcctggctctttccgctgtgtttgcccggctggcttccggggctcggcgtgtgaagaggatgtggatgagtgtgcccaggagccgccgccctgtgggcccggccgctgtgacaacacggcaggctcctttcactgtgcctgccctgctggcttccgctcccgagggcccggggccccctgccaagatgtggatgagtgtgcccgaagccccccaccctgcacctacggccggtgtgagaacacagaaggcagcttccagtgtgtctgccccatgggcttccaacccaacactgctggctccgagtgcgaggatgtggatgagtgtgagaaccacctcgcatgccctgggcaggagtgtgtgaactcgcccggctccttccagtgcaggacctgtccttctggccaccacctgcaccgtggcagatgcactgatgtggacgaatgcagttcgggtgcccctccctgtggtccccacggccactgcactaacaccgaaggctccttccgctgcagctgcgcgccaggctaccgggcgccgtcgggtcggcccgggccctgcgcagacgtgaacgagtgcctggagggcgatttctgcttccctcacggcgagtgcctcaacactgacggctcctttgcctgtacttgtgcccctggctaccgacccggaccccgcggagcctcttgcctcgacgttgacgagtgcagcgaggaggacctttgccagagcggcatctgtaccaacaccgacggctccttcgagtgcatctgtcctccgggacaccgcgctggcccggacctcgcctcctgcctcgacgtggacgaatgtcgcgagcgaggcccagccctgtgcgggtcgcagcgctgtgagaactctcccggctcctaccgctgtgtccgggactgcgatcctgggtaccacgcgggccccgagggcacctgtgacgatgtggatgagtgccaagaatatggtcccgagatttgtggagcccagcgttgtgagaacacccctggctcctaccgctgcacaccagcctgtgaccctggctatcagcccacgccagggggcggatgccaggatgtggacgaatgccggaaccggtccttctgcggtgcccacgccgtgtgccagaacctgcccggctccttccagtgcctctgtgaccagggttacgagggggcacgggatgggcgtcactgcgtggatgtgaacgagtgtgaaacactacagggtgtatgtggagctgccctgtgtgaaaatgtcgaaggctccttcctctgtgtctgccccaacagcccggaagagtttgaccccatgactggacgctgtgttcccccacgaacttctgctggcacgttcccaggctcgcagccccaggcacctgctagccccgttctgcccgccaggccacctccgccacccctgccccgccgacccagcacacctaggcagggccctgtggggagtgggcgccgggagtgctactttgacacagcggccccggatgcatgtgacaacatcctggctcggaatgtgacatggcaggagtgctgctgtactgtgggtgagggctggggcagcggctgccgcatccagcagtgcccgggcaccgagacagctgagtaccagtcattgtgccctcacggccggggctacctggcgcccagtggagacctgagcctccggagagacgtggacgaatgtcagctcttccgagaccaggtgtgcaagagtggcgtgtgtgtgaacacggccccgggctactcatgctattgcagcaacggctactactaccacacacagcggctggagtgcatcgacaatgacgagtgcgccgatgaggaaccggcctgtgagggcggccgctgtgtcaacactgtgggctcttatcactgtacctgcgagcccccactggtgctggatggctcgcagcgccgctgcgtctccaacgagagccagagcctcgatgacaatctgggagtgtgctggcaggaagtgggggctgacctcgtgtgcagccaccctcggctggaccgtcaggccacctacacagagtgctgctgcctgtatggagaggcctggggcatggactgcgccctctgccctgcgcaggactcagatgacttcgaggccctgtgcaatgtgctacgcccccccgcatatagccccccgcgaccaggtggctttggactcccctacgagtacggcccagacttaggtccaccttaccagggcctcccatatgggcctgagttgtacccaccacctgcgctaccctacgacccctacccaccgccacctgggcccttcgcccgccgggaggctccttatggggcaccccgcttcgacatgccagactttgaggacgatggtggcccctatggcgaatctgaggctcctgcgccacctggcccgggcacccgctggccctatcggtcccgggacacccgccgctccttcccagagcccgaggagcctcctgaaggtggaagctatgctggttccctggctgagccctacgaggagctggaggcggaggagtgcgggatcctggacggctgcaccaacggccgctgcgtgcgcgtccccgaaggcttcacctgccgttgcttcgacggctaccgcctggacatgacccgcatggcctgcgttgacatcaacgagtgtgatgaggccgaggctgcctccccgctgtgcgtcaacgcgcgttgcctcaacacggatggctccttccgctgcatctgccgcccgggattcgcacccacgcaccagccgcaccactgtgcgcccgcacggccccgggcctgagccctggcacccgctggccgcccacccgcgcccgccactcggggcccctgccgcgcatcctgcagcccgcttatgcgtatgtgcacggggccgcccgcctggacctggagaagggacctacggacgcctggaagctgcgacgccctgcactgctcccgcctccaccagcgcctcccactgatgtcgtggtcccgggcctggcccaggggcccctttacatgccctctcccttttataaaattttccattaaaaaccacctattttctaaaaaatg

SEQ ID NO: 428842 - DNA, 4774 bp, Homo sapiens
cgcccccagcaaatgctccagccacaggcgttgctgtttgtcgctgctgcccgggccagacgtctaggaggagccgctgcatccgagccttctgcagggtccgaagctgccagcccaaaaagtgtgcaggcccccagcggtgcctgaacccagtgcctgcagtgcccagtcccagccccagcgtgaggaagagacaggtgtccctcaactggcagccactgacgctccaggaggccagagctctactgaagcggcggcggccccgggggccagggggccggggactactgagaaggaggcccccacagcgtgcccccgctggcaaggccccggtcctgtgtcccttgatctgtcacaatggcggtgtgtgcgtgaagcctgaccgctgcctctgtcccccggacttcgctggcaagttctgccagttgcactcctcgggcgcccggcccccggccccggctgtaccaggcctcacccgctccgtgtacactatgccactggccaaccaccgcgacgacgagcacggcgtggcatctatggtgagcgtccacgtggagcacccgcaggaggcgtcggtggtggtgcaccaggtggagcgtgtgtctggcccttgggaggaggcggacgctgaggcggtggcgcgggcggaagcggcggcgcgggcggaggcggcagcgccctacacggtgttggcacagagcgcgccgcgggaggacggctactcagatgcctcgggcttcggttactgctttcgggagctgcgcggaggcgaatgcgcgtccccgctgcccgggctccggacgcaggaggtctgctgccgaggggccggcttggcctggggcgttcacgactgtcagctgtgctccgagcgcctggggaactccgaaagagtgagcgccccagatggaccttgtccaaccggctttgaaagagttaatgggtcctgcgaagatgtggatgagtgcgcgactggcgggcgctgccagcacggcgagtgtgcaaacacgcgcggcgggtacacgtgtgtgtgccccgacggctttctgctcgactcgtcccgcagcagctgcatctcccaacacgtgatctcagaggccaaagggccctgcttccgcgtgctccgcgacggcggctgttcgctgcccattctgcggaacatcactaaacagatctgctgctgcagccgcgtaggcaaggcctggggccggggctgccagctctgcccacccttcggctcagagggtttccgggagatctgcccggctggtcctggttaccactactcggcctccgacctccgctacaacaccagacccctgggccaggagccaccccgagtgtcactcagccagcctcgtaccctgccagccacctctcggccatctgcaggctttctgcccacccatcgcctggagccccggcctgaaccccggcccgatccccggcccggccctgagcttcccttgcccagcatccctgcctggactggtcctgagattcctgaatcaggtccctcctccggcatgtgtcagcgcaacccccaggtctgcggcccaggacgctgcatttcccggcccagcggctacacctgcgcttgcgactctggcttccggctcagcccccagggcacccgatgcattgatgtggacgaatgtcgccgcgtgcccccgccctgtgctcccgggcgctgcgagaactcaccaggcagcttccgctgcgtgtgcggcccgggcttccgagccggcccacgggctgcggaatgcctggatgtggacgagtgccaccgcgtgccgccgccgtgtgacctcgggcgctgcgagaacacgccaggcagcttcctgtgcgtgtgccccgccgggtaccaggctgcaccgcacggagccagctgccaggatgtggatgaatgcacccagagcccaggcctgtgtggccgaggggcctgcaagaacctgcctggctctttccgctgtgtttgcccggctggcttccggggctcggcgtgtgaagaggatgtggatgagtgtgcccaggagccgccgccctgtgggcccggccgctgtgacaacacggcaggctcctttcactgtgcctgccctgctggcttccgctcccgagggcccggggccccctgccaagatgtggatgagtgtgcccgaagccccccaccctgcacctacggccggtgtgagaacacagaaggcagcttccagtgtgtctgccccatgggcttccaacccaacactgctggctccgagtgcgaggatgtggatgagtgtgagaaccacctcgcatgccctgggcaggagtgtgtgaactcgcccggctccttccagtgcaggacctgtccttctggccaccacctgcaccgtggcagatgcactgatgtggacgaatgcagttcgggtgcccctccctgtggtccccacggccactgcactaacaccgaaggctccttccgctgcagctgcgcgccaggctaccgggcgccgtcgggtcggcccgggccctgcgcagacgtgaacgagtgcctggagggcgatttctgcttccctcacggcgagtgcctcaacactgacggctcctttgcctgtacttgtgcccctggctaccgacccggaccccgcggagcctcttgcctcgacgttgacgagtgcagcgaggaggacctttgccagagcggcatctgtaccaacaccgacggctccttcgagtgcatctgtcctccgggacaccgcgctggcccggacctcgcctcctgcctcgacgtggacgaatgtcgcgagcgaggcccagccctgtgcgggtcgcagcgctgtgagaactctcccggctcctaccgctgtgtccgggactgcgatcctgggtaccacgcgggccccgagggcacctgtgacgatgtgaacgagtgtgaaacactacagggtgtatgtggagctgccctgtgtgaaaatgtcgaaggctccttcctctgtgtctgccccaacagcccggaagagtttgaccccatgactggacgctgtgttcccccacgaacttctgctggcacgttcccaggctcgcagccccaggcacctgctagccccgttctgcccgccaggccacctccgccacccctgccccgccgacccagcacacctaggcagggccctgtggggagtgggcgccgggagtgctactttgacacagcggccccggatgcatgtgacaacatcctggctcggaatgtgacatggcaggagtgctgctgtactgtgggtgagggctggggcagcggctgccgcatccagcagtgcccgggcaccgagacagctgagtaccagtcattgtgccctcacggccggggctacctggcgcccagtggagacctgagcctccggagagacgtggacgaatgtcagctcttccgagaccaggtgtgcaagagtggcgtgtgtgtgaacacggccccgggctactcatgctattgcagcaacggctactactaccacacacagcggctggagtgcatcgacaatgacgagtgcgccgatgaggaaccggcctgtgagggcggccgctgtgtcaacactgtgggctcttatcactgtacctgcgagcccccactggtgctggatggctcgcagcgccgctgcgtctccaacgagagccagagcctcgatgacaatctgggagtgtgctggcaggaagtgggggctgacctcgtgtgcagccaccctcggctggaccgtcaggccacctacacagagtgctgctgcctgtatggagaggcctggggcatggactgcgccctctgccctgcgcaggactcagatgacttcgaggccctgtgcaatgtgctacgcccccccgcatatagccccccgcgaccaggtggctttggactcccctacgagtacggcccagacttaggtccaccttaccagggcctcccatatgggcctgagttgtacccaccacctgcgctaccctacgacccctacccaccgccacctgggcccttcgcccgccgggaggctccttatggggcaccccgcttcgacatgccagactttgaggacgatggtggcccctatggcgaatctgaggctcctgcgccacctggcccgggcacccgctggccctatcggtcccgggacacccgccgctccttcccagagcccgaggagcctcctgaaggtggaagctatgctggttccctggctgagccctacgaggagctggaggcggaggagtgcgggatcctggacggctgcaccaacggccgctgcgtgcgcgtccccgaaggcttcacctgccgttgcttcgacggctaccgcctggacatgacccgcatggcctgcgttgacatcaacgagtgtgatgaggccgaggctgcctccccgctgtgcgtcaacgcgcgttgcctcaacacggatggctccttccgctgcatctgccgcccgggattcgcacccacgcaccagccgcaccactgtgcgcccgcacggccccgggcctgagccctggcacccgctggccgcccacccgcgcccgccactcggggcccctgccgcgcatcctgcagcccgcttatgcgtatgtgcacggggccgcccgcctggacctggagaagggacctacggacgcctggaagctgcgacgccctgcactgctcccgcctccaccagcgcctcccactgatgtcgtggtcccgggcctggcccaggggcccctttacatgccctctcccttttataaaattttccattaaaaaccacctattttctaaaaaatg

SEQ ID NO: 428843 - DNA, 5174 bp, Homo sapiens
gctgtgattggcgggaagttcgcagcccgtggctggactgtggagaaagtgagtcggcctcgggcgggggcgggggcgggggcaggggcggggccggggctagcctgacccgctggacagaccgcccgcccggagcgggactcggcgcccgacacgatgccgaggcctggcaccagcggccgccgccccctcctgctggtgctgttgctgccgctcttcgcagccgccacctccgccgccagccccagccccagccccagccaggtcgtcgaggtcccgggggtccccagccgcccggccagcgttgctgtttgtcgctgctgcccgggccagacgtctaggaggagccgctgcatccgagccttctgcagggtccgaagctgccagcccaaaaagtgtgcaggcccccagcggtgcctgaacccagtgcctgcagtgcccagtcccagccccagcgtgaggaagagacaggtgtccctcaactggcagccactgacgctccaggaggccagagctctactgaagcggcggcggccccgggggccagggggccggggactactgagaaggaggcccccacagcgtgcccccgctggcaaggccccggtcctgtgtcccttgatctgtcacaatggcggtgtgtgcgtgaagcctgaccgctgcctctgtcccccggacttcgctggcaagttctgccagttgcactcctcgggcgcccggcccccggccccggctgtaccaggcctcacccgctccgtgtacactatgccactggccaaccaccgcgacgacgagcacggcgtggcatctatggtgagcgtccacgtggagcacccgcaggaggcgtcggtggtggtgcaccaggtggagcgtgtgtctggcccttgggaggaggcggacgctgaggcggtggcgcgggcggaagcggcggcgcgggcggaggcggcagcgccctacacggtgttggcacagagcgcgccgcgggaggacggctactcagatgcctcgggcttcggttactgctttcgggagctgcgcggaggcgaatgcgcgtccccgctgcccgggctccggacgcaggaggtctgctgccgaggggccggcttggcctggggcgttcacgactgtcagctgtgctccgagcgcctggggaactccgaaagagtgagcgccccagatggaccttgtccaaccggctttgaaagagttaatgggtcctgcgaagatgtggatgagtgcgcgactggcgggcgctgccagcacggcgagtgtgcaaacacgcgcggcgggtacacgtgtgtgtgccccgacggctttctgctcgactcgtcccgcagcagctgcatctcccaacacgtgatctcagaggccaaagggccctgcttccgcgtgctccgcgacggcggctgttcgctgcccattctgcggaacatcactaaacagatctgctgctgcagccgcgtaggcaaggcctggggccggggctgccagctctgcccacccttcggctcagagggtttccgggagatctgcccggctggtcctggttaccactactcggcctccgacctccgctacaacaccagacccctgggccaggagccaccccgagtgtcactcagccagcctcgtaccctgccagccacctctcggccatctgcaggctttctgcccacccatcgcctggagccccggcctgaaccccggcccgatccccggcccggccctgagcttcccttgcccagcatccctgcctggactggtcctgagattcctgaatcaggtccctcctccggcatgtgtcagcgcaacccccaggtctgcggcccaggacgctgcatttcccggcccagcggctacacctgcgcttgcgactctggcttccggctcagcccccagggcacccgatgcattgatgtggacgaatgtcgccgcgtgcccccgccctgtgctcccgggcgctgcgagaactcaccaggcagcttccgctgcgtgtgcggcccgggcttccgagccggcccacgggctgcggaatgcctggatgtggacgagtgccaccgcgtgccgccgccgtgtgacctcgggcgctgcgagaacacgccaggcagcttcctgtgcgtgtgccccgccgggtaccaggctgcaccgcacggagccagctgccaggatgtggatgaatgcacccagagcccaggcctgtgtggccgaggggcctgcaagaacctgcctggctctttccgctgtgtttgcccggctggcttccggggctcggcgtgtgaagaggatgtggatgagtgtgcccaggagccgccgccctgtgggcccggccgctgtgacaacacggcaggctcctttcactgtgcctgccctgctggcttccgctcccgagggcccggggccccctgccaagatgtggatgagtgtgcccgaagccccccaccctgcacctacggccggtgtgagaacacagaaggcagcttccagtgtgtctgccccatgggcttccaacccaacactgctggctccgagtgcgaggatgtggatgagtgtgagaaccacctcgcatgccctgggcaggagtgtgtgaactcgcccggctccttccagtgcaggacctgtccttctggccaccacctgcaccgtggcagatgcactgatgtggacgaatgcagttcgggtgcccctccctgtggtccccacggccactgcactaacaccgaaggctccttccgctgcagctgcgcgccaggctaccgggcgccgtcgggtcggcccgggccctgcgcagacgtgaacgagtgcctggagggcgatttctgcttccctcacggcgagtgcctcaacactgacggctcctttgcctgtacttgtgcccctggctaccgacccggaccccgcggagcctcttgcctcgacgttgacgagtgcagcgaggaggacctttgccagagcggcatctgtaccaacaccgacggctccttcgagtgcatctgtcctccgggacaccgcgctggcccggacctcgcctcctgcctcgacgtggacgaatgtcgcgagcgaggcccagccctgtgcgggtcgcagcgctgtgagaactctcccggctcctaccgctgtgtccgggactgcgatcctgggtaccacgcgggccccgagggcacctgtgacgatgtggacgaatgccggaaccggtccttctgcggtgcccacgccgtgtgccagaacctgcccggctccttccagtgcctctgtgaccagggttacgagggggcacgggatgggcgtcactgcgtggatgtgaacgagtgtgaaacactacagggtgtatgtggagctgccctgtgtgaaaatgtcgaaggctccttcctctgtgtctgccccaacagcccggaagagtttgaccccatgactggacgctgtgttcccccacgaacttctgctggcacgttcccaggctcgcagccccaggcacctgctagccccgttctgcccgccaggccacctccgccacccctgccccgccgacccagcacacctaggcagggccctgtggggagtgggcgccgggagtgctactttgacacagcggccccggatgcatgtgacaacatcctggctcggaatgtgacatggcaggagtgctgctgtactgtgggtgagggctggggcagcggctgccgcatccagcagtgcccgggcaccgagacagctgagtaccagtcattgtgccctcacggccggggctacctggcgcccagtggagacctgagcctccggagagacgtggacgaatgtcagctcttccgagaccaggtgtgcaagagtggcgtgtgtgtgaacacggccccgggctactcatgctattgcagcaacggctactactaccacacacagcggctggagtgcatcgacaatgacgagtgcgccgatgaggaaccggcctgtgagggcggccgctgtgtcaacactgtgggctcttatcactgtacctgcgagcccccactggtgctggatggctcgcagcgccgctgcgtctccaacgagagccagagcctcgatgacaatctgggagtgtgctggcaggaagtgggggctgacctcgtgtgcagccaccctcggctggaccgtcaggccacctacacagagtgctgctgcctgtatggagaggcctggggcatggactgcgccctctgccctgcgcaggactcagatgacttcgaggccctgtgcaatgtgctacgcccccccgcatatagccccccgcgaccaggtggctttggactcccctacgagtacggcccagacttaggtccaccttaccagggcctcccatatgggcctgagttgtacccaccacctgcgctaccctacgacccctacccaccgccacctgggcccttcgcccgccgggaggctccttatggggcaccccgcttcgacatgccagactttgaggacgatggtggcccctatggcgaatctgaggctcctgcgccacctggcccgggcacccgctggccctatcggtcccgggacacccgccgctccttcccagagcccgaggagcctcctgaaggtggaagctatgctggttccctggctgagccctacgaggagctggaggcggaggagtgcgggatcctggacggctgcaccaacggccgctgcgtgcgcgtccccgaaggcttcacctgccgttgcttcgacggctaccgcctggacatgacccgcatggcctgcgttgacatcaacgagtgtgatgaggccgaggctgcctccccgctgtgcgtcaacgcgcgttgcctcaacacggatggctccttccgctgcatctgccgcccgggattcgcacccacgcaccagccgcaccactgtgcgcccgcacggccccgggcctgagccctggcacccgctggccgcccacccgcgcccgccactcggggcccctgccgcgcatcctgcagcccgcttatgcgtatgtgcacggggccgcccgcctggacctggagaagggacctacggacgcctggaagctgcgacgccctgcactgctcccgcctccaccagcgcctcccactgatgtcgtggtcccgggcctggcccaggggcccctttacatgccctctcccttttataaaattttccattaaaaaccacctattttctaaaaaatg

SEQ ID NO: 428844 - DNA, 5434 bp, Homo sapiens
gctgtgattggcgggaagttcgcagcccgtggctggactgtggagaaagtgagtcggcctcgggcgggggcgggggcgggggcaggggcggggccggggctagcctgacccgctggacagaccgcccgcccggagcgggactcggcgcccgacacgatgccgaggcctggcaccagcggccgccgccccctcctgctggtgctgttgctgccgctcttcgcagccgccacctccgccgccagccccagccccagccccagccaggtcgtcgaggtcccgggggtccccagccgcccggccagcgttgctgtttgtcgctgctgcccgggccagacgtctaggaggagccgctgcatccgagccttctgcagggtccgaagctgccagcccaaaaagtgtgcaggcccccagcggtgcctgaacccagtgcctgcagtgcccagtcccagccccagcgtgaggaagagacaggtgtccctcaactggcagccactgacgctccaggaggccagagctctactgaagcggcggcggccccgggggccagggggccggggactactgagaaggaggcccccacagcgtgcccccgctggcaaggccccggtcctgtgtcccttgatctgtcacaatggcggtgtgtgcgtgaagcctgaccgctgcctctgtcccccggacttcgctggcaagttctgccagttgcactcctcgggcgcccggcccccggccccggctgtaccaggcctcacccgctccgtgtacactatgccactggccaaccaccgcgacgacgagcacggcgtggcatctatggtgagcgtccacgtggagcacccgcaggaggcgtcggtggtggtgcaccaggtggagcgtgtgtctggcccttgggaggaggcggacgctgaggcggtggcgcgggcggaagcggcggcgcgggcggaggcggcagcgccctacacggtgttggcacagagcgcgccgcgggaggacggctactcagatgcctcgggcttcggttactgctttcgggagctgcgcggaggcgaatgcgcgtccccgctgcccgggctccggacgcaggaggtctgctgccgaggggccggcttggcctggggcgttcacgactgtcagctgtgctccgagcgcctggggaactccgaaagagtgagcgccccagatggaccttgtccaaccggctttgaaagagttaatgggtcctgcgaagatgtggatgagtgcgcgactggcgggcgctgccagcacggcgagtgtgcaaacacgcgcggcgggtacacgtgtgtgtgccccgacggctttctgctcgactcgtcccgcagcagctgcatctcccaacacgtgatctcagaggccaaagggccctgcttccgcgtgctccgcgacggcggctgttcgctgcccattctgcggaacatcactaaacagatctgctgctgcagccgcgtaggcaaggcctggggccggggctgccagctctgcccacccttcggctcagagggtttccgggagatctgcccggctggtcctggttaccactactcggcctccgacctccgctacaacaccagacccctgggccaggagccaccccgagtgtcactcagccagcctcgtaccctgccagccacctctcggccatctgcaggctttctgcccacccatcgcctggagccccggcctgaaccccggcccgatccccggcccggccctgagcttcccttgcccagcatccctgcctggactggtcctgagattcctgaatcaggtccctcctccggcatgtgtcagcgcaacccccaggtctgcggcccaggacgctgcatttcccggcccagcggctacacctgcgcttgcgactctggcttccggctcagcccccagggcacccgatgcattgatgtggacgaatgtcgccgcgtgcccccgccctgtgctcccgggcgctgcgagaactcaccaggcagcttccgctgcgtgtgcggcccgggcttccgagccggcccacgggctgcggaatgcctggatgtggacgagtgccaccgcgtgccgccgccgtgtgacctcgggcgctgcgagaacacgccaggcagcttcctgtgcgtgtgccccgccgggtaccaggctgcaccgcacggagccagctgccaggatgtggatgaatgcacccagagcccaggcctgtgtggccgaggggcctgcaagaacctgcctggctctttccgctgtgtttgcccggctggcttccggggctcggcgtgtgaagaggatgtggatgagtgtgcccaggagccgccgccctgtgggcccggccgctgtgacaacacggcaggctcctttcactgtgcctgccctgctggcttccgctcccgagggcccggggccccctgccaagatgtggatgagtgtgcccgaagccccccaccctgcacctacggccggtgtgagaacacagaaggcagcttccagtgtgtctgccccatgggcttccaacccaacactgctggctccgagtgcgaggatgtggatgagtgtgagaaccacctcgcatgccctgggcaggagtgtgtgaactcgcccggctccttccagtgcaggacctgtccttctggccaccacctgcaccgtggcagatgcactgatgtggacgaatgcagttcgggtgcccctccctgtggtccccacggccactgcactaacaccgaaggctccttccgctgcagctgcgcgccaggctaccgggcgccgtcgggtcggcccgggccctgcgcagacgtgaacgagtgcctggagggcgatttctgcttccctcacggcgagtgcctcaacactgacggctcctttgcctgtacttgtgcccctggctaccgacccggaccccgcggagcctcttgcctcggttcgtacccgggctgatcctggccccggaaagggtgggcttagggcaggaaaaggcgggacggggagaagagggcgaaaaggggaaaacgagtttttagccggggtattccagcaggatcagggggcagctggtgggagtctcgaggcagtgagggggggcggggcgtggagatgaaagggccgagtctgggtatttggaccgtgattgtaaagaagctgttctaaacccgtcggggggcggtgtttgcagggagggaagtagcgtgaggcaggttggggaaggcgtgagaggcctaggagagccgaggggcggtggaggggtgtggcctagaatgttaggcggagcgggaggtgggccgggccttcggacgccctgtcccgcagacgttgacgagtgcagcgaggaggacctttgccagagcggcatctgtaccaacaccgacggctccttcgagtgcatctgtcctccgggacaccgcgctggcccggacctcgcctcctgcctcgacgtggacgaatgtcgcgagcgaggcccagccctgtgcgggtcgcagcgctgtgagaactctcccggctcctaccgctgtgtccgggactgcgatcctgggtaccacgcgggccccgagggcacctgtgacgatgtgaacgagtgtgaaacactacagggtgtatgtggagctgccctgtgtgaaaatgtcgaaggctccttcctctgtgtctgccccaacagcccggaagagtttgaccccatgactggacgctgtgttcccccacgaacttctgctggcacgttcccaggctcgcagccccaggcacctgctagccccgttctgcccgccaggccacctccgccacccctgccccgccgacccagcacacctaggcagggccctgtggggagtgggcgccgggagtgctactttgacacagcggccccggatgcatgtgacaacatcctggctcggaatgtgacatggcaggagtgctgctgtactgtgggtgagggctggggcagcggctgccgcatccagcagtgcccgggcaccgagacagctgagtaccagtcattgtgccctcacggccggggctacctggcgcccagtggagacctgagcctccggagagacgtggacgaatgtcagctcttccgagaccaggtgtgcaagagtggcgtgtgtgtgaacacggccccgggctactcatgctattgcagcaacggctactactaccacacacagcggctggagtgcatcgacaatgacgagtgcgccgatgaggaaccggcctgtgagggcggccgctgtgtcaacactgtgggctcttatcactgtacctgcgagcccccactggtgctggatggctcgcagcgccgctgcgtctccaacgagagccagagcctcgatgacaatctgggagtgtgctggcaggaagtgggggctgacctcgtgtgcagccaccctcggctggaccgtcaggccacctacacagagtgctgctgcctgtatggagaggcctggggcatggactgcgccctctgccctgcgcaggactcagatgacttcgaggccctgtgcaatgtgctacgcccccccgcatatagccccccgcgaccaggtggctttggactcccctacgagtacggcccagacttaggtccaccttaccagggcctcccatatgggcctgagttgtacccaccacctgcgctaccctacgacccctacccaccgccacctgggcccttcgcccgccgggaggctccttatggggcaccccgcttcgacatgccagactttgaggacgatggtggcccctatggcgaatctgaggctcctgcgccacctggcccgggcacccgctggccctatcggtcccgggacacccgccgctccttcccagagcccgaggagcctcctgaaggtggaagctatgctggttccctggctgagccctacgaggagctggaggcggaggagtgcgggatcctggacggctgcaccaacggccgctgcgtgcgcgtccccgaaggcttcacctgccgttgcttcgacggctaccgcctggacatgacccgcatggcctgcgttgacatcaacgagtgtgatgaggccgaggctgcctccccgctgtgcgtcaacgcgcgttgcctcaacacggatggctccttccgctgcatctgccgcccgggattcgcacccacgcaccagccgcaccactgtgcgcccgcacggccccgggcctgagccctggcacccgctggccgcccacccgcgcccgccactcggggcccctgccgcgcatcctgcagcccgcttatgcgtatgtgcacggggccgcccgcctggacctggagaagggacctacggacgcctggaagctgcgacgccctgcactgctcccgcctccaccagcgcctcccactgatgtcgtggtcccgggcctggcccaggggcccctttacatgccctctcccttttataaaattttccattaaaaaccacctattttctaaaaaatg

SEQ ID NO: 428845 - DNA, 5692 bp, Homo sapiens
gctgtgattggcgggaagttcgcagcccgtggctggactgtggagaaagtgagtcggcctcgggcgggggcgggggcgggggcaggggcggggccggggctagcctgacccgctggacagaccgcccgcccggagcgggactcggcgcccgacacgatgccgaggcctggcaccagcggccgccgccccctcctgctggtgctgttgctgccgctcttcgcagccgccacctccgccgccagccccagccccagccccagccaggtcgtcgaggtcccgggggtccccagccgcccggccagcgttgctgtttgtcgctgctgcccgggccagacgtctaggaggagccgctgcatccgagccttctgcagggtccgaagctgccagcccaaaaagtgtgcaggcccccagcggtgcctgaacccagtgcctgcagtgcccagtcccagccccagcgtgaggaagagacaggtgtccctcaactggcagccactgacgctccaggaggccagagctctactgaagcggcggcggccccgggggccagggggccggggactactgagaaggaggcccccacagcgtgcccccgctggcaaggccccggtcctgtgtcccttgatctgtcacaatggcggtgtgtgcgtgaagcctgaccgctgcctctgtcccccggacttcgctggcaagttctgccagttgcactcctcgggcgcccggcccccggccccggctgtaccaggcctcacccgctccgtgtacactatgccactggccaaccaccgcgacgacgagcacggcgtggcatctatggtgagcgtccacgtggagcacccgcaggaggcgtcggtggtggtgcaccaggtggagcgtgtgtctggcccttgggaggaggcggacgctgaggcggtggcgcgggcggaagcggcggcgcgggcggaggcggcagcgccctacacggtgttggcacagagcgcgccgcgggaggacggctactcagatgcctcgggcttcggttactgctttcgggagctgcgcggaggcgaatgcgcgtccccgctgcccgggctccggacgcaggaggtctgctgccgaggggccggcttggcctggggcgttcacgactgtcagctgtgctccgagcgcctggggaactccgaaagagtgagcgccccagatggaccttgtccaaccggctttgaaagagttaatgggtcctgcgaagatgtggatgagtgcgcgactggcgggcgctgccagcacggcgagtgtgcaaacacgcgcggcgggtacacgtgtgtgtgccccgacggctttctgctcgactcgtcccgcagcagctgcatctcccaacacgtgatctcagaggccaaagggccctgcttccgcgtgctccgcgacggcggctgttcgctgcccattctgcggaacatcactaaacagatctgctgctgcagccgcgtaggcaaggcctggggccggggctgccagctctgcccacccttcggctcagagggtttccgggagatctgcccggctggtcctggttaccactactcggcctccgacctccgctacaacaccagacccctgggccaggagccaccccgagtgtcactcagccagcctcgtaccctgccagccacctctcggccatctgcaggctttctgcccacccatcgcctggagccccggcctgaaccccggcccgatccccggcccggccctgagcttcccttgcccagcatccctgcctggactggtcctgagattcctgaatcaggtccctcctccggcatgtgtcagcgcaacccccaggtctgcggcccaggacgctgcatttcccggcccagcggctacacctgcgcttgcgactctggcttccggctcagcccccagggcacccgatgcattgatgtggacgaatgtcgccgcgtgcccccgccctgtgctcccgggcgctgcgagaactcaccaggcagcttccgctgcgtgtgcggcccgggcttccgagccggcccacgggctgcggaatgcctggatgtggacgagtgccaccgcgtgccgccgccgtgtgacctcgggcgctgcgagaacacgccaggcagcttcctgtgcgtgtgccccgccgggtaccaggctgcaccgcacggagccagctgccaggatgtggatgaatgcacccagagcccaggcctgtgtggccgaggggcctgcaagaacctgcctggctctttccgctgtgtttgcccggctggcttccggggctcggcgtgtgaagaggatgtggatgagtgtgcccaggagccgccgccctgtgggcccggccgctgtgacaacacggcaggctcctttcactgtgcctgccctgctggcttccgctcccgagggcccggggccccctgccaagatgtggatgagtgtgcccgaagccccccaccctgcacctacggccggtgtgagaacacagaaggcagcttccagtgtgtctgccccatgggcttccaacccaacactgctggctccgagtgcgaggatgtggatgagtgtgagaaccacctcgcatgccctgggcaggagtgtgtgaactcgcccggctccttccagtgcaggacctgtccttctggccaccacctgcaccgtggcagatgcactgatgtggacgaatgcagttcgggtgcccctccctgtggtccccacggccactgcactaacaccgaaggctccttccgctgcagctgcgcgccaggctaccgggcgccgtcgggtcggcccgggccctgcgcagacgtgaacgagtgcctggagggcgatttctgcttccctcacggcgagtgcctcaacactgacggctcctttgcctgtacttgtgcccctggctaccgacccggaccccgcggagcctcttgcctcggttcgtacccgggctgatcctggccccggaaagggtgggcttagggcaggaaaaggcgggacggggagaagagggcgaaaaggggaaaacgagtttttagccggggtattccagcaggatcagggggcagctggtgggagtctcgaggcagtgagggggggcggggcgtggagatgaaagggccgagtctgggtatttggaccgtgattgtaaagaagctgttctaaacccgtcggggggcggtgtttgcagggagggaagtagcgtgaggcaggttggggaaggcgtgagaggcctaggagagccgaggggcggtggaggggtgtggcctagaatgttaggcggagcgggaggtgggccgggccttcggacgccctgtcccgcagacgttgacgagtgcagcgaggaggacctttgccagagcggcatctgtaccaacaccgacggctccttcgagtgcatctgtcctccgggacaccgcgctggcccggacctcgcctcctgcctcgacgtggacgaatgtcgcgagcgaggcccagccctgtgcgggtcgcagcgctgtgagaactctcccggctcctaccgctgtgtccgggactgcgatcctgggtaccacgcgggccccgagggcacctgtgacgatgtggatgagtgccaagaatatggtcccgagatttgtggagcccagcgttgtgagaacacccctggctcctaccgctgcacaccagcctgtgaccctggctatcagcccacgccagggggcggatgccaggatgtggacgaatgccggaaccggtccttctgcggtgcccacgccgtgtgccagaacctgcccggctccttccagtgcctctgtgaccagggttacgagggggcacgggatgggcgtcactgcgtggatgtgaacgagtgtgaaacactacagggtgtatgtggagctgccctgtgtgaaaatgtcgaaggctccttcctctgtgtctgccccaacagcccggaagagtttgaccccatgactggacgctgtgttcccccacgaacttctgctggcacgttcccaggctcgcagccccaggcacctgctagccccgttctgcccgccaggccacctccgccacccctgccccgccgacccagcacacctaggcagggccctgtggggagtgggcgccgggagtgctactttgacacagcggccccggatgcatgtgacaacatcctggctcggaatgtgacatggcaggagtgctgctgtactgtgggtgagggctggggcagcggctgccgcatccagcagtgcccgggcaccgagacagctgagtaccagtcattgtgccctcacggccggggctacctggcgcccagtggagacctgagcctccggagagacgtggacgaatgtcagctcttccgagaccaggtgtgcaagagtggcgtgtgtgtgaacacggccccgggctactcatgctattgcagcaacggctactactaccacacacagcggctggagtgcatcgacaatgacgagtgcgccgatgaggaaccggcctgtgagggcggccgctgtgtcaacactgtgggctcttatcactgtacctgcgagcccccactggtgctggatggctcgcagcgccgctgcgtctccaacgagagccagagcctcgatgacaatctgggagtgtgctggcaggaagtgggggctgacctcgtgtgcagccaccctcggctggaccgtcaggccacctacacagagtgctgctgcctgtatggagaggcctggggcatggactgcgccctctgccctgcgcaggactcagatgacttcgaggccctgtgcaatgtgctacgcccccccgcatatagccccccgcgaccaggtggctttggactcccctacgagtacggcccagacttaggtccaccttaccagggcctcccatatgggcctgagttgtacccaccacctgcgctaccctacgacccctacccaccgccacctgggcccttcgcccgccgggaggctccttatggggcaccccgcttcgacatgccagactttgaggacgatggtggcccctatggcgaatctgaggctcctgcgccacctggcccgggcacccgctggccctatcggtcccgggacacccgccgctccttcccagagcccgaggagcctcctgaaggtggaagctatgctggttccctggctgagccctacgaggagctggaggcggaggagtgcgggatcctggacggctgcaccaacggccgctgcgtgcgcgtccccgaaggcttcacctgccgttgcttcgacggctaccgcctggacatgacccgcatggcctgcgttgacatcaacgagtgtgatgaggccgaggctgcctccccgctgtgcgtcaacgcgcgttgcctcaacacggatggctccttccgctgcatctgccgcccgggattcgcacccacgcaccagccgcaccactgtgcgcccgcacggccccgggcctgagccctggcacccgctggccgcccacccgcgcccgccactcggggcccctgccgcgcatcctgcagcccgcttatgcgtatgtgcacggggccgcccgcctggacctggagaagggacctacggacgcctggaagctgcgacgccctgcactgctcccgcctccaccagcgcctcccactgatgtcgtggtcccgggcctggcccaggggcccctttacatgccctctcccttttataaaattttccattaaaaaccacctattttctaaaaaatg

SEQ ID NO: 428846 - DNA, 2070 bp, Homo sapiens
ttgcgtatctaagatcctatccggtctgggtacagcggccgaggcctgtagattgatagatgtggatgagtgccaagaatatggtcccgagatttgtggagcccagcgttgtgagaacacccctggctcctaccgctgcacaccagcctgtgaccctggctatcagcccacgccagggggcggatgccaggatgtgaacgagtgtgaaacactacagggtgtatgtggagctgccctgtgtgaaaatgtcgaaggctccttcctctgtgtctgccccaacagcccggaagagtttgaccccatgactggacgctgtgttcccccacgaacttctgctggcacgttcccaggctcgcagccccaggcacctgctagccccgttctgcccgccaggccacctccgccacccctgccccgccgacccagcacacctaggcagggccctgtggggagtgggcgccgggagtgctactttgacacagcggccccggatgcatgtgacaacatcctggctcggaatgtgacatggcaggagtgctgctgtactgtgggtgagggctggggcagcggctgccgcatccagcagtgcccgggcaccgagacagctgagtaccagtcattgtgccctcacggccggggctacctggcgcccagtggagacctgagcctccggagagacgtggacgaatgtcagctcttccgagaccaggtgtgcaagagtggcgtgtgtgtgaacacggccccgggctactcatgctattgcagcaacggctactactaccacacacagcggctggagtgcatcgacaatgacgagtgcgccgatgaggaaccggcctgtgagggcggccgctgtgtcaacactgtgggctcttatcactgtacctgcgagcccccactggtgctggatggctcgcagcgccgctgcgtctccaacgagagccagagcctcgatgacaatctgggagtgtgctggcaggaagtgggggctgacctcgtgtgcagccaccctcggctggaccgtcaggccacctacacagagtgctgctgcctgtatggagaggcctggggcatggactgcgccctctgccctgcgcaggactcagatgacttcgaggccctgtgcaatgtgctacgcccccccgcatatagccccccgcgaccaggtggctttggactcccctacgagtacggcccagacttaggtccaccttaccagggcctcccatatgggcctgagttgtacccaccacctgcgctaccctacgacccctacccaccgccacctgggcccttcgcccgccgggaggctccttatggggcaccccgcttcgacatgccagactttgaggacgatggtggcccctatggcgaatctgaggctcctgcgccacctggcccgggcacccgctggccctatcggtcccgggacacccgccgctccttcccagagcccgaggagcctcctgaaggtggaagctatgctggttccctggctgagccctacgaggagctggaggcggaggagtgcgggatcctggacggctgcaccaacggccgctgcgtgcgcgtccccgaaggcttcacctgccgttgcttcgacggctaccgcctggacatgacccgcatggcctgcgttgacatcaacgagtgtgatgaggccgaggctgcctccccgctgtgcgtcaacgcgcgttgcctcaacacggatggctccttccgctgcatctgccgcccgggattcgcacccacgcaccagccgcaccactgtgcgcccgcacggccccgggcctgagccctggcacccgctggccgcccacccgcgcccgccactcggggcccctgccgcgcatcctgcagcccgcttatgcgtatgtgcacggggccgcccgcctggacctggagaagggacctacggacgcctggaagctgcgacgccctgcactgctcccgcctccaccagcgcctcccactgatgtcgtggtcccgggcctggcccaggggcccctttacatgccctctcccttttataaaattttccattaaaaaccacctattttctaaaaaatg

SEQ ID NO: 428847 - DNA, 4617 bp, Homo sapiens
  misc_feature (4203)..(4203): n is a, c, g, or t
gctgtgattggcgggaagttcgcagcccgtggctggactgtggagaaagtgagtcggcctcgggcgggggcgggggcgggggcaggggcggggccggggctagcctgacccgctggacagaccgcccgcccggagcgggactcggcgcccgacacgatgccgaggcctggcaccagcggccgccgccccctcctgctggtgctgttgctgccgctcttcgcagccgccacctccgccgccagccccagccccagccccagccaggtcgtcgaggtcccgggggtccccagccgcccggccagcgttgctgtttgtcgctgctgcccgggccagacgtctaggaggagccgctgcatccgagccttctgcagggtccgaagctgccagcccaaaaagtgtgcaggcccccagcggtgcctgaacccagtgcctgcagtgcccagtcccagccccagcgtgaggaagagacaggtgtccctcaactggcagccactgacgctccaggaggccagagctctactgaagcggcggcggccccgggggccagggggccggggactactgagaaggaggcccccacagcgtgcccccgctggcaaggccccggtcctgtgtcccttgatctgtcacaatggcggtgtgtgcgtgaagcctgaccgctgcctctgtcccccggacttcgctggcaagttctgccagttgcactcctcgggcgcccggcccccggccccggctgtaccaggcctcacccgctccgtgtacactatgccactggccaaccaccgcgacgacgagcacggcgtggcatctatggtgagcgtccacgtggagcacccgcaggaggcgtcggtggtggtgcaccaggtggagcgtgtgtctggcccttgggaggaggcggacgctgaggcggtggcgcgggcggaagcggcggcgcgggcggaggcggcagcgccctacacggtgttggcacagagcgcgccgcgggaggacggctactcagatgcctcgggcttcggttactgctttcgggagctgcgcggaggcgaatgcgcgtccccgctgcccgggctccggacgcaggaggtctgctgccgaggggccggcttggcctggggcgttcacgactgtcagctgtgctccgagcgcctggggaactccgaaagagtgagcgccccagatggaccttgtccaaccggctttgaaagagttaatgggtcctgcgaagatgtggatgagtgcgcgactggcgggcgctgccagcacggcgagtgtgcaaacacgcgcggcgggtacacgtgtgtgtgccccgacggctttctgctcgactcgtcccgcagcagctgcatctcccaacacgtgatctcagaggccaaagggccctgcttccgcgtgctccgcgacggcggctgttcgctgcccattctgcggaacatcactaaacagatctgctgctgcagccgcgtaggcaaggcctggggccggggctgccagctctgcccacccttcggctcagagggtttccgggagatctgcccggctggtcctggttaccactactcggcctccgacctccgctacaacaccagacccctgggccaggagccaccccgagtgtcactcagccagcctcgtaccctgccagccacctctcggccatctgcaggctttctgcccacccatcgcctggagccccggcctgaaccccggcccgatccccggcccggccctgagcttcccttgcccagcatccctgcctggactggtcctgagattcctgaatcaggtccctcctccggcatgtgtcagcgcaacccccaggtctgcggcccaggacgctgcatttcccggcccagcggctacacctgcgcttgcgactctggcttccggctcagcccccagggcacccgatgcattgatgtggacgaatgtcgccgcgtgcccccgccctgtgctcccgggcgctgcgagaactcaccaggcagcttccgctgcgtgtgcggcccgggcttccgagccggcccacgggctgcggaatgcctggatgtggacgagtgccaccgcgtgccgccgccgtgtgacctcgggcgctgcgagaacacgccaggcagcttcctgtgcgtgtgccccgccgggtaccaggctgcaccgcacggagccagctgccaggatgtggatgaatgcacccagagcccaggcctgtgtggccgaggggcctgcaagaacctgcctggctctttccgctgtgtttgcccggctggcttccggggctcggcgtgtgaagaggatgtggatgagtgtgcccaggagccgccgccctgtgggcccggccgctgtgacaacacggcaggctcctttcactgtgcctgccctgctggcttccgctcccgagggcccggggccccctgccaagatgtggatgagtgtgcccgaagccccccaccctgcacctacggccggtgtgagaacacagaaggcagcttccagtgtgtctgccccatgggcttccaacccaacactgctggctccgagtgcgaggatgtggatgagtgtgagaaccacctcgcatgccctgggcaggagtgtgtgaactcgcccggctccttccagtgcaggacctgtccttctggccaccacctgcaccgtggcagatgcactgatgtggacgaatgcagttcgggtgcccctccctgtggtccccacggccactgcactaacaccgaaggctccttccgctgcagctgcgcgccaggctaccgggcgccgtcgggtcggcccgggccctgcgcagacgtgaacgagtgcctggagggcgatttctgcttccctcacggcgagtgcctcaacactgacggctcctttgcctgtacttgtgcccctggctaccgacccggaccccgcggagcctcttgcctcgacgttgacgagtgcagcgaggaggacctttgccagagcggcatctgtaccaacaccgacggctccttcgagtgcatctgtcctccgggacaccgcgctggcccggacctcgcctcctgcctcgacgtggacgaatgtcgcgagcgaggcccagccctgtgcgggtcgcagcgctgtgagaactctcccggctcctaccgctgtgtccgggactgcgatcctgggtaccacgcgggccccgagggcacctgtgacgatgtgaacgagtgtgaaacactacagggtgtatgtggagctgccctgtgtgaaaatgtcgaaggctccttcctctgtgtctgccccaacagcccggaagagtttgaccccatgactggacgctgtgttcccccacgaacttctgctggcacgttcccaggctcgcagccccaggcacctgctagccccgttctgcccgccaggccacctccgccacccctgccccgccgacccagcacacctaggcagggccctgtggggagtgggcgccgggagtgctactttgacacagcggccccggatgcatgtgacaacatcctggctcggaatgtgacatggcaggagtgctgctgtactgtgggtgagggctggggcagcggctgccgcatccagcagtgcccgggcaccgagacagctgagtaccagtcattgtgccctcacggccggggctacctggcgcccagtggagacctgagcctccggagagacgtggacgaatgtcagctcttccgagaccaggtgtgcaagagtggcgtgtgtgtgaacacggccccgggctactcatgctattgcagcaacggctactactaccacacacagcggctggagtgcatcgacaatgacgagtgcgccgatgaggaaccggcctgtgagggcggccgctgtgtcaacactgtgggctcttatcactgtacctgcgagcccccactggtgctggatggctcgcagcgccgctgcgtctccaacgagagccagagcctcgatgacaatctgggagtgtgctggcaggaagtgggggctgacctcgtgtgcagccaccctcggctggaccgtcaggccacctacacagagtgctgctgcctgtatggagaggcctggggcatggactgcgccctctgccctgcgcaggactcagatgacttcgaggccctgtgcaatgtgctacgcccccccgcatatagccccccgcgaccaggtggctttggactcccctacgagtacggcccagacttaggtccacctgtgacgatgtgnacgagtgtgaaacactacagggtgtatgtggagctgccctgtgtgaaaatgtcgaaggctccttcctctctgctgcccagcagctgggcttccacctgtgcctcatgggctggctggccaatggctccactgcccaccctgtggttttccctgtggcggactgtggcaatggtcgggtgggcgtagtcagcctgggtgcccgcaagaacctctcagaacgctgggatgcctactgcttccgtgtgcaagatgtggcctgccgatgccgaaatggcttcgtgggtgacgggatcagcacgtgcaatgggaagctgctggatgtgctggctgccactgccaacttctccaccttctatgggatgctattgggctatgccaatgccacccagccggggtctcgactttcctgaactt

SEQ ID NO: 428848 - DNA, 4184 bp, Homo sapiens
gctgtgattggcgggaagttcgcagcccgtggctggactgtggagaaagtgagtcggcctcgggcgggggcgggggcgggggcaggggcggggccggggctagcctgacccgctggacagaccgcccgcccggagcgggactcggcgcccgacacgatgccgaggcctggcaccagcggccgccgccccctcctgctggtgctgttgctgccgctcttcgcagccgccacctccgccgccagccccagccccagccccagccaggtcgtcgaggtcccgggggtccccagccgcccggccagcgttgctgtttgtcgctgctgcccgggccagacgtctaggaggagccgctgcatccgagccttctgcagggtccgaagctgccagcccaaaaagtgtgcaggcccccagcggtgcctgaacccagtgcctgcagtgcccagtcccagccccagcgtgaggaagagacaggtgtccctcaactggcagccactgacgctccaggaggccagagctctactgaagcggcggcggccccgggggccagggggccggggactactgagaaggaggcccccacagcgtgcccccgctggcaaggccccggtcctgtgtcccttgatctgtcacaatggcggtgtgtgcgtgaagcctgaccgctgcctctgtcccccggacttcgctggcaagttctgccagttgcactcctcgggcgcccggcccccggccccggctgtaccaggcctcacccgctccgtgtacactatgccactggccaaccaccgcgacgacgagcacggcgtggcatctatggtgagcgtccacgtggagcacccgcaggaggcgtcggtggtggtgcaccaggtggagcgtgtgtctggcccttgggaggaggcggacgctgaggcggtggcgcgggcggaagcggcggcgcgggcggaggcggcagcgccctacacggtgttggcacagagcgcgccgcgggaggacggctactcagatgcctcgggcttcggttactgctttcgggagctgcgcggaggcgaatgcgcgtccccgctgcccgggctccggacgcaggaggtctgctgccgaggggccggcttggcctggggcgttcacgactgtcagctgtgctccgagcgcctggggaactccgaaagagtgagcgccccagatggaccttgtccaaccggctttgaaagagttaatgggtcctgcgaagatgtggatgagtgcgcgactggcgggcgctgccagcacggcgagtgtgcaaacacgcgcggcgggtacacgtgtgtgtgccccgacggctttctgctcgactcgtcccgcagcagctgcatctcccaacacgtgatctcagaggccaaagggccctgcttccgcgtgctccgcgacggcggctgttcgctgcccattctgcggaacatcactaaacagatctgctgctgcagccgcgtaggcaaggcctggggccggggctgccagctctgcccacccttcggctcagagggtttccgggagatctgcccggctggtcctggttaccactactcggcctccgacctccgctacaacaccagacccctgggccaggagccaccccgagtgtcactcagccagcctcgtaccctgccagccacctctcggccatctgcaggctttctgcccacccatcgcctggagccccggcctgaaccccggcccgatccccggcccggccctgagcttcccttgcccagcatccctgcctggactggtcctgagattcctgaatcaggtccctcctccggcatgtgtcagcgcaacccccaggtctgcggcccaggacgctgcatttcccggcccagcggctacacctgcgcttgcgactctggcttccggctcagcccccagggcacccgatgcattgatgtggacgaatgtcgccgcgtgcccccgccctgtgctcccgggcgctgcgagaactcaccaggcagcttccgctgcgtgtgcggcccgggcttccgagccggcccacgggctgcggaatgcctggatgtggacgagtgccaccgcgtgccgccgccgtgtgacctcgggcgctgcgagaacacgccaggcagcttcctgtgcgtgtgccccgccgggtaccaggctgcaccgcacggagccagctgccaggatgtggatgaatgcacccagagcccaggcctgtgtggccgaggggcctgcaagaacctgcctggctctttccgctgtgtttgcccggctggcttccggggctcggcgtgtgaagaggatgtggatgagtgtgcccaggagccgccgccctgtgggcccggccgctgtgacaacacggcaggctcctttcactgtgcctgccctgctggcttccgctcccgagggcccggggccccctgccaagatgtggatgagtgtgcccgaagccccccaccctgcacctacggccggtgtgagaacacagaaggcagcttccagtgtgtctgccccatgggcttccaacccaacactgctggctccgagtgcgaggatgtggatgagtgtgagaaccacctcgcatgccctgggcaggagtgtgtgaactcgcccggctccttccagtgcaggacctgtccttctggccaccacctgcaccgtggcagatgcactgatgtggacgaatgcagttcgggtgcccctccctgtggtccccacggccactgcactaacaccgaaggctccttccgctgcagctgcgcgccaggctaccgggcgccgtcgggtcggcccgggccctgcgcagacgtgaacgagtgcctggagggcgatttctgcttccctcacggcgagtgcctcaacactgacggctcctttgcctgtacttgtgcccctggctaccgacccggaccccgcggagcctcttgcctcgacgttgacgagtgcagcgaggaggacctttgccagagcggcatctgtaccaacaccgacggctccttcgagtgcatctgtcctccgggacaccgcgctggcccggacctcgcctcctgcctcgacgtggacgaatgtcgcgagcgaggcccagccctgtgcgggtcgcagcgctgtgagaactctcccggctcctaccgctgtgtccgggactgcgatcctgggtaccacgcgggccccgagggcacctgtgacgatgtgaacgagtgtgaaacactacagggtgtatgtggagctgccctgtgtgaaaatgtcgaaggctccttcctctgtgtctgccccaacagcccggaagagtttgaccccatgactggacgctgtgttcccccacgaacttctgctggcacgttcccaggctcgcagccccaggcacctgctagccccgttctgcccgccaggccacctccgccacccctgccccgccgacccagcacacctaggcagggccctgtggggagtgggcgccgggagtgctactttgacacagcggccccggatgcatgtgacaacatcctggctcggaatgtgacatggcaggagtgctgctgtactgtgggtgagggctggggcagcggctgccgcatccagcagtgcccgggcaccgagacagctgagtaccagtcattgtgccctcacggccggggctacctggcgcccagtggagacctgagcctccggagagacgtggacgaatgtcagctcttccgagaccaggtgtgcaagagtggcgtgtgtgtgaacacggccccgggctactcatgctattgcagcaacggctactactaccacacacagcggctggagtgcatcgacaatgacgagtgcgccgatgaggaaccggcctgtgagggcggccgctgtgtcaacactgtgggctcttatcactgtacctgcgagcccccactggtgctggatggctcgcagcgccgctgcgtctccaacgagagccagagcctcgatgacaatctgggagtgtgctggcaggaagtgggggctgacctcgtgtgcagccaccctcggctggaccgtcaggccacctacacagagtgctgctgcctgtatggagaggcctggggcatggactgcgccctctgccctgcgcaggactcagatgacttcgaggccctgtgcaatgtgctacgccccccctttacatgccctctcccttttataaaattttccattaaaaaccacctattttctaaaaaatg

SEQ ID NO: 428849 - DNA, 5294 bp, Homo sapiens
  misc_feature (3843)..(3844): n is a, c, g, or t
  misc_feature (3846)..(3846): n is a, c, g, or t
  misc_feature (3886)..(3886): n is a, c, g, or t
  misc_feature (3975)..(3975): n is a, c, g, or t
  misc_feature (4005)..(4005): n is a, c, g, or t
gctgtgattggcgggaagttcgcagcccgtggctggactgtggagaaagtgagtcggcctcgggcgggggcgggggcgggggcaggggcggggccggggctagcctgacccgctggacagaccgcccgcccggagcgggactcggcgcccgacacgatgccgaggcctggcaccagcggccgccgccccctcctgctggtgctgttgctgccgctcttcgcagccgccacctccgccgccagccccagccccagccccagccaggtcgtcgaggtcccgggggtccccagccgcccggccagcgttgctgtttgtcgctgctgcccgggccagacgtctaggaggagccgctgcatccgagccttctgcagggtccgaagctgccagcccaaaaagtgtgcaggcccccagcggtgcctgaacccagtgcctgcagtgcccagtcccagccccagcgtgaggaagagacaggtgtccctcaactggcagccactgacgctccaggaggccagagctctactgaagcggcggcggccccgggggccagggggccggggactactgagaaggaggcccccacagcgtgcccccgctggcaaggccccggtcctgtgtcccttgatctgtcacaatggcggtgtgtgcgtgaagcctgaccgctgcctctgtcccccggacttcgctggcaagttctgccagttgcactcctcgggcgcccggcccccggccccggctgtaccaggcctcacccgctccgtgtacactatgccactggccaaccaccgcgacgacgagcacggcgtggcatctatggtgagcgtccacgtggagcacccgcaggaggcgtcggtggtggtgcaccaggtggagcgtgtgtctggcccttgggaggaggcggacgctgaggcggtggcgcgggcggaagcggcggcgcgggcggaggcggcagcgccctacacggtgttggcacagagcgcgccgcgggaggacggctactcagatgcctcgggcttcggttactgctttcgggagctgcgcggaggcgaatgcgcgtccccgctgcccgggctccggacgcaggaggtctgctgccgaggggccggcttggcctggggcgttcacgactgtcagctgtgctccgagcgcctggggaactccgaaagagtgagcgccccagatggaccttgtccaaccggctttgaaagagttaatgggtcctgcgaagatgtggatgagtgcgcgactggcgggcgctgccagcacggcgagtgtgcaaacacgcgcggcgggtacacgtgtgtgtgccccgacggctttctgctcgactcgtcccgcagcagctgcatctcccaacacgtgatctcagaggccaaagggccctgcttccgcgtgctccgcgacggcggctgttcgctgcccattctgcggaacatcactaaacagatctgctgctgcagccgcgtaggcaaggcctggggccggggctgccagctctgcccacccttcggctcagagggtttccgggagatctgcccggctggtcctggttaccactactcggcctccgacctccgctacaacaccagacccctgggccaggagccaccccgagtgtcactcagccagcctcgtaccctgccagccacctctcggccatctgcaggctttctgcccacccatcgcctggagccccggcctgaaccccggcccgatccccggcccggccctgagcttcccttgcccagcatccctgcctggactggtcctgagattcctgaatcaggtccctcctccggcatgtgtcagcgcaacccccaggtctgcggcccaggacgctgcatttcccggcccagcggctacacctgcgcttgcgactctggcttccggctcagcccccagggcacccgatgcattgatgtggacgaatgtcgccgcgtgcccccgccctgtgctcccgggcgctgcgagaactcaccaggcagcttccgctgcgtgtgcggcccgggcttccgagccggcccacgggctgcggaatgcctggatgtggacgagtgccaccgcgtgccgccgccgtgtgacctcgggcgctgcgagaacacgccaggcagcttcctgtgcgtgtgccccgccgggtaccaggctgcaccgcacggagccagctgccaggatgtggatgaatgcacccagagcccaggcctgtgtggccgaggggcctgcaagaacctgcctggctctttccgctgtgtttgcccggctggcttccggggctcggcgtgtgaagaggatgtggatgagtgtgcccaggagccgccgccctgtgggcccggccgctgtgacaacacggcaggctcctttcactgtgcctgccctgctggcttccgctcccgagggcccggggccccctgccaagatgtggatgagtgtgcccgaagccccccaccctgcacctacggccggtgtgagaacacagaaggcagcttccagtgtgtctgccccatgggcttccaacccaacactgctggctccgagtgcgaggatgtggatgagtgtgagaaccacctcgcatgccctgggcaggagtgtgtgaactcgcccggctccttccagtgcaggacctgtccttctggccaccacctgcaccgtggcagatgcactgatgtggacgaatgcagttcgggtgcccctccctgtggtccccacggccactgcactaacaccgaaggctccttccgctgcagctgcgcgccaggctaccgggcgccgtcgggtcggcccgggccctgcgcagacgtgaacgagtgcctggagggcgatttctgcttccctcacggcgagtgcctcaacactgacggctcctttgcctgtacttgtgcccctggctaccgacccggaccccgcggagcctcttgcctcgacgttgacgagtgcagcgaggaggacctttgccagagcggcatctgtaccaacaccgacggctccttcgagtgcatctgtcctccgggacaccgcgctggcccggacctcgcctcctgcctcgacgtggacgaatgtcgcgagcgaggcccagccctgtgcgggtcgcagcgctgtgagaactctcccggctcctaccgctgtgtccgggactgcgatcctgggtaccacgcgggccccgagggcacctgtgacgatgtggatgagtgccaagaatatggtcccgagatttgtggagcccagcgttgtgagaacacccctggctcctaccgctgcacaccagcctgtgaccctggctatcagcccacgccagggggcggatgccaggatgtggacgaatgccggaaccggtccttctgcggtgcccacgccgtgtgccagaacctgcccggctccttccagtgcctctgtgaccagggttacgagggggcacgggatgggcgtcactgcgtggatgtgaacgagtgtgaaacactacagggtgtatgtggagctgccctgtgtgaaaatgtcgaaggctccttcctctgtgtctgccccaacagcccggaagagtttgaccccatgactggacgctgtgttcccccacgaacttctgctggcacgttcccaggctcgcagccccaggcacctgctagccccgttctgcccgccaggccacctccgccacccctgccccgccgacccagcacacctaggcagggccctgtggggagtgggcgccgggagtgctactttgacacagcggccccggatgcatgtgacaacatcctggctcggaatgtgacatggcaggagtgctgctgtactgtgggtgagggctggggcagcggctgccgcatccagcagtgcccgggcaccgagacaganngngccctcacaggccggttcctcatcggcgcactcgtcattntcgatgcactccagccgctgtgtgtggtagtagtagccgttgctgcaatagcatgagtagcccggggccgtgttcacacacacgccacncttgcacacctggtctcggaagagctgacnttcgtccacgtctctccggaggctcaggtctccactgggcgccaggtagccccggcctgtgagggcggccgctgtgtcaacactgtgggctcttatcactgtacctgcgagcccccactggtgctggatggctcgcagcgccgctgcgtctccaacgagagccagagcctcgatgacaatctgggagtgtgctggcaggaagtgggggctgacctcgtgtgcagccaccctcggctggaccgtcaggccacctacacagagtgctgctgcctgtatggagaggcctggggcatggactgcgccctctgccctgcgcaggactcagatgacttcgaggccctgtgcaatgtgctacgcccccccgcatatagccccccgcgaccaggtggctttggactcccctacgagtacggcccagacttaggtccaccttaccagggcctcccatatgggcctgagttgtacccaccacctgcgctaccctacgacccctacccaccgccacctgggcccttcgcccgccgggaggctccttatggggcaccccgcttcgacatgccagactttgaggacgatggtggcccctatggcgaatctgaggctcctgcgccacctggcccgggcacccgctggccctatcggtcccgggacacccgccgctccttcccagagcccgaggagcctcctgaaggtggaagctatgctggttccctggctgagccctacgaggagctggaggcggaggagtgcgggatcctggacggctgcaccaacggccgctgcgtgcgcgtccccgaaggcttcacctgccgttgcttcgacggctaccgcctggacatgacccgcatggcctgcgttgacatcaacgagtgtgatgaggccgaggctgcctccccgctgtgcgtcaacgcgcgttgcctcaacacggatggctccttccgctgcatctgccgcccgggattcgcacccacgcaccagccgcaccactgtgcgcccgcacggccccgggcctgagccctggcacccgctggccgcccacccgcgcccgccactcggggcccctgccgcgcatcctgcagcccgcttatgcgtatgtgcacggggccgcccgcctggacctggagaagggacctacggacgcctggaagctgcgacgccctgcactgctcccgcctccaccagcgcctcccactgatgtcgtggtcccgggcctggcccaggggcccctttacatgccctctcccttttataaaattttccattaaaaaccacctattttctaaaaaatg

SEQ ID NO: 428850 - DNA, 5227 bp, Homo sapiens
gctgtgattggcgggaagttcgcagcccgtggctggactgtggagaaagtgagtcggcctcgggcgggggcgggggcgggggcaggggcggggccggggctagcctgacccgctggacagaccgcccgcccggagcgggactcggcgcccgacacgatgccgaggcctggcaccagcggccgccgccccctcctgctggtgctgttgctgccgctcttcgcagccgccacctccgccgccagccccagccccagccccagccaggtcgtcgaggtcccgggggtccccagccgcccggccagcgttgctgtttgtcgctgctgcccgggccagacgtctaggaggagccgctgcatccgagccttctgcagggtccgaagctgccagcccaaaaagtgtgcaggcccccagcggtgcctgaacccagtgcctgcagtgcccagtcccagccccagcgtgaggaagagacaggtgtccctcaactggcagccactgacgctccaggaggccagagctctactgaagcggcggcggccccgggggccagggggccggggactactgagaaggaggcccccacagcgtgcccccgctggcaaggccccggtcctgtgtcccttgatctgtcacaatggcggtgtgtgcgtgaagcctgaccgctgcctctgtcccccggacttcgctggcaagttctgccagttgcactcctcgggcgcccggcccccggccccggctgtaccaggcctcacccgctccgtgtacactatgccactggccaaccaccgcgacgacgagcacggcgtggcatctatggtgagcgtccacgtggagcacccgcaggaggcgtcggtggtggtgcaccaggtggagcgtgtgtctggcccttgggaggaggcggacgctgaggcggtggcgcgggcggaagcggcggcgcgggcggaggcggcagcgccctacacggtgttggcacagagcgcgccgcgggaggacggctactcagatgcctcgggcttcggttactgctttcgggagctgcgcggaggcgaatgcgcgtccccgctgcccgggctccggacgcaggaggtctgctgccgaggggccggcttggcctggggcgttcacgactgtcagctgtgctccgagcgcctggggaactccgaaagagtgagcgccccagatggaccttgtccaaccggctttgaaagagttaatgggtcctgcgaagatgtggatgagtgcgcgactggcgggcgctgccagcacggcgagtgtgcaaacacgcgcggcgggtacacgtgtgtgtgccccgacggctttctgctcgactcgtcccgcagcagctgcatctcccaacacgtgatctcagaggccaaagggccctgcttccgcgtgctccgcgacggcggctgttcgctgcccattctgcggaacatcactaaacagatctgctgctgcagccgcgtaggcaaggcctggggccggggctgccagctctgcccacccttcggctcagagggtttccgggagatctgcccggctggtcctggttaccactactcggcctccgacctccgctacaacaccagacccctgggccaggagccaccccgagtgtcactcagccagcctcgtaccctgccagccacctctcggccatctgcaggctttctgcccacccatcgcctggagccccggcctgaaccccggcccgatccccggcccggccctgagcttcccttgcccagcatccctgcctggactggtcctgagattcctgaatcaggtccctcctccggcatgtgtcagcgcaacccccaggtctgcggcccaggacgctgcatttcccggcccagcggctacacctgcgcttgcgactctggcttccggctcagcccccagggcacccgatgcattgatgtggacgaatgtcgccgcgtgcccccgccctgtgctcccgggcgctgcgagaactcaccaggcagcttccgctgcgtgtgcggcccgggcttccgagccggcccacgggctgcggaatgcctggatgtggacgagtgccaccgcgtgccgccgccgtgtgacctcgggcgctgcgagaacacgccaggcagcttcctgtgcgtgtgccccgccgggtaccaggctgcaccgcacggagccagctgccaggatgtggatgaatgcacccagagcccaggcctgtgtggccgaggggcctgcaagaacctgcctggctctttccgctgtgtttgcccggctggcttccggggctcggcgtgtgaagaggatgtggatgagtgtgcccaggagccgccgccctgtgggcccggccgctgtgacaacacggcaggctcctttcactgtgcctgccctgctggcttccgctcccgagggcccggggccccctgccaagatgtggatgagtgtgcccgaagccccccaccctgcacctacggccggtgtgagaacacagaaggcagcttccagtgtgtctgccccatgggcttccaacccaacactgctggctccgagtgcgaggatgtggatgagtgtgagaaccacctcgcatgccctgggcaggagtgtgtgaactcgcccggctccttccagtgcaggacctgtccttctggccaccacctgcaccgtggcagatgcactgatgtggacgaatgcagttcgggtgcccctccctgtggtccccacggccactgcactaacaccgaaggctccttccgctgcagctgcgcgccaggctaccgggcgccgtcgggtcggcccgggccctgcgcagacgtgaacgagtgcctggagggcgatttctgcttccctcacggcgagtgcctcaacactgacggctcctttgcctgtacttgtgcccctggctaccgacccggaccccgcggagcctcttgcctcggttcgtacccgggctgatcctggccccggaaagggtgggcttagggcaggaaaaggcgggacggggagaagagggcgaaaaggggaaaacgagtttttagccggggtattccagcaggatcagggggcagctggtgggagtctcgaggcagtgagggggggcggggcgtggagatgaaagggccgagtctgggtatttggaccgtgattgtaaagaagctgttctaaacccgtcggggggcggtgtttgcagggagggaagtagcgtgaggcaggttggggaaggcgtgagaggcctaggagagccgaggggcggtggaggggtgtggcctagaatgttaggcggagcgggaggtgggccgggccttcggacgccctgtcccgcagacgttgacgagtgcagcgaggaggacctttgccagagcggcatctgtaccaacaccgacggctccttcgagtgcatctgtcctccgggacaccgcgctggcccggacctcgcctcctgcctcgacgtggacgaatgtcgcgagcgaggcccagccctgtgcgggtcgcagcgctgtgagaactctcccggctcctaccgctgtgtccgggactgcgatcctgggtaccacgcgggccccgagggcacctgtgacgatgtggatgagtgccaagaatatggtcccgagatttgtggagcccagcgttgtgagaacacccctggctcctaccgctgcacaccagcctgtgaccctggctatcagcccacgccagggggcggatgccaggatgtgaacgagtgtgaaacactacagggtgtatgtggagctgccctgtgtgaaaatgtcgaaggctccttcctctgtgtctgccccaacagcccggaagagtttgaccccatgactggacgctgtgttcccccacgaacttctgctgacgtggacgaatgtcagctcttccgagaccaggtgtgcaagagtggcgtgtgtgtgaacacggccccgggctactcatgctattgcagcaacggctactactaccacacacagcggctggagtgcatcgacaatgacgagtgcgccgatgaggaaccggcctgtgagggcggccgctgtgtcaacactgtgggctcttatcactgtacctgcgagcccccactggtgctggatggctcgcagcgccgctgcgtctccaacgagagccagagcctcgatgacaatctgggagtgtgctggcaggaagtgggggctgacctcgtgtgcagccaccctcggctggaccgtcaggccacctacacagagtgctgctgcctgtatggagaggcctggggcatggactgcgccctctgccctgcgcaggactcagatgacttcgaggccctgtgcaatgtgctacgcccccccgcatatagccccccgcgaccaggtggctttggactcccctacgagtacggcccagacttaggtccaccttaccagggcctcccatatgggcctgagttgtacccaccacctgcgctaccctacgacccctacccaccgccacctgggcccttcgcccgccgggaggctccttatggggcaccccgcttcgacatgccagactttgaggacgatggtggcccctatggcgaatctgaggctcctgcgccacctggcccgggcacccgctggccctatcggtcccgggacacccgccgctccttcccagagcccgaggagcctcctgaaggtggaagctatgctggttccctggctgagccctacgaggagctggaggcggaggagtgcgggatcctggacggctgcaccaacggccgctgcgtgcgcgtccccgaaggcttcacctgccgttgcttcgacggctaccgcctggacatgacccgcatggcctgcgttgacatcaacgagtgtgatgaggccgaggctgcctccccgctgtgcgtcaacgcgcgttgcctcaacacggatggctccttccgctgcatctgccgcccgggattcgcacccacgcaccagccgcaccactgtgcgcccgcacggccccgggcctgagccctggcacccgctggccgcccacccgcgcccgccactcggggcccctgccgcgcatcctgcagcccgcttatgcgtatgtgcacggggccgcccgcctggacctggagaagggacctacggacgcctggaagctgcgacgccctgcactgctcccgcctccaccagcgcctcccactgatgtcgtggtcccgggcctggcccaggggcccctttacatgccctctcccttttataaaattttccattaaaaaccacctattttctaaaaaatg

SEQ ID NO: 428851 - DNA, 1638 bp, Homo sapiens
ttatgcgtatgtgcacgggccgcccgcctggacctggagaagggactacggacgcctggaagctgcgacgccctgcacctgtcccgcctccaccagcgcctcccactgctgtactgtgggtgagggctggggcagcggctgccgcatccagcagtgcccgggcaccgagacagctgagtaccagtcattgtgccctcacggccggggctacctggcgcccagtggagacctgagcctccggagagacgtggacgaatgtcagctcttccgagaccaggtgtgcaagagtggcgtgtgtgtgaacacggccccgggctactcatgctattgcagcaacggctactactaccacacacagcggctggagtgcatcgacaatgacgagtgcgccgatgaggaaccggcctgtgagggcggccgctgtgtcaacactgtgggctcttatcactgtacctgcgagcccccactggtgctggatggctcgcagcgccgctgcgtctccaacgagagccagagcctcgatgacaatctgggagtgtgctggcaggaagtgggggctgacctcgtgtgcagccaccctcggctggaccgtcaggccacctacacagagtgctgctgcctgtatggagaggcctggggcatggactgcgccctctgccctgcgcaggactcagatgacttcgaggccctgtgcaatgtgctacgcccccccgcatatagccccccgcgaccaggtggctttggactcccctacgagtacggcccagacttaggtccaccttaccagggcctcccatatgggcctgagttgtacccaccacctgcgctaccctacgacccctacccaccgccacctgggcccttcgcccgccgggaggctccttatggggcaccccgcttcgacatgccagactttgaggacgatggtggcccctatggcgaatctgaggctcctgcgccacctggcccgggcacccgctggccctatcggtcccgggacacccgccgctccttcccagagcccgaggagcctcctgaaggtggaagctatgctggttccctggctgagccctacgaggagctggaggcggaggagtgcgggatcctggacggctgcaccaacggccgctgcgtgcgcgtccccgaaggcttcacctgccgttgcttcgacggctaccgcctggacatgacccgcatggcctgcgttgacatcaacgagtgtgatgaggccgaggctgcctccccgctgtgcgtcaacgcgcgttgcctcaacacggatggctccttccgctgcatctgccgcccgggattcgcacccacgcaccagccgcaccactgtgcgcccgcacggccccgggcctgagccctggcacccgctggccgcccacccgcgcccgccactcggggcccctgccgcgcatcctgcagcccgcttatgcgtatgtgcacggggccgcccgcctggacctggagaagggacctacggacgcctggaagctgcgacgccctgcactgctcccgcctccaccagcgcctcccactgatgtcgtggtcccgggcctggcccaggggcccctttacatgccctctcccttttataaaattttccattaaaaaccacctattttctaaaaaatg

SEQ ID NO: 428852 - DNA, 3904 bp, Homo sapiens
gctgtgattggcgggaagttcgcagcccgtggctggactgtggagaaagtgagtcggcctcgggcgggggcgggggcgggggcaggggcggggccggggctagcctgacccgctggacagaccgcccgcccggagcgggactcggcgcccgacacgatgccgaggcctggcaccagcggccgccgccccctcctgctggtgctgttgctgccgctcttcgcagccgccacctccgccgccagccccagccccagccccagccaggtcgtcgaggtcccgggggtccccagccgcccggccagcgttgctgtttgtcgctgctgcccgggccagacgtctaggaggagccgctgcatccgagccttctgcagggtccgaagctgccagcccaaaaagtgtgcaggcccccagcggtgcctgaacccagtgcctgcagtgcccagtcccagccccagcgtgaggaagagacaggtgtccctcaactggcagccactgacgctccaggaggccagagctctactgaagcggcggcggccccgggggccagggggccggggactactgagaaggaggcccccacagcgtgcccccgctggcaaggccccggtcctgtgtcccttgatctgtcacaatggcggtgtgtgcgtgaagcctgaccgctgcctctgtcccccggacttcgctggcaagttctgccagttgcactcctcgggcgcccggcccccggccccggctgtaccaggcctcacccgctccgtgtacactatgccactggccaaccaccgcgacgacgagcacggcgtggcatctatggtgagcgtccacgtggagcacccgcaggaggcgtcggtggtggtgcaccaggtggagcgtgtgtctggcccttgggaggaggcggacgctgaggcggtggcgcgggcggaagcggcggcgcgggcggaggcggcagcgccctacacggtgttggcacagagcgcgccgcgggaggacggctactcagatgcctcgggcttcggttactgctttcgggagctgcgcggaggcgaatgcgcgtccccgctgcccgggctccggacgcaggaggtctgctgccgaggggccggcttggcctggggcgttcacgactgtcagctgtgctccgagcgcctggggaactccgaaagagtgagcgccccagatggaccttgtccaaccggctttgaaagagttaatgggtcctgcgaagatgtggatgagtgcgcgactggcgggcgctgccagcacggcgagtgtgcaaacacgcgcggcgggtacacgtgtgtgtgccccgacggctttctgctcgactcgtcccgcagcagctgcatctcccaacacgtgatctcagaggccaaagggccctgcttccgcgtgctccgcgacggcggctgttcgctgcccattctgcggaacatcactaaacagatctgctgctgcagccgcgtaggcaaggcctggggccggggctgccagctctgcccacccttcggctcagagggtttccgggagatctgcccggctggtcctggttaccactactcggcctccgacctccgctacaacaccagacccctgggccaggagccaccccgagtgtcactcagccagcctcgtaccctgccagccacctctcggccatctgcaggctttctgcccacccatcgcctggagccccggcctgaaccccggcccgatccccggcccggccctgagcttcccttgcccagcatccctgcctggactggtcctgagattcctgaatcaggtccctcctccggcatgtgtcagcgcaacccccaggtctgcggcccaggacgctgcatttcccggcccagcggctacacctgcgcttgcgactctggcttccggctcagcccccagggcacccgatgcattgatgtggacgaatgtcgccgcgtgcccccgccctgtgctcccgggcgctgcgagaactcaccaggcagcttccgctgcgtgtgcggcccgggcttccgagccggcccacgggctgcggaatgcctggatgtggacgagtgccaccgcgtgccgccgccgtgtgacctcgggcgctgcgagaacacgccaggcagcttcctgtgcgtgtgccccgccgggtaccaggctgcaccgcacggagccagctgccaggatgtggatgaatgcacccagagcccaggcctgtgtggccgaggggcctgcaagaacctgcctggctctttccgctgtgtttgcccggctggcttccggggctcggcgtgtgaagaggatgtggatgagtgtgcccaggagccgccgccctgtgggcccggccgctgtgacaacacggcaggctcctttcactgtgcctgccctgctggcttccgctcccgagggcccggggccccctgccaagatgtggatgagtgtgcccgaagccccccaccctgcacctacggccggtgtgagaacacagaaggcagcttccagtgtgtctgccccatgggcttccaacccaacactgctggctccgagtgcgaggatgtggatgagtgtgagaaccacctcgcatgccctgggcaggagtgtgtgaactcgcccggctccttccagtgcaggacctgtccttctggccaccacctgcaccgtggcagatgcactgatgtggacgaatgcagttcgggtgcccctccctgtggtccccacggccactgcactaacaccgaaggctccttccgctgcagctgcgcgccaggctaccgggcgccgtcgggtcggcccgggccctgcgcagacgtgaacgagtgcctggagggcgatttctgcttccctcacggcgagtgcctcaacactgacggctcctttgcctgtacttgtgcccctggctaccgacccggaccccgcggagcctcttgcctcgacgttgacgagtgcagcgaggaggacctttgccagagcggcatctgtaccaacaccgacggctccttcgagtgcatctgtcctccgggacaccgcgctggcccggacctcgcctcctgcctcgacgtggacgaatgtcgcgagcgaggcccagccctgtgcgggtcgcagcgctgtgagaactctcccggctcctaccgctgtgtccgggactgcgatcctgggtaccacgcgggccccgagggcacctgtgacgatgtggacgaatgccggaaccggtccttctgcggtgcccacgccgtgtgccagaacctgcccggctccttccagtgcctctgtgaccagggttacgagggggcacgggatgggcgtcactgcgtggatgtgaacgagtgtgaaacactacagggtgtatgtggagctgccctgtgtgaaaatgtcgaaggctccttcctctgtgtctgccccaacagcccggaagagtttgaccccatgactggacgctgtgttcccccacgaacttctgctggtgagactgatgtgtctatttaactgatggcggctggccccatgggaaaatcacgtggtctaatcattcctgatgtggacagctaccatcagctaaatactgttgttttaaacatcaacaaaagacacataagttaacatgggtagtgagactgtgtcaggagaattagaccctggtcctgactctaccagattctttcattcaacaaatgttcacagggtgtgcactgtgttcaggccatcttctgggcactgagaacatagtagtgaccagaagggatcactgtctgtcctcaaggggctcacaagccaatggggcagacagagatatcaccagatagtgacaacccagagaaatcaacaagactgtgatggggaaagcccaggggggttttggaggaggcgcctggcccagcatgagaagaggattagggagttcttcctgtaggagacgacatctgaa

SEQ ID NO: 428853 - DNA, 2088 bp, Homo sapiens
gctgtgattggcgggaagttcgcagcccgtggctggactgtggagaaagtgagtcggcctcgggcgggggcgggggcgggggcaggggcggggccggggctagcctgacccgctggacagaccgcccgcccggagcgggactcggcgcccgacacgatgccgaggcctggcaccagcggccgccgccccctcctgctggtgctgttgctgccgctcttcgcagccgccacctccgccgccagccccagccccagccccagccaggtcgtcgaggtcccgggggtccccagccgcccggccagcgttgctgtttgtcgctgctgcccgggccagacgtctaggaggagccgctgcatccgagccttctgcagggtccgaagctgccagcccaaaaagtgtgcaggcccccagcggtgcctgaacccagtgcctgcagtgcccagtcccagccccagcgtgaggaagagacaggtgtccctcaactggcagccactgacgctccaggaggccagagctctactgaagcggcggcggccccgggggccagggggccggggactactgagaaggaggcccccacagcgtgcccccgctggcaaggccccggtcctgtgtcccttgatctgtcacaatggcggtgtgtgcgtgaagcctgaccgctgcctctgtcccccggacttcgctggcaagttctgccagttgcactcctcgggcgcccggcccccggccccggctgtaccaggcctcacccgctccgtgtacactatgccactggccaaccaccgcgacgacgagcacggcgtggcatctatggtgagcgtccacgtggagcacccgcaggaggcgtcggtggtggtgcaccaggtggagcgtgtgtctggcccttgggaggaggcggacgctgaggcggtggcgcgggcggaagcggcggcgcgggcggaggcggcagcgccctacacggtgttggcacagagcgcgccgcgggaggacggctactcagatgcctcgggcttcggttactgctttcgggagctgcgcggaggcgaatgcgcgtccccgctgcccgggctccggacgcaggaggtctgctgccgaggggccggcttggcctggggcgttcacgactgtcagctgtgctccgagcgcctggggaactccgaaagagtgagcgccccagatggaccttgtccaaccggctttgaaagagttaatgggtcctgcgaagatgtggatgagtgcgcgactggcgggcgctgccagcacggcgagtgtgcaaacacgcgcggcgggtacacgtgtgtgtgccccgacggctttctgctcgactcgtcccgcagcagctgcatctcccaacacgtgatctcagaggccaaagggccctgcttccgcgtgctccgcgacggcggctgttcgctgcccattctgcggaacatcactaaacagatctgctgctgcagccgcgtaggcaaggcctggggccggggctgccagctctgcccacccttcggctcagagggtttccgggagatctgcccggctggtcctggttaccactactcggcctccgacctccgctacaacaccagacccctgggccaggagccaccccgagtgtcactcagccagcctcgtaccctgccagccacctctcggccatctgcaggctttctgcccacccatcgcctggagccccggcctgaaccccggcccgatccccggcccggccctgagcttcccttgcccagcatccctgcctggactggtcctgagattcctgaatcaggtttgctagaaagaactgagggcattgggcctgcagcagtggctcacgcctgtaatcccagcattttgggaggctgaggagggtggatcaccaggtcaggagttcgagaccagcctggccaacatggcgaaaccctgtctctactaaaactacaaaaattaactgggcgtggtggcagatgcctgtaatcccagctacttgggaggctgaggcaggagaatcacttgaacccaggaggcagaggttgcagtgagctgagatcgtgccattgcactccagcttgagcgacactccatctcaaaaaa

SEQ ID NO: 428854 - DNA, 2219 bp, Homo sapiens
gcagcccactcttcccgagaggccccgacatctcccggataatctggagctttcaaaatgtttgccaaagcaaccaggaattttcttagagaagttgatgctgatggtgacctgattgcagtatcaaatctgaatgactctgataagttacagcttctaagtctggtgacaaaaaagaagagattctggtgctggcagagacccaagtaccagtttttatccctcacccttggcgatgtactcatagaagaccaatttccgagtccagtggtcgtggagtcggactttgtgaaatacgagggcaagtttgcaaaccacgtgagtggaaccctggagactgcactggggaaggtcaagctgaacctggggggcagcagccgcgtagagagccagtcttcatttggaaccctgaggaagcaggaggtggatttgcagcagctcatcagagactctgccgagagaacaataaatctgagaaaccctgtgctccagcaggtgctggaaggaaggaatgaggtcctgtgcgttttgacacagaagatcacgacgatgcagaagtgtgtgatctctgagcacatgcaggtcgaggagaagtgtggtggcatcgtgggcatccagaccaagacggtgcaggtgtcagcgacggaggatgggaatgtcaccaaggactccaacgtggtgctggagatcccagctgccaccaccattgcctacggtgtcattgagttatacgtgaaactggacggccagttcgagttctgccttctccgagggaagcaaggtggcttcgagaacaagaagagaattgactctgtctacctggaccccctggtctttcgagagtttgcattcatagacatgccagatgctgcgcatgggatatcttcccaggatggaccattaagtgttttaaagcaagcgaccctgctcctggagaggaatttccatccatttgcggagctgcctgagccacaacagacagctttgagtgacatcttccaggcggtcctatttgatgatgaactactcatggtcctggaaccagtgtgcgatgacctggtcagcggcctctcgcccacagtggcggtgctgggggagctgaagccccggcagcagcaggaccttgtggccttcctgcagctggtggggtgcagcttacagggtgggtgtccgggccccgaggatgcaggcagcaagcagctgtttatgacagcctacttcttggtcagtgccctcgcagaaatgccagatagcgcagcagctctgctgggcacttgctgcaaactccagatcattcccacactgtgccacttgcttcgtgctctgtctgatgatggagtatctgatcttgaagacccaaccttgactcccctgaaagatacagaaaggtttgggattgtgcagcgcttgtttgcctcagctgacattagtctggagagactgaagtcatctgtgaaagctgtcattctgaaggactctaaagtcttcccactgcttctttgtataaccctgaatggactctgtgctttaggcagagaacattcatgatgtcatatgtgaactagaagtacgtgttactggccaaggctatttttcagaactgttaaaggtcatatgcacgttaaaagttgaccaatgaaatgaatttacagaacagtttaagaagtggtgacattttgcatgatgaatgacctgacttttagccaccaggtactctttaaacagttttccttatcagaggccctcctgtgctggtgacccagcatctgagttaggttccagcatgtaaagagctgggagggcggagaattcttagcatacattcagacgttttttctgcacaataataagtccatctgtcacttgcattccactttttgttacatagaaagagtctgaccctttaatccaaaaggtctttttacattgtgaatgctgtgggaaggcaatttctctgcacacaagaggctacgttttggaagtgatgtatgttatttgatgactgaaaatgaactgtaaatgctcctagagtatattcctctgctgaacaaaattaaacttcaaaaaaatctaacagtaacacacccctgcttgggaccctagctatatgcattttatgtgaccttgccatgcttcagtgaacatactaattctatgtctagcacatgttgatttcctatgtattctgggtattctattaaaggaaactttgaactatg

SEQ ID NO: 428855 - DNA, 1649 bp, Homo sapiens
ggggcgcccggaccgagcaaaggtcccggcgggcgggccctctctccgccctccccaagcgcccgccccccgccggcccagcgcaggctcctccgactccgccagcgcagggggcgcggctgccggggacccagcagcgggcgcgcggataatctggagctttcaaaatgtttgccaaagcaaccaggaattttcttagagaagttgatgctgatggtgacctgattgcagtatcaaatctgaatgactctgataagttacagcttctaagtctggtgacaaaaaagaagagattctggtgctggcagagacccaagtaccagtttttatccctcacccttggcgatgtactcatagaagaccaatttccgagtccagtggtcgtggagtcggactttgtgaaatacgagggcaagtttgcaaaccacgtgagtggaaccctggagactgcactggggaaggtcaagctgaacctggggggcagcagccgcgtagagagccagtcttcatttggaaccctgaggaagcaggaggtggatttgcagcagctcatcagagactctgccgagagaacaataaatctgagaaaccctgtgctccagcaggtgctggaaggaaggaatgaggtcctgtgcgttttgacacagaagatcacgacgatgcagaagtgtgtgatctctgagcacatgcaggtcgaggagaagtgtggtggcatcgtgggcatccagaccaagacggtgcaggtgtcagcgacggaggatgggaatgtcaccaaggactccaacgtggtgctggagatcccagctgccaccaccattgcctacggtgtcattgagttatacgtgaaactggacggccagttcggtgagtgccacctcctatgggtgctgagggatccccagcagaggatccctcagcagagggacttgactgctttccagaggactcgactgctttggagactgtgggaagagagggaaagaggtctgaagagcgtagattgtcccaagacatggtccctggacacatgggctgcactgggggaggggtgtggtgagggatgcctggagcaatgccaccctctcctccaacattggtgtggggcaaagttccaccagcacagtagagggctgggctgtgtcctctgggcatcaacctgggctctgcatcagacacactgggcatcaaccccggtgccatgatgtcctatgaggtctcaggcaagttgctgaatcttgctgagtcttggcttccctgtctctggaaggtgaagggcatttcttcacagggctgtgtgaagatttaatgagatgaggcctatgaagcgcctggcacagtggtcatttattaattcctccacctttgctattaatagcattatcatcattattgttaccccacctcctctccacaagtatgaagccagacatgctgaacttgactttcctctgctgatcacgagtgtgttcaaagcgcagagacccagctgttgtcacggaagaaaatccaagctttggttcagcgtgtctgctcactttaggtgttcacagccccttccctcctcatgttcccaatgagaagaggttgtgttcactcatgaaagctgtgtgaccgctccttagggacatgagtgggtaaatgtaacataa

SEQ ID NO: 428856 - DNA, 2329 bp, Homo sapiens
ggggcgcccggaccgagcaaaggtcccggcgggcgggccctctctccgccctccccaagcgcccgccccccgccggcccagcgcaggctcctccgactccgccagcgcagggggcgcggctgccggggacccagcagcgggcgcgcggataatctggagctttcaaaatgtttgccaaagcaaccaggaattttcttagagaagttgatgctgatggtgacctgattgcagtatcaaatctgaatgactctgataagttacagcttctaagtctggtgacaaaaaagaagagattctggtgctggcagagacccaagtaccagtttttatccctcacccttggcgatgtactcatagaagaccaatttccgagtccagtggtcgtggagtcggactttgtgaaatacgagggcaagtttgcaaaccacgtgagtggaaccctggagactgcactggggaaggtcaagctgaacctggggggcagcagccgcgtagagagccagtcttcatttggaaccctgaggaagcaggaggtggatttgcagcagctcatcagagactctgccgagagaacaataaatctgagaaaccctgtgctccagcaggtgctggaaggaaggaatgaggtcctgtgcgttttgacacagaagatcacgacgatgcagaagtgtgtgatctctgagcacatgcaggtcgaggagaagtgtggtggcatcgtgggcatccagaccaagacggtgcaggtgtcagcgacggaggatgggaatgtcaccaaggactccaacgtggtgctggagatcccagctgccaccaccattgcctacggtgtcattgagttatacgtgaaactggacggccagttcgagttctgccttctccgagggaagcaaggtggcttcgagaacaagaagagaattgactctgtctacctggaccccctggtctttcgagagtttgcattcatagacatgccagatgctgcgcatgggatatcttcccaggatggaccattaagtgttttaaagcaagcgaccctgctcctggagaggaatttccatccatttgcggagctgcctgagccacaacagacagctttgagtgacatcttccaggcggtcctatttgatgatgaactactcatggtcctggaaccagtgtgcgatgacctggtcagcggcctctcgcccacagtggcggtgctgggggagctgaagccccggcagcagcaggaccttgtggccttcctgcagctggtggggtgcagcttacagggtgggtgtccgggccccgaggatgcaggcagcaagcagctgtttatgacagcctacttcttggtcagtgccctcgcagaaatgccagatagcgcagcagctctgctgggcacttgctgcaaactccagatcattcccacactgtgccacttgcttcgtgctctgtctgatgatggagtatctgatcttgaagacccaaccttgactcccctgaaagatacagaaaggtttgggattgtgcagcgcttgtttgcctcagctgacattagtctggagagactgaagtcatctgtgaaagctgtcattctgaaggactctaaagtcttcccactgcttctttgtataaccctgaatggactctgtgctttaggcagagaacattcatgatgtcatatgtgaactagaagtacgtgttactggccaaggctatttttcagaactgttaaaggtcatatgcacgttaaaagttgaccaatgaaatgaatttacagaacagtttaagaagtggtgacattttgcatgatgaatgacctgacttttagccaccaggtactctttaaacagttttccttatcagaggccctcctgtgctggtgacccagcatctgagttaggttccagcatgtaaagagctgggagggcggagaattcttagcatacattcagacgttttttctgcacaataataagtccatctgtcacttgcattccactttttgttacatagaaagagtctgaccctttaatccaaaaggtctttttacattgtgaatgctgtgggaaggcaatttctctgcacacaagaggctacgttttggaagtgatgtatgttatttgatgactgaaaatgaactgtaaatgctcctagagtatattcctctgctgaacaaaattaaacttcaaaaaaatctaacagtaacacacccctgcttgggaccctagctatatgcattttatgtgaccttgccatgcttcagtgaacatactaattctatgtctagcacatgttgatttcctatgtattctgggtattctattaaaggaaactttgaactatg

SEQ ID NO: 428857 - DNA, 2099 bp, Homo sapiens
ggggcgcccggaccgagcaaaggtcccggcgggcgggccctctctccgccctccccaagcgcccgccccccgccggcccagcgcaggctcctccgactccgccagcgcagggggcgcggctgccggggacccagcagcgggcgcgcggtggtcgtggagtcggactttgtgaaatacgagggcaagtttgcaaaccacgtgagtggaaccctggagactgcactggggaaggtcaagctgaacctggggggcagcagccgcgtagagagccagtcttcatttggaaccctgaggaagcaggaggtggatttgcagcagctcatcagagactctgccgagagaacaataaatctgagaaaccctgtgctccagcaggtgctggaaggaaggaatgaggtcctgtgcgttttgacacagaagatcacgacgatgcagaagtgtgtgatctctgagcacatgcaggtcgaggagaagtgtggtggcatcgtgggcatccagaccaagacggtgcaggtgtcagcgacggaggatgggaatgtcaccaaggactccaacgtggtgctggagatcccagctgccaccaccattgcctacggtgtcattgagttatacgtgaaactggacggccagttcgagttctgccttctccgagggaagcaaggtggcttcgagaacaagaagagaattgactctgtctacctggaccccctggtctttcgagagtttgcattcatagacatgccagatgctgcgcatgggatatcttcccaggatggaccattaagtgttttaaagcaagcgaccctgctcctggagaggaatttccatccatttgcggagctgcctgagccacaacagacagctttgagtgacatcttccaggcggtcctatttgatgatgaactactcatggtcctggaaccagtgtgcgatgacctggtcagcggcctctcgcccacagtggcggtgctgggggagctgaagccccggcagcagcaggaccttgtggccttcctgcagctggtggggtgcagcttacagggtgggtgtccgggccccgaggatgcaggcagcaagcagctgtttatgacagcctacttcttggtcagtgccctcgcagaaatgccagatagcgcagcagctctgctgggcacttgctgcaaactccagatcattcccacactgtgccacttgcttcgtgctctgtctgatgatggagtatctgatcttgaagacccaaccttgactcccctgaaagatacagaaaggtttgggattgtgcagcgcttgtttgcctcagctgacattagtctggagagactgaagtcatctgtgaaagctgtcattctgaaggactctaaagtcttcccactgcttctttgtataaccctgaatggactctgtgctttaggcagagaacattcatgatgtcatatgtgaactagaagtacgtgttactggccaaggctatttttcagaactgttaaaggtcatatgcacgttaaaagttgaccaatgaaatgaatttacagaacagtttaagaagtggtgacattttgcatgatgaatgacctgacttttagccaccaggtactctttaaacagttttccttatcagaggccctcctgtgctggtgacccagcatctgagttaggttccagcatgtaaagagctgggagggcggagaattcttagcatacattcagacgttttttctgcacaataataagtccatctgtcacttgcattccactttttgttacatagaaagagtctgaccctttaatccaaaaggtctttttacattgtgaatgctgtgggaaggcaatttctctgcacacaagaggctacgttttggaagtgatgtatgttatttgatgactgaaaatgaactgtaaatgctcctagagtatattcctctgctgaacaaaattaaacttcaaaaaaatctaacagtaacacacccctgcttgggaccctagctatatgcattttatgtgaccttgccatgcttcagtgaacatactaattctatgtctagcacatgttgatttcctatgtattctgggtattctattaaaggaaactttgaactatg

SEQ ID NO: 428858 - DNA, 1145 bp, Homo sapiens
ggcatggtggcgcacacctgtaccagctactcgggaggctgaggcaaaagaatcgcttgaacctgggagctggaggttgcagtgagccgagatcacgccactgcactccagcctggacgacagagcaagactccatctcaaaaagttttttcccccagaattacctacaagtgcattactatccaatgtggattttttaggacattttaaaagtgaatttgtttaaatgtgtcatttcagcttcgtgctctgtctgatgatggagtatctgatcttgaagacccaaccttgactcccctgaaagatacagaaaggtttgggattgtgcagcgcttgtttgcctcagctgacattagtctggagagactgaagtcatctgtgaaagctgtcattctgaaggactctaaagtcttcccactgcttctttgtataaccctgaatggactctgtgctttaggcagagaacattcatgatgtcatatgtgaactagaagtacgtgttactggccaaggctatttttcagaactgttaaaggtcatatgcacgttaaaagttgaccaatgaaatgaatttacagaacagtttaagaagtggtgacattttgcatgatgaatgacctgacttttagccaccaggtactctttaaacagttttccttatcagaggccctcctgtgctggtgacccagcatctgagttaggttccagcatgtaaagagctgggagggcggagaattcttagcatacattcagacgttttttctgcacaataataagtccatctgtcacttgcattccactttttgttacatagaaagagtctgaccctttaatccaaaaggtctttttacattgtgaatgctgtgggaaggcaatttctctgcacacaagaggctacgttttggaagtgatgtatgttatttgatgactgaaaatgaactgtaaatgctcctagagtatattcctctgctgaacaaaattaaacttcaaaaaaatctaacagtaacacacccctgcttgggaccctagctatatgcattttatgtgaccttgccatgcttcagtgaacatactaattctatgtctagcacatgttgatttcctatgtattctgggtattctattaaaggaaactttgaactatg

SEQ ID NO: 428859 - DNA, 1769 bp, Homo sapiens
ggggcgcccggaccgagcaaaggtcccggcgggcgggccctctctccgccctccccaagcgcccgccccccgccggcccagcgcaggctcctccgactccgccagcgcagggggcgcggctgccggggacccagcagcgggcgcgcggataatctggagctttcaaaatgtttgccaaagcaaccaggaattttcttagagaagttgatgctgatggtgacctgattgcagtatcaaatctgaatgactctgataagttacagcttctaagtctggtgacaaaaaagaagagattctggtgctggcagagacccaagtaccagtttttatccctcacccttggcgatgtactcatagaagaccaatttccgagtccagtggtcgtggagtcggactttgtgaaatacgagggcaagtttgcaaaccacgtgagtggaaccctggagactgcactggggaaggtcaagctgaacctggggggcagcagccgcgtagagagccagtcttcatttggaaccctgaggaagcaggaggtggatttgcagcagctcatcagagactctgccgagagaacaataaatctgagaaaccctgtgctccagcaggtgctggaaggaaggaatgaggtcctgtgcgttttgacacagaagatcacgacgatgcagaagtgtgtgatctctgagcacatgcaggtcgaggagaagtgtggtggcatcgtgggcatccagaccaagacggtgcaggtgtcagcgacggaggatgggaatgtcaccaaggactccaacgtggtgctggagatcccagctgccaccaccattgcctacggtgtcattgagttatacgtgaaactggacggccagttcgagttctgccttctccgagggaagcaaggtggcttcgagaacaagaagagaattgactctgtctacctggaccccctggtctttcgagagtttgcattcatagacatgccagatgctgcgcatgggatatcttcccaggatggaccattaagtgttttaaagcaagcgaccctgctcctggagaggaatttccatccatttgcggagctgcctgagccacaacagacagctttgagtgacatcttccaggcggtcctatttgatgatgaactactcatggtcctggaaccagtgtgcgatgacctggtcagcggcctctcgcccacagtggcggtgctgggggagctgaagccccggcagcagcaggaccttgtggccttcctgcagctggtggggtgcagcttacagggtgggtgtccgggccccgaggatgcaggcagcaagcagctgtttatgacagcctacttcttggtcagtgccctcgcagaaatgccagatagcgcagcagctctgctgggcacttgctgcaaactccagatcattcccacactgtgccacttggtaagcaacctcccaggtgggaccttagaatggataggaatggggaaatgatgagggggtagacatccagcagccggtaaaacacctctaggacttaccacaacagctcttcaagacacattaagtaagtattgttattaaccccacttttatacacatcccaccccatgggaagactgagacccagaggaaaatgatttgtccaaataacttgttagcaggtccaggacttcatccttgtctttcgactccaactcttatacttttcccattgtttggagagaattttggccaaggtttggtgttacattacaataaaggggcctgacaccatattatttgcaa

SEQ ID NO: 428860 - DNA, 1313 bp, Homo sapiens
ggggcgcccggaccgagcaaaggtcccggcgggcgggccctctctccgccctccccaagcgcccgccccccgccggcccagcgcaggctcctccgactccgccagcgcagggggcgcggctgccggggacccagcagcgggcgcgcggataatctggagctttcaaaatgtttgccaaagcaaccaggaattttcttagagaagttgatgctgatggtgacctgattgcagtatcaaatctgaatgactctgataagttacagcttctaagtctggtgacaaaaaagaagagattctggtgctggcagagacccaagtaccagtttttatccctcacccttggcgatgtactcatagaagaccaatttccgagtccagtggtcgtggagtcggactttgtgaaatacgagggcaagtttgcaaaccacgtgagtggaaccctggagactgcactggggaaggtcaagctgaacctggggggcagcagccgcgtagagagccagtcttcatttggaaccctgaggaagcaggaggtggatttgcagcagctcatcagagactctgccgagagaacaataaatctgagaaaccctgtgctccagcaggtgctggaaggaaggaatgaggtcctgtgcgttttgacacagaagatcacgacgatgcagaagtgtgtgatctctgagcacatgcaggtcgaggagaagtgtggtggcatcgtgggcatccagaccaagacggtgcaggtgtcagcgacggaggatgggaatgtcaccaaggactccaacgtggtgctggagatcccagctgccaccaccattgcctacggtgtcattgagttatacgtgaaactggacggccagttcgagttctgccttctccgagggaagcaaggtggcttcgagaacaagaagagaattgactctgtctacctggaccccctggtctttcgagagtttgcattcatagacatgccagatgctgcgcatgggatatcttcccaggatggaccattaagtgttttaaagcaagcgaccctgctcctggagaggaatttccatccatttgcggagctgcctgagccacaacagacagctttgagtgacatcttccaggcggtcctatttgatgatgaactactcatggtcctggaaccagtgcagaaggatatcctggggaggtcaagttccttaactcttagttgtacaaatggtgagagccacacaagctgccaaccctccagccacccagattctgtgtcctccctttcttaaggctgaggctttataaacctgattttgactacagttttgttt

SEQ ID NO: 428861 - DNA, 684 bp, Homo sapiens
gggtggagggaggtgttaatttcctagggctgcctcaacaaacctgagggcttaaaaaaccaggaatttattctctcatagttttggagcccaaaagtccaaagtctaggtgtctgcagggccacacttcccccagaggatctaggagagaattctgctgccttgtctccttccagctgcggatggctcctagtgttcctggctcatggcagcagcactccagcctctgctctgtctccatgtgggcttcccctctgtgtgtgtgtgtgtcttctcctttactgtctgttataaagacaccatcattggatttagggcccaccccaatctaggatgatctcattttgatttccttactttaattacatctgcaaagactaaggtcacgttcttaggttccaggtaacatatgttggtgggccactactcagactactgcaagggggtcgtgtggtggaatctataaagtcagcctgttccatttagaacagagaaataaataggcttttgcactgttgtgttttgcagcagaaggatatcctggggaggtcaagttccttaactcttagttgtacaaatggtgagagccacacaagctgccaaccctccagccacccagattctgtgtcctccctttcttaaggctgaggctttataaacctgattttgactacagttttgttt

SEQ ID NO: 428862 - DNA, 619 bp, Homo sapiens
acatcagtattttattttttattgctgtatattattctatatattatagaaacattgatttcttaaaaatataatcacataactacttggccacctaaatatactggcaatacttttaaaatattatcagtgttcagattttcctagttgttttgtgcatgtcaggtttcatttgtctgtttagaatcagtttgttcaaatcaggataaaataatatttccaatgttttaaagattgtgtccagcctgttcagagaatatatattagggagctttatgtaagaacagccatttccttatttgttggaagtggctgggcttttggtcaagcaacataatgtgtgtagggatcgaattttatggggaagatggatgggtcttctgctccactgagttacgtctaagatgtgccatcaaggctgggctgaccctgtccagacttgttggcacaccttagactcaactttacctaacttgtccttttctcctgcactacagagttctgccttctccgagggaagcaaggtggcttcgagaacaagaagagaattgactctgtctacctggaccccctggtctttcgagagtttgcattcatagacatgccagatgctgcgcat

SEQ ID NO: 428863 - DNA, 473 bp, Homo sapiens
gattaggtataaaaagcaggagttgctgtccgacgtcgtgagatgtgcatcgcagtcatgagacttgggtgtgctttgttttcacagcgaccctgctcctggagaggaatttccatccatttgcggagctgcctgagccacaacagacagctttgagtgacatcttccaggcggtcctatttgatgatgaactactcatggtcctggaaccagtggtgagccctgagacatctcaaggcagtgttttcactggggttttctggaacaggggaggaggcaggatggaattgtgttaaaggttcccccgcctccttttctccctacagctgtctcttttctgactcttgggtcctgcgttttctaagtgcagacaggtagctggcatcgggtggagggaggtgttaatttcctagggctgcctcaacaaacctgagggcttaaaaaaccaggaatttattctctcatagttttgg

SEQ ID NO: 428864 - DNA, 1906 bp, Homo sapiens
agcatccccctggctgctgccccacccccttaatagcctacactctctcttgagaacgagccatgtactctctgggtcacacctcaacaacacactgtctttacaaataaggctgctaacacatggcaggaacaactgagttcctaaccagtccctcggctacctgattcagcacgtgactcattcttttttgccttttcagctcaaagcttgtacccccaagggactatggtccttttaagaactgtatctgtgttttccctgggaggtgtttaatatccactttgaataacactgatctggcattcccttccctggggcttggcaagggcccttctggtgcagcccctagcctggcacagctctgctccaactttctgctgttgctgctcctggcctcaggccacgctgcactgataaagctacactgcattttcctccccaaaatgattggtgatggggtagagccctttatagtttacacagtattctgacatatgcaaaaacaaaacaactatggtaaatgaggaaactgaggctgagagaggtgtacctgaggctgcagcctgaatgtgtggagggtctcaaacatcactcttctgtcaccagatggcagggtctgcttttccatgctgtttcctttccttcccccagagtctgggcagttctttccatttggtaaattgaatgtcaaggagtatcctctgtggaatgcagagctggcagctgggttcctacatctgttttctacaaggtctttgctgcccatttagcaccattcattcactaactcagcaactgctgagtacctcccctgcctggctggcgggaaagtactaaaatataagttaggtgccatccaggggctggctctgttcccatggacttgtttttttggactgtgactgtgatttttctctcctgcagaaatgccagatagcgcagcagctctgctgggcacttgctgcaaactccagatcattcccacactgtgccacttgcttcgtgctctgtctgatgatggagtatctgatcttgaagacccaaccttgactcccctgaaagatacagaaaggtttgggattgtgcagcgcttgtttgcctcagctgacattagtctggagagactgaagtcatctgtgaaagctgtcattctgaaggactctaaagtcttcccactgcttctttgtataaccctgaatggactctgtgctttaggcagagaacattcatgatgtcatatgtgaactagaagtacgtgttactggccaaggctatttttcagaactgttaaaggtcatatgcacgttaaaagttgaccaatgaaatgaatttacagaacagtttaagaagtggtgacattttgcatgatgaatgacctgacttttagccaccaggtactctttaaacagttttccttatcagaggccctcctgtgctggtgacccagcatctgagttaggttccagcatgtaaagagctgggagggcggagaattcttagcatacattcagacgttttttctgcacaataataagtccatctgtcacttgcattccactttttgttacatagaaagagtctgaccctttaatccaaaaggtctttttacattgtgaatgctgtgggaaggcaatttctctgcacacaagaggctacgttttggaagtgatgtatgttatttgatgactgaaaatgaactgtaaatgctcctagagtatattcctctgctgaacaaaattaaacttcaaaaaaatctaacagtaacacacccctgcttgggaccctagctatatgcattttatgtgaccttgccatgcttcagtgaacatactaattctatgtctagcacatgttgatttcctatgtattctgggtattctattaaaggaaactttgaactatg

SEQ ID NO: 428865 - DNA, 890 bp, Homo sapiens
gggtgaggtcgacgggtatcgataagttttttgttttttattttttctgagatcacaccactgcactccagcctgggtgacagagcgagaccctgtttcaaaaaaataagaaataaaaagtgagtcttcatattcaaattagtatatgaggttaggcaacaattcttatatgggaccaggtatatttaatttgcctttctttgcagtcatcctagtaaatccttgtaaagggttattttatatacaattttgtagtatattctaaatcccctttggcaaataaagctgaagttatctagtgtcagcatactgtgatttgtatatttatataagacaagattgcatcattctgattaagttgcagcattttagttttatctgataggcctgtattgagtaatcagtagctatgtgcaaatattaagtcaacttaattaccagacccagaaggccagaggtaatcaaagagtactttcggaagatgaaatatttataatgagttatggaaacaatgttttagaaatgtttttcttggtgtaatttaatgcagatttttacctcaattttgttaaaaaacttgataatttgatccctccatctatttaatatttaatattttcagattctagagtatttaaaatttaaacacaattataaaattaattataattcctacttatgttagctatgatttagggccaaaactaccctggttttgtcttgcaacttgaaacattgtgtattttaaactatataatttgggaacattattttatagactgtggataaccaaatataagatttgtgatttttaatgcttcatttgtgtaaaatcatttgtatattctatttatagtatgcattttctagctcattaaaagtacagaaaa

SEQ ID NO: 428866 - DNA, 2805 bp, Homo sapiens
tgtttttagtagagatggggtttcaccatgttggccaggctgctcttgaactcctgagctcaagtaatctgcccgccctggcctcccaaagtgctgggattacaggcatgagccaccatgcctggctaaaaccaattctttagattgtttttgccaccatttgcttacttggaatagctttcacatttatttttcttatgaagaaatccagtgtcagtcagaccatgtaacatcaaagcaaaatttcattgaagcctatccttgtcttaattattctaaaataaagtacaataaagtgaattattttgccctttgtagtagcatagtgttaagttatatatatattttaatatgcatactcctaagtaaagtttcagagaccacatgctggagagcagtggctttcagacagcatcagcatcacctgaaggccttgttgaatacacattattggaagagaggggagaacacaggctcatgcctgtaattccagtgctttgggagactgaggcaggaggatcacgtgagcccaggagttcaagatcaggctgggcaatacagcaagacccctgtctctacaaaaacaaaaacaaaaaacaaacaggcatggtagtgcatacctgtagtctgagctgcttgggagtctgaggcaggaggatcacttgaacccaggagttcgaggctgcagtgagttattattgggccactgcagtccagcctgggcagcaaagtgagaccctgtctgttaaaaaaacaaaaccaaaaacttgattgctgggggccaccctagagtttctgattcagtaggtctggcggtggggatggtgggcctggtaatttgcctttctaacaagcgtccaggtaatgccccagctgctggtcccaggaccacactttgcagattattactctgagaagagcactaactctgacgttggattccttctgttcctcattagtgaatttatttgggggagattattcaatctggtagatccgcatttacttagctgtgaagtggaggttaatgcaacctgcctgagactgtgagaatgagaaactctaattgaaataccaggcccagcgtgcctggatgcttgaaaaatgctgactcccatggtccgtccttccctcactcttctcagctataaagtgagaagcgaaattcagtatcttttaagattcctctcaggtgtaaaatgctgtgattctaaaagtttaattttgtagttccagagacaatgccaaacacctgtgtgtgcttagtgctttgtaaagagtggtaataacagtgacacccacataggccgtagttttgtagttccagagacaatgccaaacacctgtgtgtacttagtgctttgtaaagagtgaataacagtgacaccacataggccatagttttgtagttccagagacaatgccaaacacctatgtgtacttagtgctttgtaaagagtggtaataacagtgacaccacataggccgtaattttgtttttgcttttgttagggtgttcagcatcttgactccttaaataaggttttcagtcagatttataaagcagcattgaagaagttgtattatatttgagtacagttggaatccatggcagttttatggaggccaaatatatcagatgaataggctaatttccctgagttgctggccttattagtccctactctgttgccccctggttacctaatgcatgttcaaaaggtatagttttcatcacctgcttgatcttgattttcagacagagcactttgggagtccgaggcgggtggatcacctgagattaggagttcaagaccagtgtgaccaacatggagaaaccccttctctactaaaaatacaaaaaattagccaggcatggtggtgcacgcctgtggtcccagctacttgtgaggctgaggtaggagaatcgcttgaacccaagaggcagaggttgcagtgagctgagatcacaccactgcactccagcctgggtgacagagcgagaccctgtttcaaaaaaataagaaataaaaagtgagtcttcatattcaaattagtatatgaggttaggcaacaattcttatatgggaccaggtatatttaatttgcctttctttgcagtcatcctagtaaatccttgtaaagggttattttatatacaattttgtagtatattctaaatcccctttggcaaataaagctgaagttatctagtgtcagcatactgtgatttgtatatttatataagacaagattgcatcattctgattaagttgcagcattttagttttatctgataggcctgtattgagtaatcagtagctatgtgcaaatattaagtcaacttaattaccagacccagaaggccagaggtaatcaaagagtactttcggaagatgaaatatttataatgagttatggaaacaatgttttagaaatgtttttcttggtgtaatttaatgcagatttttacctcaattttgttaaaaaacttgataatttgatccctccatctatttaatatttaatattttcagattctagagtatttaaaatttaaacacaattataaaattaattataattcctacttatgttagctatgatttagggccaaaactaccctggttttgtcttgcaacttgaaacattgtgtattttaaactatataatttgggaacattattttatagactgtggataaccaaatataagatttgtgatttttaatgcttcatttgtgtaaaatcatttgtatattctatttatagtatgcattttctagctcattaaaagtacagaaaa

SEQ ID NO: 428867 - DNA, 3127 bp, Homo sapiens
tgtttttagtagagatggggtttcaccatgttggccaggctgctcttgaactcctgagctcaagtaatctgcccgccctggcctcccaaagtgctgggattacaggcatgagccaccatgcctggctaaaaccaattctttagattgtttttgccaccatttgcttacttggaatagctttcacatttatttttcttatgaagaaatccagtgtcagtcagaccatgtaacatcaaagcaaaatttcattgaagcctatccttgtcttaattattctaaaataaagtacaataaagtgaattattttgccctttgtagtagcatagtgttaagttatatatatattttaatatgcatactcctaagtaaagtttcagagaccacatgctggagagcagtggctttcagacagcatcagcatcacctgaaggccttgttgaatacacattattggaagagaggggagaacacaggctcatgcctgtaattccagtgctttgggagactgaggcaggaggatcacgtgagcccaggagttcaagatcaggctgggcaatacagcaagacccctgtctctacaaaaacaaaaacaaaaaacaaacaggcatggtagtgcatacctgtagtctgagctgcttgggagtctgaggcaggaggatcacttgaacccaggagttcgaggctgcagtgagttattattgggccactgcagtccagcctgggcagcaaagtgagaccctgtctgttaaaaaaacaaaaccaaaaacttgattgctgggggccaccctagagtttctgattcagtaggtctggcggtggggatggtgggcctggtaatttgcctttctaacaagcgtccaggtaatgccccagctgctggtcccaggaccacactttgcagattattactctgagaagagcactaactctgacgttggattccttctgttcctcattagtgaatttatttgggggagattattcaatctggtagatccgcatttacttagctgtgaagtggaggttaatgcaacctgcctgagactgtgagaatgagaaactctaattgaaataccaggcccagcgtgcctggatgcttgaaaaatgctgactcccatggtccgtccttccctcactcttctcagctataaagtgagaagcgaaattcagtatcttttaagattcctctcaggtgtaaaatgctgtgattctaaaagtttaattttgtagttccagagacaatgccaaacacctgtgtgtgcttagtgctttgtaaagagtggtaataacagtgacacccacataggccgtagttttgtagttccagagacaatgccaaacacctgtgtgtacttagtgctttgtaaagagtgaataacagtgacaccacataggccatagttttgtagttccagagacaatgccaaacacctatgtgtacttagtgctttgtaaagagtggtaataacagtgacaccacataggccgtaattttgtttttgcttttgttagggtgttcagcatcttgactccttaaataaggttttcagtcagatttataaagcagcattgaagaagttgtattatatttgagtacagttggaatccatggcagttttatggaggccaaatatatcagatgaataggctaatttccctgagttgctggccttattagtccctactctgttgccccctggttacctaatgcatgttcaaaaggtatagttttcatcacctgcttgatcttgattttcagacagagcactttgggagtccgaggcgggtggatcacctgagattaggagttcaagaccagtgtgaccaacatggagaaaccccttctctactaaaaatacaaaaaattagccaggcatggtggtgcacgcctgtggtcccagctacttgtgaggctgaggtaggagaatcgcttgaacccaagaggcagaggttgcagtgagctgagatcacaccactgcactccagcctgggtgacagagcgagaccctgtttcaaaaaaataagaaataaaaagtgagtcttcatattcaaattagtatatgaggttaggcaacaattcttatatgggaccaggtatatttaatttgcctttctttgcagtcatcctagtaaatccttgtaaagggttattttatatacaattttgtagtatattctaaatcccctttggcaaataaagctgaagttatctagtgtcagcatactgtgatttgtatatttatataagacaagattgcatcattctgattaagttgcagcattttagttttatctgataggcctgtattgagtaatcagtagctatgtgcaaatattaagtcaacttaattaccagacccagaaggccagaggtaatcaaagagtactttcggaagatgaaatatttataatgagttatggaaacaatgttttagaaatgtttttcttggtgtaatttaatgcagatttttacctcaattttgttaaaaaacttgataatttgatccctccatctatttaatatttaatattttcagattctagagtatttaaaatttaaacacaattataaaattaattataattcctacttatgttagctatgatttagggccaaaactaccctggttttgtcttgcaacttgaaacattgtgtattttaaactatataatttgggaacattattttatagactgtggataaccaaatataagatttgtgatttttaatgcttcatttgtgtaaaatcatttgtatattctatttatagtatgcattttctagctcattaaaagtacagaaaactcaaaaaaaaaaaaaaaaaaaaaaaaaaaaaaaaagggggggggggaaaaaagtatttcccttggggggccaaggtttaacgcttatcccaggtttttttgacaaaggggggcccctatataggagcagaattaaaaaggaagggaggggcgggggtaaccacggtcggcgcgggaaaacctgcgtcgtgggatcttgggaagggagccttcttgggtgtgtgcgtttgttgggcacacttcctaaaagttaatgtctaggaaatataatttagtgtttgtgtacaccggtttctgtgtagaagttgttaagtgttagatt

SEQ ID NO: 428868 - DNA, 2351 bp, Homo sapiens
tctggtgtatcccttagtctggtgtttccctttgtctggtgtttccctttgtctggtgtttccctttgtctggtgtttccctttgtctggtgtttaccctttgtctggtgtttccctgtctctacaaaaacaaaaacaaaaaacaaacaggcatggtagtgcatacctgtagtctgagctgcttgggagtctgaggcaggaggatcacttgaacccaggagttcgaggctgcagtgagttattattgggccactgcagtccagcctgggcagcaaagtgagaccctgtctgttaaaaaaacaaaaccaaaaacttgattgctgggggccaccctagagtttctgattcagtaggtctggcggtggggatggtgggcctggtaatttgcctttctaacaagcgtccaggtaatgccccagctgctggtcccaggaccacactttgcagattattactctgagaagagcactaactctgacgttggattccttctgttcctcattagtgaatttatttgggggagattattcaatctggtagatccgcatttacttagctgtgaagtggaggttaatgcaacctgcctgagactgtgagaatgagaaactctaattgaaataccaggcccagcgtgcctggatgcttgaaaaatgctgactcccatggtccgtccttccctcactcttctcagctataaagtgagaagcgaaattcagtatcttttaagattcctctcaggtgtaaaatgctgtgattctaaaagtttaattttgtagttccagagacaatgccaaacacctgtgtgtgcttagtgctttgtaaagagtggtaataacagtgacacccacataggccgtagttttgtagttccagagacaatgccaaacacctgtgtgtacttagtgctttgtaaagagtgaataacagtgacaccacataggccatagttttgtagttccagagacaatgccaaacacctatgtgtacttagtgctttgtaaagagtggtaataacagtgacaccacataggccgtaattttgtttttgcttttgttagggtgttcagcatcttgactccttaaataaggttttcagtcagatttataaagcagcattgaagaagttgtattatatttgagtacagttggaatccatggcagttttatggaggccaaatatatcagatgaataggctaatttccctgagttgctggccttattagtccctactctgttgccccctggttacctaatgcatgttcaaaaggtatagttttcatcacctgcttgatcttgattttcagacagagcactttgggagtccgaggcgggtggatcacctgagattaggagttcaagaccagtgtgaccaacatggagaaaccccttctctactaaaaatacaaaaaattagccaggcatggtggtgcacgcctgtggtcccagctacttgtgaggctgaggtaggagaatcgcttgaacccaagaggcagaggttgcagtgagctgagatcacaccactgcactccagcctgggtgacagagcgagaccctgtttcaaaaaaataagaaataaaaagtgagtcttcatattcaaattagtatatgaggttaggcaacaattcttatatgggaccaggtatatttaatttgcctttctttgcagtcatcctagtaaatccttgtaaagggttattttatatacaattttgtagtatattctaaatcccctttggcaaataaagctgaagttatctagtgtcagcatactgtgatttgtatatttatataagacaagattgcatcattctgattaagttgcagcattttagttttatctgataggcctgtattgagtaatcagtagctatgtgcaaatattaagtcaacttaattaccagacccagaaggccagaggtaatcaaagagtactttcggaagatgaaatatttataatgagttatggaaacaatgttttagaaatgtttttcttggtgtaatttaatgcagatttttacctcaattttgttaaaaaacttgataatttgatccctccatctatttaatatttaatattttcagattctagagtatttaaaatttaaacacaattataaaattaattataattcctacttatgttagctatgatttagggccaaaactaccctggttttgtcttgcaacttgaaacattgtgtattttaaactatataatttgggaacattattttatagactgtggataaccaaatataagatttgtgatttttaatgcttcatttgtgtaaaatcatttgtatattctatttatagtatgcattttctagctcattaaaagtacagaaaa

SEQ ID NO: 428869 - DNA, 2108 bp, Homo sapiens
aattggcattgtgagactttatatttttgcctaaatgtaccctgtctgttaaaaaaacaaaaccaaaaacttgattgctgggggccaccctagagtttctgattcagtaggtctggcggtggggatggtgggcctggtaatttgcctttctaacaagcgtccaggtaatgccccagctgctggtcccaggaccacactttgcagattattactctgagaagagcactaactctgacgttggattccttctgttcctcattagtgaatttatttgggggagattattcaatctggtagatccgcatttacttagctgtgaagtggaggttaatgcaacctgcctgagactgtgagaatgagaaactctaattgaaataccaggcccagcgtgcctggatgcttgaaaaatgctgactcccatggtccgtccttccctcactcttctcagctataaagtgagaagcgaaattcagtatcttttaagattcctctcaggtgtaaaatgctgtgattctaaaagtttaattttgtagttccagagacaatgccaaacacctgtgtgtgcttagtgctttgtaaagagtggtaataacagtgacacccacataggccgtagttttgtagttccagagacaatgccaaacacctgtgtgtacttagtgctttgtaaagagtgaataacagtgacaccacataggccatagttttgtagttccagagacaatgccaaacacctatgtgtacttagtgctttgtaaagagtggtaataacagtgacaccacataggccgtaattttgtttttgcttttgttagggtgttcagcatcttgactccttaaataaggttttcagtcagatttataaagcagcattgaagaagttgtattatatttgagtacagttggaatccatggcagttttatggaggccaaatatatcagatgaataggctaatttccctgagttgctggccttattagtccctactctgttgccccctggttacctaatgcatgttcaaaaggtatagttttcatcacctgcttgatcttgattttcagacagagcactttgggagtccgaggcgggtggatcacctgagattaggagttcaagaccagtgtgaccaacatggagaaaccccttctctactaaaaatacaaaaaattagccaggcatggtggtgcacgcctgtggtcccagctacttgtgaggctgaggtaggagaatcgcttgaacccaagaggcagaggttgcagtgagctgagatcacaccactgcactccagcctgggtgacagagcgagaccctgtttcaaaaaaataagaaataaaaagtgagtcttcatattcaaattagtatatgaggttaggcaacaattcttatatgggaccaggtatatttaatttgcctttctttgcagtcatcctagtaaatccttgtaaagggttattttatatacaattttgtagtatattctaaatcccctttggcaaataaagctgaagttatctagtgtcagcatactgtgatttgtatatttatataagacaagattgcatcattctgattaagttgcagcattttagttttatctgataggcctgtattgagtaatcagtagctatgtgcaaatattaagtcaacttaattaccagacccagaaggccagaggtaatcaaagagtactttcggaagatgaaatatttataatgagttatggaaacaatgttttagaaatgtttttcttggtgtaatttaatgcagatttttacctcaattttgttaaaaaacttgataatttgatccctccatctatttaatatttaatattttcagattctagagtatttaaaatttaaacacaattataaaattaattataattcctacttatgttagctatgatttagggccaaaactaccctggttttgtcttgcaacttgaaacattgtgtattttaaactatataatttgggaacattattttatagactgtggataaccaaatataagatttgtgatttttaatgcttcatttgtgtaaaatcatttgtatattctatttatagtatgcattttctagctcattaaaagtacagaaaa

SEQ ID NO: 428870 - DNA, 2877 bp, Homo sapiens
tgtttttagtagagatggggtttcaccatgttggccaggctgctcttgaactcctgagctcaagtaatctgcccgccctggcctcccaaagtgctgggattacaggcatgagccaccatgcctggctaaaaccaattctttagattgtttttgccaccatttgcttacttggaatagctttcacatttatttttcttatgaagaaatccagtgtcagtcagaccatgtaacatcaaagcaaaatttcattgaagcctatccttgtcttaattattctaaaataaagtacaataaagtgaattattttgccctttgtagtagcatagtgttaagttatatatatattttaatatgcatactcctaagtaaagtttcagagaccacatgctggagagcagtggctttcagacagcatcagcatcacctgaaggccttgttgaatacacattattggaagagaggggagaacacaggctcatgcctgtaattccagtgctttgggagactgaggcaggaggatcacgtgagcccaggagttcaagatcaggctgggcaatacagcaagacccctgtctctacaaaaacaaaaacaaaaaacaaacaggcatggtagtgcatacctgtagtctgagctgcttgggagtctgaggcaggaggatcacttgaacccaggagttcgaggctgcagtgagttattattgggccactgcagtccagcctgggcagcaaagtgagaccctgtctgttaaaaaaacaaaaccaaaaacttgattgctgggggccaccctagagtttctgattcagtaggtctggcggtggggatggtgggcctggtaatttgcctttctaacaagcgtccaggtaatgccccagctgctggtcccaggaccacactttgcagattattactctgagaagagcactaactctgacgttggattccttctgttcctcattagtgaatttatttgggggagattattcaatctggtagatccgcatttacttagctgtgaagtggaggttaatgcaacctgcctgagactgtgagaatgagaaactctaattgaaataccaggcccagcgtgcctggatgcttgaaaaatgctgactcccatggtccgtccttccctcactcttctcagctataaagtgagaagcgaaattcagtatcttttaagattcctctcaggtgtaaaatgctgtgattctaaaagtttaattttgtagttccagagacaatgccaaacacctgtgtgtgcttagtgctttgtaaagagtggtaataacagtgacacccacataggccgtagttttgtagttccagagacaatgccaaacacctgtgtgtacttagtgctttgtaaagagtgaataacagtgacaccacataggccatagttttgtagttccagagacaatgccaaacacctatgtgtacttagtgctttgtaaagagtggtaataacagtgacaccacataggccgtaattttgtttttgcttttgttagggtgttcagcatcttgactccttaaataaggttttcagtcagatttataaagcagcattgaagaagttgtattatatttgagtacagttggaatccatggcagttttatggaggccaaatatatcagatgaataggctaatttccctgagttgctggccttattagtccctactctgttgccccctggttacctaatgcatgttcaaaaggtatagttttcatcacctgcttgatcttgattttcagacagagcactttgggagtccgaggcgggtggatcacctgagattaggagttcaagaccagtgtgaccaacatggagaaaccccttctctactaaaaatacaaaaaattagccaggcatggtggtgcacgcctgtggtcccagctacttgtgaggctgaggtaggagaatcgcttgaacccaagaggcagaggttgcagtgagctgagatcacaccactgcactccagcctgggtgacagagcgagaccctgtttcaaaaaaataagaaataaaaagtgagtcttcatattcaaattagtatatgaggttaggcaacaattcttatatgggaccaggtatatttaatttgcctttctttgcagtcatcctagtaaatccttgtaaagggttattttatatacaattttgtagtatattctaaatcccctttggcaaataaagctgaagttatctagtgtcagcatactgtgatttgtatatttatataagacaagattgcatcattctgattaagttgcagcattttagttttatctgataggcctgtattgagtaatcagtagctatgtgcaaatattaagtcaacttaattaccagacccagaaggccagaggtaatcaaagagtactttcggaagatgaaatatttataatgagttatggaaacaatgttttagaaatgtttttcttggtgtaatttaatgcagatttttacctcaattttgttaaaaaacttgataatttgatccctccatctatttaatatttaatattttcagattctagagtatttaaaatttaaacacaattataaaattaattataattcctacttatgttagctatgatttagggccaaaactaccctggttttgtcttgcaacttgaaacattgtgtattttaaactatataatttgggaacattattttatagactgtggataaccaaatataagatttgtgatttttaatgcttcatttgtgtaaaatcatttgtatattctatttatagtatgcattttctagctcattaaaagtacagaaaaacctcaaatctgtccttatacaaatatttgatttctagtttccttttattaaaacattttcactcattcatt

SEQ ID NO: 428871 - DNA, 2741 bp, Homo sapiens
tgtttttagtagagatggggtttcaccatgttggccaggctgctcttgaactcctgagctcaagtaatctgcccgccctggcctcccaaagtgctgggattacaggcatgagccaccatgcctggctaaaaccaattctttagattgtttttgccaccatttgcttacttggaatagctttcacatttatttttcttatgaagaaatccagtgtcagtcagaccatgtaacatcaaagcaaaatttcattgaagcctatccttgtcttaattattctaaaataaagtacaataaagtgaattattttgccctttgtagtagcatagtgttaagttatatatatattttaatatgcatactcctaagtaaagtttcagagaccacatgctggagagcagtggctttcagacagcatcagcatcacctgaaggccttgttgaatacacattattggaagagaggggagaacacaggctcatgcctgtaattccagtgctttgggagactgaggcaggaggatcacgtgagcccaggagttcaagatcaggctgggcaatacagcaagacccctgtctctacaaaaacaaaaacaaaaaacaaacaggcatggtagtgcatacctgtagtctgagctgcttgggagtctgaggcaggaggatcacttgaacccaggagttcgaggctgcagtgagttattattgggccactgcagtccagcctgggcagcaaagtgagaccctgtctgttaaaaaaacaaaaccaaaaacttgattgctgggggccaccctagagtttctgattcagtaggtctggcggtggggatggtgggcctggtaatttgcctttctaacaagcgtccaggtaatgccccagctgctggtcccaggaccacactttgcagattattactctgagaagagcactaactctgacgttggattccttctgttcctcattagtgaatttatttgggggagattattcaatctggtagatccgcatttacttagctgtgaagtggaggttaatgcaacctgcctgagactgtgagaatgagaaactctaattgaaataccaggcccagcgtgcctggatgcttgaaaaatgctgactcccatggtccgtccttccctcactcttctcagctataaagtgagaagcgaaattcagtatcttttaagattcctctcaggtgtaaaatgctgtgattctaaaagtttaattttgtagttccagagacaatgccaaacacctgtgtgtgcttagtgctttgtaaagagtggtaataacagtgacacccacataggccgtagttttgtagttccagagacaatgccaaacacctgtgtgtacttagtgctttgtaaagagtgaataacagtgacaccacataggccatagttttgtagttccagagacaatgccaaacacctatgtgtacttagtgctttgtaaagagtggtaataacagtgacaccacataggccgtaattttgtttttgcttttgttagggtgttcagcatcttgactccttaaataaggttttcagtcagatttataaagcagcattgaagaagttgtattatatttgagtacagttggaatccatggcagttttatggaggccaaatatatcagatgaataggctaatttccctgagttgctggccttattagtccctactctgttgccccctggttacctaatgcatgttcaaaaggtatagttttcatcacctgcttgatcttgattttcagacagcatcaaatcagttgcaaaacaaatccaagctaaaattttgagtgtatgattaatttactatagcatgtaattatgcagtattttattttttattttttattttttttgagacagagtctcactccattgcccagctgagatcacaccactgcactccagcctgggtgacagagcgagaccctgtttcaaaaaaataagaaataaaaagtgagtcttcatattcaaattagtatatgaggttaggcaacaattcttatatgggaccaggtatatttaatttgcctttctttgcagtcatcctagtaaatccttgtaaagggttattttatatacaattttgtagtatattctaaatcccctttggcaaataaagctgaagttatctagtgtcagcatactgtgatttgtatatttatataagacaagattgcatcattctgattaagttgcagcattttagttttatctgataggcctgtattgagtaatcagtagctatgtgcaaatattaagtcaacttaattaccagacccagaaggccagaggtaatcaaagagtactttcggaagatgaaatatttataatgagttatggaaacaatgttttagaaatgtttttcttggtgtaatttaatgcagatttttacctcaattttgttaaaaaacttgataatttgatccctccatctatttaatatttaatattttcagattctagagtatttaaaatttaaacacaattataaaattaattataattcctacttatgttagctatgatttagggccaaaactaccctggttttgtcttgcaacttgaaacattgtgtattttaaactatataatttgggaacattattttatagactgtggataaccaaatataagatttgtgatttttaatgcttcatttgtgtaaaatcatttgtatattctatttatagtatgcattttctagctcattaaaagtacagaaaa

SEQ ID NO: 428872 - DNA, 1146 bp, Homo sapiens
tgcaccaccacgcccagctaattttttgtatttatagtagagaggaggttttaccatgttggccaggttggtcttgaactcttgacctcaagtgatctacacgcagcactttgggagtccgaggcgggtggatcacctgagattaggagttcaagaccagtgtgaccaacatggagaaaccccttctctactaaaaatacaaaaaattagccaggcatggtggtgcacgcctgtggtcccagctacttgtgaggctgaggtaggagaatcgcttgaacccaagaggcagaggttgcagtgagctgagatcacaccactgcactccagcctgggtgacagagcgagaccctgtttcaaaaaaataagaaataaaaagtgagtcttcatattcaaattagtatatgaggttaggcaacaattcttatatgggaccaggtatatttaatttgcctttctttgcagtcatcctagtaaatccttgtaaagggttattttatatacaattttgtagtatattctaaatcccctttggcaaataaagctgaagttatctagtgtcagcatactgtgatttgtatatttatataagacaagattgcatcattctgattaagttgcagcattttagttttatctgataggcctgtattgagtaatcagtagctatgtgcaaatattaagtcaacttaattaccagacccagaaggccagaggtaatcaaagagtactttcggaagatgaaatatttataatgagttatggaaacaatgttttagaaatgtttttcttggtgtaatttaatgcagatttttacctcaattttgttaaaaaacttgataatttgatccctccatctatttaatatttaatattttcagattctagagtatttaaaatttaaacacaattataaaattaattataattcctacttatgttagctatgatttagggccaaaactaccctggttttgtcttgcaacttgaaacattgtgtattttaaactatataatttgggaacattattttatagactgtggataaccaaatataagatttgtgatttttaatgcttcatttgtgtaaaatcatttgtatattctatttatagtatgcattttctagctcattaaaagtacagaaaa

SEQ ID NO: 428873 - DNA, 1703 bp, Homo sapiens
  misc_feature (1667)..(1667): n is a, c, g, or t
tgtttttagtagagatggggtttcaccatgttggccaggctgctcttgaactcctgagctcaagtaatctgcccgccctggcctcccaaagtgctgggattacaggcatgagccaccatgcctggctaaaaccaattctttagattgtttttgccaccatttgcttacttggaatagctttcacatttatttttcttatgaagaaatccagtgtcagtcagaccatgtaacatcaaagcaaaatttcattgaagcctatccttgtcttaattattctaaaataaagtacaataaagtgaattattttgccctttgtagtagcatagtgttaagttatatatatattttaatatgcatactcctaagtaaagtttcagagaccacatgctggagagcagtggctttcagacagcatcagcatcacctgaaggccttgttgaatacacattattggaagagaggggagaacacaggctcatgcctgtaattccagtgctttgggagactgaggcaggaggatcacgtgagcccaggagttcaagatcaggctgggcaatacagcaagacccctgtctctacaaaaacaaaaacaaaaaacaaacaggcatggtagtgcatacctgtagtctgagctgcttgggagtctgaggcaggaggatcacttgaacccaggagttcgaggctgcagtgagttattattgggccactgcagtccagcctgggcagcaaagtgagaccctgtctgttaaaaaaacaaaaccaaaaacttgattgctgggggccaccctagagtttctgattcagtaggtctggcggtggggatggtgggcctggtaatttgcctttctaacaagcgtccaggtaatgccccagctgctggtcccaggaccacactttgcagattattactctgagaagagcactaactctgacgttggattccttctgttcctcattagtgaatttatttgggggagattattcaatctggtagatccgcatttacttagctgtgaagtggaggttaatgcaacctgcctgagactgtgagaatgagaaactctaattgaaataccaggcccagcgtgcctggatgcttgaaaaatgctgactcccatggtccgtccttccctcactcttctcagctataaagtgagaagcgaaattcagtatcttttaagattcctctcaggtgtaaaatgctgtgattctaaaagtttaattttgtagttccagagacaatgccaaacacctgtgtgtgcttagtgctttgtaaagagtggtaataacagtgacacccacataggccgtagttttgtagttccagagacaatgccaaacacctgtgtgtacttagtgctttgtaaagagtgaataacagtgacaccacataggccatagttttgtagttccagagacaatgccaaacacctatgtgtacttagtgctttgtaaagagtggtaataacagtgacaccacataggccgtaattttgtttttgcttttgttagggtgttcagcatcttgactccttaaataaggttttcagtcagatttataaagcagcattgaagaagttgtattatatttgagtacagttggaatccatggcagttttatggaggccaaatatatcagatgaataggctaattgcacgagtcttgngcaagaaagggatactctagaacgccgcacccacac

SEQ ID NO: 428874 - DNA, 1490 bp, Homo sapiens
agcgggtggagcggccggctgggtggcccgcgagctgcacccggatctgctccgcggggcgacgtgagcgcgcaggggggcggcggcctcgcctcgtctctctctctgcgcctgggtcgggtgggtgacgccgagagccagagagatgtcggatttcgacagtaacccgtttgccgacccggatctcaacaatcccttcaaggatccatcagttacacaagtgacaagaaatgttccaccaggacttgatgaatataatccattctcggattctagaacacctccaccaggcggtgtgaagatgcctaatgtacccaatacacaaccagcaataatgaaaccaacagaggaacatccagcttatacacagattgcaaaggaacatgcattggcccaagctgaacttcttaagcgccaggaagaactagaaagaaaagccgcagaattagatcgtcgggaacgagaaatgcaaaacctcagtcaacatggtagaaaaaataattggccacctcttcctagcaattttcctgtcggaccttgtttctatcaggatttttctgtagacattcctgtagaattccaaaagacagtaaagcttatgtactacttgtggatgttccatgcagtaacactgtttctaaatatcttcggatgcttggcttggttttgtgttgattctgcaagagcggttgattttggattgagtatcctgtggttcttgctttttactccttgttcatttgtctgttggtacagaccactttatggagctttcaggagtgacagttcatttagattctttgtattcttcttcgtctatatttgtcagtttgctgtacatgtactccaagctgcaggatttcataactggggcaattgtggttggatttcatcccttactggtctcaaccaaaatattcctgttggaatcatgatgataatcatagcagcacttttcacagcatcagcagtcatctcactagttatgttcaaaaaagtacatggactatatcgcacaacaggtgctagttttgagaaggcccaacaggagtttgcaacaggtgtgatgtccaacaaaactgtccagaccgcagctgcaaatgcagcttcaactgcagcatctagtgcagctcagaatgctttcaagggtaaccagatttaagaatcttcaaacaatacactgttaccttttgactgtacctttttctccagttactgtattctacaaatatttttatgttcaaaacacacagtacagacagcatggatatttcctgttcacttgtgcatgggctaaaaccaggaaaacttccttgtcttattactttacctaatagtttcttaatatttcagtgccccttgcagaaaaaatattacatgctaaataaatattctccatatttttgggggatgacattcagtgaattatttcagtggtgacccactgaaaattaataatggtacttatgattaaaaacgcatttaatact

SEQ ID NO: 428875 - DNA, 1330 bp, Homo sapiens
agcgggtggagcggccggctgggtggcccgcgagctgcacccggatctgctccgcggggcgacgtgagcgcgcaggggggcggcggcctcgcctcgtctctctctctgcgcctgggtcgggtgggtgacgccgagagccagagagatgtcggatttcgacagtaacccgtttgccgacccggatctcaacaatcccttcaaggatccatcagttacacaagtgacaagaaatgttccaccaggacttgatgaatataatccattctcggattctagaacacctccaccaggcggtgtgaagatgcctaatgtacccaatacacaaccagcaataatgaaaccaacagaggaacatccagcttatacacagattgcaaaggaacatgcattggcccaagctgaacttcttaagcgccaggaagaactagaaagaaaagccgcagaattagatcgtcgggaacgagaaatgcaaaacctcagtcaacatggtagaaaaaataattggccacctcttcctagcaattttcctgtcggaccttgtttctatcaggatttttctgtagacattcctgtagaattccaaaagacagtaaagcttatgtactacttgtggatgtgagtgacagttcatttagattctttgtattcttcttcgtctatatttgtcagtttgctgtacatgtactccaagctgcaggatttcataactggggcaattgtggttggatttcatcccttactggtctcaaccaaaatattcctgttggaatcatgatgataatcatagcagcacttttcacagcatcagcagtcatctcactagttatgttcaaaaaagtacatggactatatcgcacaacaggtgctagttttgagaaggcccaacaggagtttgcaacaggtgtgatgtccaacaaaactgtccagaccgcagctgcaaatgcagcttcaactgcagcatctagtgcagctcagaatgctttcaagggtaaccagatttaagaatcttcaaacaatacactgttaccttttgactgtacctttttctccagttactgtattctacaaatatttttatgttcaaaacacacagtacagacagcatggatatttcctgttcacttgtgcatgggctaaaaccaggaaaacttccttgtcttattactttacctaatagtttcttaatatttcagtgccccttgcagaaaaaatattacatgctaaataaatattctccatatttttgggggatgacattcagtgaattatttcagtggtgacccactgaaaattaataatggtacttatgattaaaaacgcatttaatact

SEQ ID NO: 428876 - DNA, 774 bp, Homo sapiens
tgccgccttgcagtttgatctcagattgctgtgctagcaatcagcgagactccgtgggcgtaggaccctccgagccaggtgcaggatataatctcgtggtgcgccattttttaagccggtccgaaaggcgcaatattcgggtgggagtgacccgattttccagtggttggatttcatcccttactggtctcaaccaaaatattcctgttggaatcatgatgataatcatagcagcacttttcacagcatcagcagtcatctcactagttatgttcaaaaaagtacatggactatatcgcacaacaggtgctagttttgagaaggcccaacaggagtttgcaacaggtgtgatgtccaacaaaactgtccagaccgcagctgcaaatgcagcttcaactgcagcatctagtgcagctcagaatgctttcaagggtaaccagatttaagaatcttcaaacaatacactgttaccttttgactgtacctttttctccagttactgtattctacaaatatttttatgttcaaaacacacagtacagacagcatggatatttcctgttcacttgtgcatgggctaaaaccaggaaaacttccttgtcttattactttacctaatagtttcttaatatttcagtgccccttgcagaaaaaatattacatgctaaataaatattctccatatttttgggggatgacattcagtgaattatttcagtggtgacccactgaaaattaataatggtacttatgattaaaaacgcatttaatact

SEQ ID NO: 428877 - DNA, 521 bp, Homo sapiens
agcgggtggagcggccggctgggtggcccgcgagctgcacccggatctgctccgcggggcgacgtgagcgcgcaggggggcggcggcctcgcctcgtctctctctctgcgcctgggtcgggtgggtgacgccgagagccagagagatgtcggatttcgacagtaacccgtttgccgacccggatctcaacaatcccttcaaggatccatcagttacacaagtgacaagaaatgttccaccaggacttgatgaatataatccattctcggattctagaacacctccaccaggcggtgtgaagatgcctaatgtacccaatacacaaccagcaataatgaaaccaacagaggaacatccagcttatacacagattgcaaaggaacatgcattggcccaagctgaacttcttaagcgccaggaagaactagaaagaaaagccgcagaattagatcgtcgggaacgagaaatgcaaaacctcagtcaacatggtagtatccaaagaaatttgaaataaaaataac

SEQ ID NO: 428878 - DNA, 6235 bp, Homo sapiens
agcgggtggagcggccggctgggtggcccgcgagctgcacccggatctgctccgcggggcgacgtgagcgcgcaggggggcggcggcctcgcctcgtctctctctctgcgcctgggtcgggtgggtgacgccgagagccagagagatgtcggatttcgacagtaacccgtttgccgacccggatctcaacaatcccttcaaggatccatcagttacacaagtgacaagaaatgttccaccaggacttgatgaatataatccattctcggattctagaacacctccaccaggcggtgtgaagatgcctaatgtacccaatacacaaccagcaataatgaaaccaacagaggaacatccagcttatacacagattgcaaaggaacatgcattggcccaagctgaacttcttaagcgccaggaagaactagaaagaaaagccgcagaattagatcgtcgggaacgagaaatgcaaaacctcagtcaacatggtagaaaaaataattggccacctcttcctagcaattttcctgtcggaccttgtttctatcaggatttttctgtagacattcctgtagaattccaaaagacagtaaagcttatgtactacttgtggatgttccatgcagtaacactgtttctaaatatcttcggatgcttggcttggttttgtgttgattctgcaagagcggttgattttggattgagtatcctgtggttcttgctttttactccttgttcatttgtctgttggtacagaccactttatggagctttcaggagtgacagttcatttagattctttgtattcttcttcgtctatatttgtcagtttgctgtacatgtactccaagctgcaggatttcataactggggcaattgtggttggatttcatcccttactggtctcaaccaaaatattcctgttggaatcatgatgataatcatagcagcacttttcacagcatcagcagtcatctcactagttatgttcaaaaaagtacatggactatatcgcacaacaggtgctagttttgagaaggcccaacaggagtttgcaacaggtgtgatgtccaacaaaactgtccagaccgcagctgcaaatgcagcttcaactgcagcatctagtgcagctcagaatgctttcaagggtaaccagatttaagaatcttcaaacaatacactgttaccttttgactgtacctttttctccagttactgtattctacaaatatttttatgttcaaaacacacagtacagacagcatggatatttcctgttcacttgtgcatgggctaaaaccaggaaaacttccttgtcttattactttacctaatagtttcttaatatttcagtgccccttgcagaaaaaatattacatgctaaataaatattctccatatttttgggggatgacattcagtgaattatttcagtggtgacccactgaaaattaataatggtacttatgattaaaaacgcatttaatactaactgcagtagttctttcaagaatctttagagataaggattgcacattggaaaagtaaaccatgtttcattcctttttccctatttatattgaaagaaataggccagcagagacttagggattttaaattggcttgctttttagctgtttcagtcaccagtgaagagcctatgtgcattttgtagtagataatgtaaaatttgtcatctttttcttttcttttttttagaatagctgatattttgataacaatctctaatttgcatgggcaccacatttcttatattaaaagaattagtgttttggcttctgtactgcttatggttgtaggattcaggggttaatggaatcacagaaatgatattctgcaagaatttcttttaaataaaaagtttgggggtgcaatataagaagtttatataatatgcagtacattatccaaaagagaaggtagttaatgcagtagaaagtagtggtaataattcctttttaaaaaaatttcggtagtcatatagtaacattttgctatatgaaaactttggtatattctgtggttacaactaagattgtgtctggcagctcttttttggggatgtgtgtgtgtgatttttaacagaggtattaaaggctagcctaactgttgtctaaaaagattgtacagtatttaagggattttccttttagcttttcatctccagtggcattaaacataaaaagaccctggcattttttcacatacttgaatccctaaatgcacctgtctttcactttttgagacagactgaatatatctaaaatttccagcaataaaaaaaaaagcatttaacttgcaccaagcaagaaaatataaatacagttaactgcattaagataatcacgttaaaattgttactatgcagcacagaacttcattcttatagtattcttgggttcaacctttgaatcaattttaccactgattaaataaatgactcaaagacatctgtaagtcatgctgctgtgttttgaaagtctttaactaaattaagattgcagaatgatagtgattattcaattagattttaagtaaggattgtgatattagaggctggaaatccttattttttaaaaaatcagataggcataaatagttaaatcactttcattctccccaaacctgtagttacagaaaaagttttatgctagaggtgggatgccaagttttcactatccatgaagcagcgctgcatgtcactaggtaacacagatccatccagatggtgtttacatttgatttatttgggatcttattgacatcaggtatacttggaagacatttcttttattcttcagcgtatgaatttaaagctattttttgtaaatatttctaatcagcgataatttctacctatgttctcaaccaacttagccagtttgtttttcagagcctgtagtcttattggaaatctattttatcagtgtgctttattgagtgtggattttgcatacattcaaaacattaaccacaaaatacagcaagtgcacctatattcaccattaacttatatcccaagtccattttttcctgtacactacaaacaaaagatatattagagacttttgaaaaatgctgaaatactttgcttcagaattggaatgtttatattatgtagaaatcttcaaaggtagcattattaaatagcaaagaataattagaacccacatatctttttttgtgtggatggggaaaatgttttaaaatccagttatttaatatgagtttgagagagaaaattgttttttaaaaatatatgtgcattgaaatgatggcaatgcttatagtatgatcaagtatgaaaggaactttaaattcttatatttacttttctctcagtaaattgttaaattttcactcagcaaaagattggcatttgttaagtgttctatatttagtactaaaatcacagtcatgaaatcatagtcataaaatggtcttcacacagcagtcatccgtgtcatttatcattttgtaatattaaattatggcaattttatttcaaactaaagtttgaacaccggaaagtcattactcagtgatttgtaatttgggacttggattatttatctagagatgtttgtatattttgtcagtaactaatactgcgctgccatcatggtgactgtcatggttctacagaaatgccctccatgtgtccctctaatgttgcatgtttcagtgggttggaagttttgtatatttattgtattaacacagagtgtcataaaataaaatgctgtttactggatgtttgtttgtataattttgaacactataatagcaattcagagacagacattgttaaaggtttgatgtatatagaaattccatgtttgattttttaaaatatgtgtataagtctgtcatgtgctaaacaaaataatatgaaagacctagttaaaaattctaaccaatgtaaaatgaccatttttctgttgcattagacctttacaggtaatggaacatgagcttcacccatattaaatattttggcccctttaaggtcaaaatacagatcatctagaagttagattcaaaatggaaaacctattcatggctcagatttttcattgtgggttaaaaatgggtgtctctgtactagtattgtatttattcaattgaacttgtattctgatttctaaccttgctacctattgctgttttatgtactgatgaaagtacctatttgtgtatattggatttttcacttggttagctaaagaagatgtaaaaatatctaaaataatgttcatggtgaatcttattttgagaaatacatgttaaaaaaggaacagtattctttattttctgggtgttatatttaaaaaagcaagtttggatttttacacctaatttactaggaaaatattttattctgtaattcatgttaagattatgtatggtttgcattttaaggggatttatgttaggttaattagttgtttctgtaaatcatttgtaatagcatagtgctttttactcattgctgtatctttttctgaaaacactgttgttaacatctaattcagtatccttattggtacaaatctgtgtttggcatgactgtttatatacagaatttgttacattttgagcattttttcccctgcttatgtataccttagagttaccatggctgtcatataccatttcactatatctcctttcagtttttccttaaggaaaatgtttagaggaatttgttcatttcatgtgattaagccctttagagatgaaataagattggttaattttaaaaaaattgaggatggttaaaaaatagaaaacaccttactttgatacattttaaagtacaatagtatacatttatttagagtagactaatgtgtttaaaacatgagttgttttaaatacttttttattgagctaaaaagttttatctcacatattaagtattacagaaagtgaagtattttggctagaattttagggcatattttataaagcagcatgcctgtaatattggtgggtatttttaaactttaggactttatcacagtatgtagagagctagaaataaatctagaaactttctaagccaggtattgccactaacctgtcttatataagcagatacctcttatttgaagattgtaggaaaatagagaaagactgttctccagttttctcacccccgctgtgggttttatatttacaatttaactttggggtttgggtaagacaaacatttaatgtataggattttggccaggtgtggtggctcacgcctgtaatcccagcactttgggaggccaaggtgggcggatcacgaggtcaggagatcgaaaccatcctggctaacatggtgaaaccccatctctactaaaaatacaaaaaaaaaattagctgagcatggtggcgggcgcctgtagtcccagctacttgggaggctgaggcaggagaatgacgtgaacctgggaggcggagcttgcagtgagccgagatctctccactgcactccagcctgggcgacagagcgagactccatctcaagaaaaaaaaaaaagaattttcattagtgctggccgtgtttcaaatggcaagggaacatgggaactatcatgtggcaatgtagtgagtgttaaactttgtgtttgtccaaatcctgatttatttttcagttcatatctttctgggcttgacatggctgatggtgtagctgaaaccctcctaacactaaaagccatttaatcttttctgtaataggagcagaaaatagttaatcatccacctagtaatataagattactgtgaatattatcttctatacattaaaacagttctagtttgtagaataataccatacaagttttatttttaaattctagttattttcagtgcttacttaaatgtaattctagaattcctccacaacttttaatattttgtatgccagtgattctcaagataaatcatgattgtagtagttgttactgttggcagtttgtagtagtattcaggtattttggggatgggggaaaacaccaaaaatcagtgtcttttatctggtgatcactgtggtatctacagtattctagtctcctgcacaaaaactgaacccactgggcctatgcatccctcacactttttttctagtataaaagcaatacataatgtgttgtagaacaattaaaaattcagaaagtgatacatgagaaaataaaaataaatccttaattctgtcatc

SEQ ID NO: 428879 - DNA, 6133 bp, Homo sapiens
agcgggtggagcggccggctgggtggcccgcgagctgcacccggatctgctccgcggggcgacgtgagcgcgcaggggggcggcggcctcgcctcgtctctctctctgcgcctgggtcgggtgggtgacgccgagagccagagagatgtcggatttcgacagtaacccgtttgccgacccggatctcaacaatcccttcaaggatccatcagttacacaagtgacaagaaatgttccaccaggacttgatgaatataatccattctcggattctagaacacctccaccaggcggtgtgaagatgcctaatgtacccaatacacaaccagcaataatgaaaccaacagaggaacatccagcttatacacagattgcaaaggaacatgcattggcccaagctgaacttcttaagcgccaggaagaactagaaagaaaagccgcagaattagatcgtcgggaacgagaaatgcaaaacctcagtcaacatggtagaaaaaataattggccacctcttcctagcaattttcctgtcggaccttgtttctatcaggatttttctgtagacattcctgtagaattccaaaagacagtaaagcttatgtactacttgtggatgttccatgcagtaacactgtttctaaatatcttcggatgcttggcttggttttgtgttgattctgcaagagcggttgattttggattgagtatcctgtggttcttgctttttactccttgttcatttgtctgttggtacagaccactttatggagctttcagtggttggatttcatcccttactggtctcaaccaaaatattcctgttggaatcatgatgataatcatagcagcacttttcacagcatcagcagtcatctcactagttatgttcaaaaaagtacatggactatatcgcacaacaggtgctagttttgagaaggcccaacaggagtttgcaacaggtgtgatgtccaacaaaactgtccagaccgcagctgcaaatgcagcttcaactgcagcatctagtgcagctcagaatgctttcaagggtaaccagatttaagaatcttcaaacaatacactgttaccttttgactgtacctttttctccagttactgtattctacaaatatttttatgttcaaaacacacagtacagacagcatggatatttcctgttcacttgtgcatgggctaaaaccaggaaaacttccttgtcttattactttacctaatagtttcttaatatttcagtgccccttgcagaaaaaatattacatgctaaataaatattctccatatttttgggggatgacattcagtgaattatttcagtggtgacccactgaaaattaataatggtacttatgattaaaaacgcatttaatactaactgcagtagttctttcaagaatctttagagataaggattgcacattggaaaagtaaaccatgtttcattcctttttccctatttatattgaaagaaataggccagcagagacttagggattttaaattggcttgctttttagctgtttcagtcaccagtgaagagcctatgtgcattttgtagtagataatgtaaaatttgtcatctttttcttttcttttttttagaatagctgatattttgataacaatctctaatttgcatgggcaccacatttcttatattaaaagaattagtgttttggcttctgtactgcttatggttgtaggattcaggggttaatggaatcacagaaatgatattctgcaagaatttcttttaaataaaaagtttgggggtgcaatataagaagtttatataatatgcagtacattatccaaaagagaaggtagttaatgcagtagaaagtagtggtaataattcctttttaaaaaaatttcggtagtcatatagtaacattttgctatatgaaaactttggtatattctgtggttacaactaagattgtgtctggcagctcttttttggggatgtgtgtgtgtgatttttaacagaggtattaaaggctagcctaactgttgtctaaaaagattgtacagtatttaagggattttccttttagcttttcatctccagtggcattaaacataaaaagaccctggcattttttcacatacttgaatccctaaatgcacctgtctttcactttttgagacagactgaatatatctaaaatttccagcaataaaaaaaaaagcatttaacttgcaccaagcaagaaaatataaatacagttaactgcattaagataatcacgttaaaattgttactatgcagcacagaacttcattcttatagtattcttgggttcaacctttgaatcaattttaccactgattaaataaatgactcaaagacatctgtaagtcatgctgctgtgttttgaaagtctttaactaaattaagattgcagaatgatagtgattattcaattagattttaagtaaggattgtgatattagaggctggaaatccttattttttaaaaaatcagataggcataaatagttaaatcactttcattctccccaaacctgtagttacagaaaaagttttatgctagaggtgggatgccaagttttcactatccatgaagcagcgctgcatgtcactaggtaacacagatccatccagatggtgtttacatttgatttatttgggatcttattgacatcaggtatacttggaagacatttcttttattcttcagcgtatgaatttaaagctattttttgtaaatatttctaatcagcgataatttctacctatgttctcaaccaacttagccagtttgtttttcagagcctgtagtcttattggaaatctattttatcagtgtgctttattgagtgtggattttgcatacattcaaaacattaaccacaaaatacagcaagtgcacctatattcaccattaacttatatcccaagtccattttttcctgtacactacaaacaaaagatatattagagacttttgaaaaatgctgaaatactttgcttcagaattggaatgtttatattatgtagaaatcttcaaaggtagcattattaaatagcaaagaataattagaacccacatatctttttttgtgtggatggggaaaatgttttaaaatccagttatttaatatgagtttgagagagaaaattgttttttaaaaatatatgtgcattgaaatgatggcaatgcttatagtatgatcaagtatgaaaggaactttaaattcttatatttacttttctctcagtaaattgttaaattttcactcagcaaaagattggcatttgttaagtgttctatatttagtactaaaatcacagtcatgaaatcatagtcataaaatggtcttcacacagcagtcatccgtgtcatttatcattttgtaatattaaattatggcaattttatttcaaactaaagtttgaacaccggaaagtcattactcagtgatttgtaatttgggacttggattatttatctagagatgtttgtatattttgtcagtaactaatactgcgctgccatcatggtgactgtcatggttctacagaaatgccctccatgtgtccctctaatgttgcatgtttcagtgggttggaagttttgtatatttattgtattaacacagagtgtcataaaataaaatgctgtttactggatgtttgtttgtataattttgaacactataatagcaattcagagacagacattgttaaaggtttgatgtatatagaaattccatgtttgattttttaaaatatgtgtataagtctgtcatgtgctaaacaaaataatatgaaagacctagttaaaaattctaaccaatgtaaaatgaccatttttctgttgcattagacctttacaggtaatggaacatgagcttcacccatattaaatattttggcccctttaaggtcaaaatacagatcatctagaagttagattcaaaatggaaaacctattcatggctcagatttttcattgtgggttaaaaatgggtgtctctgtactagtattgtatttattcaattgaacttgtattctgatttctaaccttgctacctattgctgttttatgtactgatgaaagtacctatttgtgtatattggatttttcacttggttagctaaagaagatgtaaaaatatctaaaataatgttcatggtgaatcttattttgagaaatacatgttaaaaaaggaacagtattctttattttctgggtgttatatttaaaaaagcaagtttggatttttacacctaatttactaggaaaatattttattctgtaattcatgttaagattatgtatggtttgcattttaaggggatttatgttaggttaattagttgtttctgtaaatcatttgtaatagcatagtgctttttactcattgctgtatctttttctgaaaacactgttgttaacatctaattcagtatccttattggtacaaatctgtgtttggcatgactgtttatatacagaatttgttacattttgagcattttttcccctgcttatgtataccttagagttaccatggctgtcatataccatttcactatatctcctttcagtttttccttaaggaaaatgtttagaggaatttgttcatttcatgtgattaagccctttagagatgaaataagattggttaattttaaaaaaattgaggatggttaaaaaatagaaaacaccttactttgatacattttaaagtacaatagtatacatttatttagagtagactaatgtgtttaaaacatgagttgttttaaatacttttttattgagctaaaaagttttatctcacatattaagtattacagaaagtgaagtattttggctagaattttagggcatattttataaagcagcatgcctgtaatattggtgggtatttttaaactttaggactttatcacagtatgtagagagctagaaataaatctagaaactttctaagccaggtattgccactaacctgtcttatataagcagatacctcttatttgaagattgtaggaaaatagagaaagactgttctccagttttctcacccccgctgtgggttttatatttacaatttaactttggggtttgggtaagacaaacatttaatgtataggattttggccaggtgtggtggctcacgcctgtaatcccagcactttgggaggccaaggtgggcggatcacgaggtcaggagatcgaaaccatcctggctaacatggtgaaaccccatctctactaaaaatacaaaaaaaaaattagctgagcatggtggcgggcgcctgtagtcccagctacttgggaggctgaggcaggagaatgacgtgaacctgggaggcggagcttgcagtgagccgagatctctccactgcactccagcctgggcgacagagcgagactccatctcaagaaaaaaaaaaaagaattttcattagtgctggccgtgtttcaaatggcaagggaacatgggaactatcatgtggcaatgtagtgagtgttaaactttgtgtttgtccaaatcctgatttatttttcagttcatatctttctgggcttgacatggctgatggtgtagctgaaaccctcctaacactaaaagccatttaatcttttctgtaataggagcagaaaatagttaatcatccacctagtaatataagattactgtgaatattatcttctatacattaaaacagttctagtttgtagaataataccatacaagttttatttttaaattctagttattttcagtgcttacttaaatgtaattctagaattcctccacaacttttaatattttgtatgccagtgattctcaagataaatcatgattgtagtagttgttactgttggcagtttgtagtagtattcaggtattttggggatgggggaaaacaccaaaaatcagtgtcttttatctggtgatcactgtggtatctacagtattctagtctcctgcacaaaaactgaacccactgggcctatgcatccctcacactttttttctagtataaaagcaatacataatgtgttgtagaacaattaaaaattcagaaagtgatacatgagaaaataaaaataaatccttaattctgtcatc

SEQ ID NO: 428880 - DNA, 6055 bp, Homo sapiens
agcgggtggagcggccggctgggtggcccgcgagctgcacccggatctgctccgcggggcgacgtgagcgcgcaggggggcggcggcctcgcctcgtctctctctctgcgcctgggtcgggtgggtgacgccgagagccagagagatgtcggatttcgacagtaacccgtttgccgacccggatctcaacaatcccttcaagcctccaccaggcggtgtgaagatgcctaatgtacccaatacacaaccagcaataatgaaaccaacagaggaacatccagcttatacacagattgcaaaggaacatgcattggcccaagctgaacttcttaagcgccaggaagaactagaaagaaaagccgcagaattagatcgtcgggaacgagaaatgcaaaacctcagtcaacatggtagaaaaaataattggccacctcttcctagcaattttcctgtcggaccttgtttctatcaggatttttctgtagacattcctgtagaattccaaaagacagtaaagcttatgtactacttgtggatgttccatgcagtaacactgtttctaaatatcttcggatgcttggcttggttttgtgttgattctgcaagagcggttgattttggattgagtatcctgtggttcttgctttttactccttgttcatttgtctgttggtacagaccactttatggagctttcagtggttggatttcatcccttactggtctcaaccaaaatattcctgttggaatcatgatgataatcatagcagcacttttcacagcatcagcagtcatctcactagttatgttcaaaaaagtacatggactatatcgcacaacaggtgctagttttgagaaggcccaacaggagtttgcaacaggtgtgatgtccaacaaaactgtccagaccgcagctgcaaatgcagcttcaactgcagcatctagtgcagctcagaatgctttcaagggtaaccagatttaagaatcttcaaacaatacactgttaccttttgactgtacctttttctccagttactgtattctacaaatatttttatgttcaaaacacacagtacagacagcatggatatttcctgttcacttgtgcatgggctaaaaccaggaaaacttccttgtcttattactttacctaatagtttcttaatatttcagtgccccttgcagaaaaaatattacatgctaaataaatattctccatatttttgggggatgacattcagtgaattatttcagtggtgacccactgaaaattaataatggtacttatgattaaaaacgcatttaatactaactgcagtagttctttcaagaatctttagagataaggattgcacattggaaaagtaaaccatgtttcattcctttttccctatttatattgaaagaaataggccagcagagacttagggattttaaattggcttgctttttagctgtttcagtcaccagtgaagagcctatgtgcattttgtagtagataatgtaaaatttgtcatctttttcttttcttttttttagaatagctgatattttgataacaatctctaatttgcatgggcaccacatttcttatattaaaagaattagtgttttggcttctgtactgcttatggttgtaggattcaggggttaatggaatcacagaaatgatattctgcaagaatttcttttaaataaaaagtttgggggtgcaatataagaagtttatataatatgcagtacattatccaaaagagaaggtagttaatgcagtagaaagtagtggtaataattcctttttaaaaaaatttcggtagtcatatagtaacattttgctatatgaaaactttggtatattctgtggttacaactaagattgtgtctggcagctcttttttggggatgtgtgtgtgtgatttttaacagaggtattaaaggctagcctaactgttgtctaaaaagattgtacagtatttaagggattttccttttagcttttcatctccagtggcattaaacataaaaagaccctggcattttttcacatacttgaatccctaaatgcacctgtctttcactttttgagacagactgaatatatctaaaatttccagcaataaaaaaaaaagcatttaacttgcaccaagcaagaaaatataaatacagttaactgcattaagataatcacgttaaaattgttactatgcagcacagaacttcattcttatagtattcttgggttcaacctttgaatcaattttaccactgattaaataaatgactcaaagacatctgtaagtcatgctgctgtgttttgaaagtctttaactaaattaagattgcagaatgatagtgattattcaattagattttaagtaaggattgtgatattagaggctggaaatccttattttttaaaaaatcagataggcataaatagttaaatcactttcattctccccaaacctgtagttacagaaaaagttttatgctagaggtgggatgccaagttttcactatccatgaagcagcgctgcatgtcactaggtaacacagatccatccagatggtgtttacatttgatttatttgggatcttattgacatcaggtatacttggaagacatttcttttattcttcagcgtatgaatttaaagctattttttgtaaatatttctaatcagcgataatttctacctatgttctcaaccaacttagccagtttgtttttcagagcctgtagtcttattggaaatctattttatcagtgtgctttattgagtgtggattttgcatacattcaaaacattaaccacaaaatacagcaagtgcacctatattcaccattaacttatatcccaagtccattttttcctgtacactacaaacaaaagatatattagagacttttgaaaaatgctgaaatactttgcttcagaattggaatgtttatattatgtagaaatcttcaaaggtagcattattaaatagcaaagaataattagaacccacatatctttttttgtgtggatggggaaaatgttttaaaatccagttatttaatatgagtttgagagagaaaattgttttttaaaaatatatgtgcattgaaatgatggcaatgcttatagtatgatcaagtatgaaaggaactttaaattcttatatttacttttctctcagtaaattgttaaattttcactcagcaaaagattggcatttgttaagtgttctatatttagtactaaaatcacagtcatgaaatcatagtcataaaatggtcttcacacagcagtcatccgtgtcatttatcattttgtaatattaaattatggcaattttatttcaaactaaagtttgaacaccggaaagtcattactcagtgatttgtaatttgggacttggattatttatctagagatgtttgtatattttgtcagtaactaatactgcgctgccatcatggtgactgtcatggttctacagaaatgccctccatgtgtccctctaatgttgcatgtttcagtgggttggaagttttgtatatttattgtattaacacagagtgtcataaaataaaatgctgtttactggatgtttgtttgtataattttgaacactataatagcaattcagagacagacattgttaaaggtttgatgtatatagaaattccatgtttgattttttaaaatatgtgtataagtctgtcatgtgctaaacaaaataatatgaaagacctagttaaaaattctaaccaatgtaaaatgaccatttttctgttgcattagacctttacaggtaatggaacatgagcttcacccatattaaatattttggcccctttaaggtcaaaatacagatcatctagaagttagattcaaaatggaaaacctattcatggctcagatttttcattgtgggttaaaaatgggtgtctctgtactagtattgtatttattcaattgaacttgtattctgatttctaaccttgctacctattgctgttttatgtactgatgaaagtacctatttgtgtatattggatttttcacttggttagctaaagaagatgtaaaaatatctaaaataatgttcatggtgaatcttattttgagaaatacatgttaaaaaaggaacagtattctttattttctgggtgttatatttaaaaaagcaagtttggatttttacacctaatttactaggaaaatattttattctgtaattcatgttaagattatgtatggtttgcattttaaggggatttatgttaggttaattagttgtttctgtaaatcatttgtaatagcatagtgctttttactcattgctgtatctttttctgaaaacactgttgttaacatctaattcagtatccttattggtacaaatctgtgtttggcatgactgtttatatacagaatttgttacattttgagcattttttcccctgcttatgtataccttagagttaccatggctgtcatataccatttcactatatctcctttcagtttttccttaaggaaaatgtttagaggaatttgttcatttcatgtgattaagccctttagagatgaaataagattggttaattttaaaaaaattgaggatggttaaaaaatagaaaacaccttactttgatacattttaaagtacaatagtatacatttatttagagtagactaatgtgtttaaaacatgagttgttttaaatacttttttattgagctaaaaagttttatctcacatattaagtattacagaaagtgaagtattttggctagaattttagggcatattttataaagcagcatgcctgtaatattggtgggtatttttaaactttaggactttatcacagtatgtagagagctagaaataaatctagaaactttctaagccaggtattgccactaacctgtcttatataagcagatacctcttatttgaagattgtaggaaaatagagaaagactgttctccagttttctcacccccgctgtgggttttatatttacaatttaactttggggtttgggtaagacaaacatttaatgtataggattttggccaggtgtggtggctcacgcctgtaatcccagcactttgggaggccaaggtgggcggatcacgaggtcaggagatcgaaaccatcctggctaacatggtgaaaccccatctctactaaaaatacaaaaaaaaaattagctgagcatggtggcgggcgcctgtagtcccagctacttgggaggctgaggcaggagaatgacgtgaacctgggaggcggagcttgcagtgagccgagatctctccactgcactccagcctgggcgacagagcgagactccatctcaagaaaaaaaaaaaagaattttcattagtgctggccgtgtttcaaatggcaagggaacatgggaactatcatgtggcaatgtagtgagtgttaaactttgtgtttgtccaaatcctgatttatttttcagttcatatctttctgggcttgacatggctgatggtgtagctgaaaccctcctaacactaaaagccatttaatcttttctgtaataggagcagaaaatagttaatcatccacctagtaatataagattactgtgaatattatcttctatacattaaaacagttctagtttgtagaataataccatacaagttttatttttaaattctagttattttcagtgcttacttaaatgtaattctagaattcctccacaacttttaatattttgtatgccagtgattctcaagataaatcatgattgtagtagttgttactgttggcagtttgtagtagtattcaggtattttggggatgggggaaaacaccaaaaatcagtgtcttttatctggtgatcactgtggtatctacagtattctagtctcctgcacaaaaactgaacccactgggcctatgcatccctcacactttttttctagtataaaagcaatacataatgtgttgtagaacaattaaaaattcagaaagtgatacatgagaaaataaaaataaatccttaattctgtcatc

SEQ ID NO: 428881 - DNA, 5519 bp, Homo sapiens
tgccgccttgcagtttgatctcagattgctgtgctagcaatcagcgagactccgtgggcgtaggaccctccgagccaggtgcaggatataatctcgtggtgcgccattttttaagccggtccgaaaggcgcaatattcgggtgggagtgacccgattttccagtggttggatttcatcccttactggtctcaaccaaaatattcctgttggaatcatgatgataatcatagcagcacttttcacagcatcagcagtcatctcactagttatgttcaaaaaagtacatggactatatcgcacaacaggtgctagttttgagaaggcccaacaggagtttgcaacaggtgtgatgtccaacaaaactgtccagaccgcagctgcaaatgcagcttcaactgcagcatctagtgcagctcagaatgctttcaagggtaaccagatttaagaatcttcaaacaatacactgttaccttttgactgtacctttttctccagttactgtattctacaaatatttttatgttcaaaacacacagtacagacagcatggatatttcctgttcacttgtgcatgggctaaaaccaggaaaacttccttgtcttattactttacctaatagtttcttaatatttcagtgccccttgcagaaaaaatattacatgctaaataaatattctccatatttttgggggatgacattcagtgaattatttcagtggtgacccactgaaaattaataatggtacttatgattaaaaacgcatttaatactaactgcagtagttctttcaagaatctttagagataaggattgcacattggaaaagtaaaccatgtttcattcctttttccctatttatattgaaagaaataggccagcagagacttagggattttaaattggcttgctttttagctgtttcagtcaccagtgaagagcctatgtgcattttgtagtagataatgtaaaatttgtcatctttttcttttcttttttttagaatagctgatattttgataacaatctctaatttgcatgggcaccacatttcttatattaaaagaattagtgttttggcttctgtactgcttatggttgtaggattcaggggttaatggaatcacagaaatgatattctgcaagaatttcttttaaataaaaagtttgggggtgcaatataagaagtttatataatatgcagtacattatccaaaagagaaggtagttaatgcagtagaaagtagtggtaataattcctttttaaaaaaatttcggtagtcatatagtaacattttgctatatgaaaactttggtatattctgtggttacaactaagattgtgtctggcagctcttttttggggatgtgtgtgtgtgatttttaacagaggtattaaaggctagcctaactgttgtctaaaaagattgtacagtatttaagggattttccttttagcttttcatctccagtggcattaaacataaaaagaccctggcattttttcacatacttgaatccctaaatgcacctgtctttcactttttgagacagactgaatatatctaaaatttccagcaataaaaaaaaaagcatttaacttgcaccaagcaagaaaatataaatacagttaactgcattaagataatcacgttaaaattgttactatgcagcacagaacttcattcttatagtattcttgggttcaacctttgaatcaattttaccactgattaaataaatgactcaaagacatctgtaagtcatgctgctgtgttttgaaagtctttaactaaattaagattgcagaatgatagtgattattcaattagattttaagtaaggattgtgatattagaggctggaaatccttattttttaaaaaatcagataggcataaatagttaaatcactttcattctccccaaacctgtagttacagaaaaagttttatgctagaggtgggatgccaagttttcactatccatgaagcagcgctgcatgtcactaggtaacacagatccatccagatggtgtttacatttgatttatttgggatcttattgacatcaggtatacttggaagacatttcttttattcttcagcgtatgaatttaaagctattttttgtaaatatttctaatcagcgataatttctacctatgttctcaaccaacttagccagtttgtttttcagagcctgtagtcttattggaaatctattttatcagtgtgctttattgagtgtggattttgcatacattcaaaacattaaccacaaaatacagcaagtgcacctatattcaccattaacttatatcccaagtccattttttcctgtacactacaaacaaaagatatattagagacttttgaaaaatgctgaaatactttgcttcagaattggaatgtttatattatgtagaaatcttcaaaggtagcattattaaatagcaaagaataattagaacccacatatctttttttgtgtggatggggaaaatgttttaaaatccagttatttaatatgagtttgagagagaaaattgttttttaaaaatatatgtgcattgaaatgatggcaatgcttatagtatgatcaagtatgaaaggaactttaaattcttatatttacttttctctcagtaaattgttaaattttcactcagcaaaagattggcatttgttaagtgttctatatttagtactaaaatcacagtcatgaaatcatagtcataaaatggtcttcacacagcagtcatccgtgtcatttatcattttgtaatattaaattatggcaattttatttcaaactaaagtttgaacaccggaaagtcattactcagtgatttgtaatttgggacttggattatttatctagagatgtttgtatattttgtcagtaactaatactgcgctgccatcatggtgactgtcatggttctacagaaatgccctccatgtgtccctctaatgttgcatgtttcagtgggttggaagttttgtatatttattgtattaacacagagtgtcataaaataaaatgctgtttactggatgtttgtttgtataattttgaacactataatagcaattcagagacagacattgttaaaggtttgatgtatatagaaattccatgtttgattttttaaaatatgtgtataagtctgtcatgtgctaaacaaaataatatgaaagacctagttaaaaattctaaccaatgtaaaatgaccatttttctgttgcattagacctttacaggtaatggaacatgagcttcacccatattaaatattttggcccctttaaggtcaaaatacagatcatctagaagttagattcaaaatggaaaacctattcatggctcagatttttcattgtgggttaaaaatgggtgtctctgtactagtattgtatttattcaattgaacttgtattctgatttctaaccttgctacctattgctgttttatgtactgatgaaagtacctatttgtgtatattggatttttcacttggttagctaaagaagatgtaaaaatatctaaaataatgttcatggtgaatcttattttgagaaatacatgttaaaaaaggaacagtattctttattttctgggtgttatatttaaaaaagcaagtttggatttttacacctaatttactaggaaaatattttattctgtaattcatgttaagattatgtatggtttgcattttaaggggatttatgttaggttaattagttgtttctgtaaatcatttgtaatagcatagtgctttttactcattgctgtatctttttctgaaaacactgttgttaacatctaattcagtatccttattggtacaaatctgtgtttggcatgactgtttatatacagaatttgttacattttgagcattttttcccctgcttatgtataccttagagttaccatggctgtcatataccatttcactatatctcctttcagtttttccttaaggaaaatgtttagaggaatttgttcatttcatgtgattaagccctttagagatgaaataagattggttaattttaaaaaaattgaggatggttaaaaaatagaaaacaccttactttgatacattttaaagtacaatagtatacatttatttagagtagactaatgtgtttaaaacatgagttgttttaaatacttttttattgagctaaaaagttttatctcacatattaagtattacagaaagtgaagtattttggctagaattttagggcatattttataaagcagcatgcctgtaatattggtgggtatttttaaactttaggactttatcacagtatgtagagagctagaaataaatctagaaactttctaagccaggtattgccactaacctgtcttatataagcagatacctcttatttgaagattgtaggaaaatagagaaagactgttctccagttttctcacccccgctgtgggttttatatttacaatttaactttggggtttgggtaagacaaacatttaatgtataggattttggccaggtgtggtggctcacgcctgtaatcccagcactttgggaggccaaggtgggcggatcacgaggtcaggagatcgaaaccatcctggctaacatggtgaaaccccatctctactaaaaatacaaaaaaaaaattagctgagcatggtggcgggcgcctgtagtcccagctacttgggaggctgaggcaggagaatgacgtgaacctgggaggcggagcttgcagtgagccgagatctctccactgcactccagcctgggcgacagagcgagactccatctcaagaaaaaaaaaaaagaattttcattagtgctggccgtgtttcaaatggcaagggaacatgggaactatcatgtggcaatgtagtgagtgttaaactttgtgtttgtccaaatcctgatttatttttcagttcatatctttctgggcttgacatggctgatggtgtagctgaaaccctcctaacactaaaagccatttaatcttttctgtaataggagcagaaaatagttaatcatccacctagtaatataagattactgtgaatattatcttctatacattaaaacagttctagtttgtagaataataccatacaagttttatttttaaattctagttattttcagtgcttacttaaatgtaattctagaattcctccacaacttttaatattttgtatgccagtgattctcaagataaatcatgattgtagtagttgttactgttggcagtttgtagtagtattcaggtattttggggatgggggaaaacaccaaaaatcagtgtcttttatctggtgatcactgtggtatctacagtattctagtctcctgcacaaaaactgaacccactgggcctatgcatccctcacactttttttctagtataaaagcaatacataatgtgttgtagaacaattaaaaattcagaaagtgatacatgagaaaataaaaataaatccttaattctgtcatc

SEQ ID NO: 428882 - DNA, 6075 bp, Homo sapiens
agcgggtggagcggccggctgggtggcccgcgagctgcacccggatctgctccgcggggcgacgtgagcgcgcaggggggcggcggcctcgcctcgtctctctctctgcgcctgggtcgggtgggtgacgccgagagccagagagatgtcggatttcgacagtaacccgtttgccgacccggatctcaacaatcccttcaaggatccatcagttacacaagtgacaagaaatgttccaccaggacttgatgaatataatccattctcggattctagaacacctccaccaggcggtgtgaagatgcctaatgtacccaatacacaaccagcaataatgaaaccaacagaggaacatccagcttatacacagattgcaaaggaacatgcattggcccaagctgaacttcttaagcgccaggaagaactagaaagaaaagccgcagaattagatcgtcgggaacgagaaatgcaaaacctcagtcaacatggtagaaaaaataattggccacctcttcctagcaattttcctgtcggaccttgtttctatcaggatttttctgtagacattcctgtagaattccaaaagacagtaaagcttatgtactacttgtggatgtgagtgacagttcatttagattctttgtattcttcttcgtctatatttgtcagtttgctgtacatgtactccaagctgcaggatttcataactggggcaattgtggttggatttcatcccttactggtctcaaccaaaatattcctgttggaatcatgatgataatcatagcagcacttttcacagcatcagcagtcatctcactagttatgttcaaaaaagtacatggactatatcgcacaacaggtgctagttttgagaaggcccaacaggagtttgcaacaggtgtgatgtccaacaaaactgtccagaccgcagctgcaaatgcagcttcaactgcagcatctagtgcagctcagaatgctttcaagggtaaccagatttaagaatcttcaaacaatacactgttaccttttgactgtacctttttctccagttactgtattctacaaatatttttatgttcaaaacacacagtacagacagcatggatatttcctgttcacttgtgcatgggctaaaaccaggaaaacttccttgtcttattactttacctaatagtttcttaatatttcagtgccccttgcagaaaaaatattacatgctaaataaatattctccatatttttgggggatgacattcagtgaattatttcagtggtgacccactgaaaattaataatggtacttatgattaaaaacgcatttaatactaactgcagtagttctttcaagaatctttagagataaggattgcacattggaaaagtaaaccatgtttcattcctttttccctatttatattgaaagaaataggccagcagagacttagggattttaaattggcttgctttttagctgtttcagtcaccagtgaagagcctatgtgcattttgtagtagataatgtaaaatttgtcatctttttcttttcttttttttagaatagctgatattttgataacaatctctaatttgcatgggcaccacatttcttatattaaaagaattagtgttttggcttctgtactgcttatggttgtaggattcaggggttaatggaatcacagaaatgatattctgcaagaatttcttttaaataaaaagtttgggggtgcaatataagaagtttatataatatgcagtacattatccaaaagagaaggtagttaatgcagtagaaagtagtggtaataattcctttttaaaaaaatttcggtagtcatatagtaacattttgctatatgaaaactttggtatattctgtggttacaactaagattgtgtctggcagctcttttttggggatgtgtgtgtgtgatttttaacagaggtattaaaggctagcctaactgttgtctaaaaagattgtacagtatttaagggattttccttttagcttttcatctccagtggcattaaacataaaaagaccctggcattttttcacatacttgaatccctaaatgcacctgtctttcactttttgagacagactgaatatatctaaaatttccagcaataaaaaaaaaagcatttaacttgcaccaagcaagaaaatataaatacagttaactgcattaagataatcacgttaaaattgttactatgcagcacagaacttcattcttatagtattcttgggttcaacctttgaatcaattttaccactgattaaataaatgactcaaagacatctgtaagtcatgctgctgtgttttgaaagtctttaactaaattaagattgcagaatgatagtgattattcaattagattttaagtaaggattgtgatattagaggctggaaatccttattttttaaaaaatcagataggcataaatagttaaatcactttcattctccccaaacctgtagttacagaaaaagttttatgctagaggtgggatgccaagttttcactatccatgaagcagcgctgcatgtcactaggtaacacagatccatccagatggtgtttacatttgatttatttgggatcttattgacatcaggtatacttggaagacatttcttttattcttcagcgtatgaatttaaagctattttttgtaaatatttctaatcagcgataatttctacctatgttctcaaccaacttagccagtttgtttttcagagcctgtagtcttattggaaatctattttatcagtgtgctttattgagtgtggattttgcatacattcaaaacattaaccacaaaatacagcaagtgcacctatattcaccattaacttatatcccaagtccattttttcctgtacactacaaacaaaagatatattagagacttttgaaaaatgctgaaatactttgcttcagaattggaatgtttatattatgtagaaatcttcaaaggtagcattattaaatagcaaagaataattagaacccacatatctttttttgtgtggatggggaaaatgttttaaaatccagttatttaatatgagtttgagagagaaaattgttttttaaaaatatatgtgcattgaaatgatggcaatgcttatagtatgatcaagtatgaaaggaactttaaattcttatatttacttttctctcagtaaattgttaaattttcactcagcaaaagattggcatttgttaagtgttctatatttagtactaaaatcacagtcatgaaatcatagtcataaaatggtcttcacacagcagtcatccgtgtcatttatcattttgtaatattaaattatggcaattttatttcaaactaaagtttgaacaccggaaagtcattactcagtgatttgtaatttgggacttggattatttatctagagatgtttgtatattttgtcagtaactaatactgcgctgccatcatggtgactgtcatggttctacagaaatgccctccatgtgtccctctaatgttgcatgtttcagtgggttggaagttttgtatatttattgtattaacacagagtgtcataaaataaaatgctgtttactggatgtttgtttgtataattttgaacactataatagcaattcagagacagacattgttaaaggtttgatgtatatagaaattccatgtttgattttttaaaatatgtgtataagtctgtcatgtgctaaacaaaataatatgaaagacctagttaaaaattctaaccaatgtaaaatgaccatttttctgttgcattagacctttacaggtaatggaacatgagcttcacccatattaaatattttggcccctttaaggtcaaaatacagatcatctagaagttagattcaaaatggaaaacctattcatggctcagatttttcattgtgggttaaaaatgggtgtctctgtactagtattgtatttattcaattgaacttgtattctgatttctaaccttgctacctattgctgttttatgtactgatgaaagtacctatttgtgtatattggatttttcacttggttagctaaagaagatgtaaaaatatctaaaataatgttcatggtgaatcttattttgagaaatacatgttaaaaaaggaacagtattctttattttctgggtgttatatttaaaaaagcaagtttggatttttacacctaatttactaggaaaatattttattctgtaattcatgttaagattatgtatggtttgcattttaaggggatttatgttaggttaattagttgtttctgtaaatcatttgtaatagcatagtgctttttactcattgctgtatctttttctgaaaacactgttgttaacatctaattcagtatccttattggtacaaatctgtgtttggcatgactgtttatatacagaatttgttacattttgagcattttttcccctgcttatgtataccttagagttaccatggctgtcatataccatttcactatatctcctttcagtttttccttaaggaaaatgtttagaggaatttgttcatttcatgtgattaagccctttagagatgaaataagattggttaattttaaaaaaattgaggatggttaaaaaatagaaaacaccttactttgatacattttaaagtacaatagtatacatttatttagagtagactaatgtgtttaaaacatgagttgttttaaatacttttttattgagctaaaaagttttatctcacatattaagtattacagaaagtgaagtattttggctagaattttagggcatattttataaagcagcatgcctgtaatattggtgggtatttttaaactttaggactttatcacagtatgtagagagctagaaataaatctagaaactttctaagccaggtattgccactaacctgtcttatataagcagatacctcttatttgaagattgtaggaaaatagagaaagactgttctccagttttctcacccccgctgtgggttttatatttacaatttaactttggggtttgggtaagacaaacatttaatgtataggattttggccaggtgtggtggctcacgcctgtaatcccagcactttgggaggccaaggtgggcggatcacgaggtcaggagatcgaaaccatcctggctaacatggtgaaaccccatctctactaaaaatacaaaaaaaaaattagctgagcatggtggcgggcgcctgtagtcccagctacttgggaggctgaggcaggagaatgacgtgaacctgggaggcggagcttgcagtgagccgagatctctccactgcactccagcctgggcgacagagcgagactccatctcaagaaaaaaaaaaaagaattttcattagtgctggccgtgtttcaaatggcaagggaacatgggaactatcatgtggcaatgtagtgagtgttaaactttgtgtttgtccaaatcctgatttatttttcagttcatatctttctgggcttgacatggctgatggtgtagctgaaaccctcctaacactaaaagccatttaatcttttctgtaataggagcagaaaatagttaatcatccacctagtaatataagattactgtgaatattatcttctatacattaaaacagttctagtttgtagaataataccatacaagttttatttttaaattctagttattttcagtgcttacttaaatgtaattctagaattcctccacaacttttaatattttgtatgccagtgattctcaagataaatcatgattgtagtagttgttactgttggcagtttgtagtagtattcaggtattttggggatgggggaaaacaccaaaaatcagtgtcttttatctggtgatcactgtggtatctacagtattctagtctcctgcacaaaaactgaacccactgggcctatgcatccctcacactttttttctagtataaaagcaatacataatgtgttgtagaacaattaaaaattcagaaagtgatacatgagaaaataaaaataaatccttaattctgtcatc

SEQ ID NO: 428883 - DNA, 5973 bp, Homo sapiens
agcgggtggagcggccggctgggtggcccgcgagctgcacccggatctgctccgcggggcgacgtgagcgcgcaggggggcggcggcctcgcctcgtctctctctctgcgcctgggtcgggtgggtgacgccgagagccagagagatgtcggatttcgacagtaacccgtttgccgacccggatctcaacaatcccttcaaggatccatcagttacacaagtgacaagaaatgttccaccaggacttgatgaatataatccattctcggattctagaacacctccaccaggcggtgtgaagatgcctaatgtacccaatacacaaccagcaataatgaaaccaacagaggaacatccagcttatacacagattgcaaaggaacatgcattggcccaagctgaacttcttaagcgccaggaagaactagaaagaaaagccgcagaattagatcgtcgggaacgagaaatgcaaaacctcagtcaacatggtagaaaaaataattggccacctcttcctagcaattttcctgtcggaccttgtttctatcaggatttttctgtagacattcctgtagaattccaaaagacagtaaagcttatgtactacttgtggatgttggttggatttcatcccttactggtctcaaccaaaatattcctgttggaatcatgatgataatcatagcagcacttttcacagcatcagcagtcatctcactagttatgttcaaaaaagtacatggactatatcgcacaacaggtgctagttttgagaaggcccaacaggagtttgcaacaggtgtgatgtccaacaaaactgtccagaccgcagctgcaaatgcagcttcaactgcagcatctagtgcagctcagaatgctttcaagggtaaccagatttaagaatcttcaaacaatacactgttaccttttgactgtacctttttctccagttactgtattctacaaatatttttatgttcaaaacacacagtacagacagcatggatatttcctgttcacttgtgcatgggctaaaaccaggaaaacttccttgtcttattactttacctaatagtttcttaatatttcagtgccccttgcagaaaaaatattacatgctaaataaatattctccatatttttgggggatgacattcagtgaattatttcagtggtgacccactgaaaattaataatggtacttatgattaaaaacgcatttaatactaactgcagtagttctttcaagaatctttagagataaggattgcacattggaaaagtaaaccatgtttcattcctttttccctatttatattgaaagaaataggccagcagagacttagggattttaaattggcttgctttttagctgtttcagtcaccagtgaagagcctatgtgcattttgtagtagataatgtaaaatttgtcatctttttcttttcttttttttagaatagctgatattttgataacaatctctaatttgcatgggcaccacatttcttatattaaaagaattagtgttttggcttctgtactgcttatggttgtaggattcaggggttaatggaatcacagaaatgatattctgcaagaatttcttttaaataaaaagtttgggggtgcaatataagaagtttatataatatgcagtacattatccaaaagagaaggtagttaatgcagtagaaagtagtggtaataattcctttttaaaaaaatttcggtagtcatatagtaacattttgctatatgaaaactttggtatattctgtggttacaactaagattgtgtctggcagctcttttttggggatgtgtgtgtgtgatttttaacagaggtattaaaggctagcctaactgttgtctaaaaagattgtacagtatttaagggattttccttttagcttttcatctccagtggcattaaacataaaaagaccctggcattttttcacatacttgaatccctaaatgcacctgtctttcactttttgagacagactgaatatatctaaaatttccagcaataaaaaaaaaagcatttaacttgcaccaagcaagaaaatataaatacagttaactgcattaagataatcacgttaaaattgttactatgcagcacagaacttcattcttatagtattcttgggttcaacctttgaatcaattttaccactgattaaataaatgactcaaagacatctgtaagtcatgctgctgtgttttgaaagtctttaactaaattaagattgcagaatgatagtgattattcaattagattttaagtaaggattgtgatattagaggctggaaatccttattttttaaaaaatcagataggcataaatagttaaatcactttcattctccccaaacctgtagttacagaaaaagttttatgctagaggtgggatgccaagttttcactatccatgaagcagcgctgcatgtcactaggtaacacagatccatccagatggtgtttacatttgatttatttgggatcttattgacatcaggtatacttggaagacatttcttttattcttcagcgtatgaatttaaagctattttttgtaaatatttctaatcagcgataatttctacctatgttctcaaccaacttagccagtttgtttttcagagcctgtagtcttattggaaatctattttatcagtgtgctttattgagtgtggattttgcatacattcaaaacattaaccacaaaatacagcaagtgcacctatattcaccattaacttatatcccaagtccattttttcctgtacactacaaacaaaagatatattagagacttttgaaaaatgctgaaatactttgcttcagaattggaatgtttatattatgtagaaatcttcaaaggtagcattattaaatagcaaagaataattagaacccacatatctttttttgtgtggatggggaaaatgttttaaaatccagttatttaatatgagtttgagagagaaaattgttttttaaaaatatatgtgcattgaaatgatggcaatgcttatagtatgatcaagtatgaaaggaactttaaattcttatatttacttttctctcagtaaattgttaaattttcactcagcaaaagattggcatttgttaagtgttctatatttagtactaaaatcacagtcatgaaatcatagtcataaaatggtcttcacacagcagtcatccgtgtcatttatcattttgtaatattaaattatggcaattttatttcaaactaaagtttgaacaccggaaagtcattactcagtgatttgtaatttgggacttggattatttatctagagatgtttgtatattttgtcagtaactaatactgcgctgccatcatggtgactgtcatggttctacagaaatgccctccatgtgtccctctaatgttgcatgtttcagtgggttggaagttttgtatatttattgtattaacacagagtgtcataaaataaaatgctgtttactggatgtttgtttgtataattttgaacactataatagcaattcagagacagacattgttaaaggtttgatgtatatagaaattccatgtttgattttttaaaatatgtgtataagtctgtcatgtgctaaacaaaataatatgaaagacctagttaaaaattctaaccaatgtaaaatgaccatttttctgttgcattagacctttacaggtaatggaacatgagcttcacccatattaaatattttggcccctttaaggtcaaaatacagatcatctagaagttagattcaaaatggaaaacctattcatggctcagatttttcattgtgggttaaaaatgggtgtctctgtactagtattgtatttattcaattgaacttgtattctgatttctaaccttgctacctattgctgttttatgtactgatgaaagtacctatttgtgtatattggatttttcacttggttagctaaagaagatgtaaaaatatctaaaataatgttcatggtgaatcttattttgagaaatacatgttaaaaaaggaacagtattctttattttctgggtgttatatttaaaaaagcaagtttggatttttacacctaatttactaggaaaatattttattctgtaattcatgttaagattatgtatggtttgcattttaaggggatttatgttaggttaattagttgtttctgtaaatcatttgtaatagcatagtgctttttactcattgctgtatctttttctgaaaacactgttgttaacatctaattcagtatccttattggtacaaatctgtgtttggcatgactgtttatatacagaatttgttacattttgagcattttttcccctgcttatgtataccttagagttaccatggctgtcatataccatttcactatatctcctttcagtttttccttaaggaaaatgtttagaggaatttgttcatttcatgtgattaagccctttagagatgaaataagattggttaattttaaaaaaattgaggatggttaaaaaatagaaaacaccttactttgatacattttaaagtacaatagtatacatttatttagagtagactaatgtgtttaaaacatgagttgttttaaatacttttttattgagctaaaaagttttatctcacatattaagtattacagaaagtgaagtattttggctagaattttagggcatattttataaagcagcatgcctgtaatattggtgggtatttttaaactttaggactttatcacagtatgtagagagctagaaataaatctagaaactttctaagccaggtattgccactaacctgtcttatataagcagatacctcttatttgaagattgtaggaaaatagagaaagactgttctccagttttctcacccccgctgtgggttttatatttacaatttaactttggggtttgggtaagacaaacatttaatgtataggattttggccaggtgtggtggctcacgcctgtaatcccagcactttgggaggccaaggtgggcggatcacgaggtcaggagatcgaaaccatcctggctaacatggtgaaaccccatctctactaaaaatacaaaaaaaaaattagctgagcatggtggcgggcgcctgtagtcccagctacttgggaggctgaggcaggagaatgacgtgaacctgggaggcggagcttgcagtgagccgagatctctccactgcactccagcctgggcgacagagcgagactccatctcaagaaaaaaaaaaaagaattttcattagtgctggccgtgtttcaaatggcaagggaacatgggaactatcatgtggcaatgtagtgagtgttaaactttgtgtttgtccaaatcctgatttatttttcagttcatatctttctgggcttgacatggctgatggtgtagctgaaaccctcctaacactaaaagccatttaatcttttctgtaataggagcagaaaatagttaatcatccacctagtaatataagattactgtgaatattatcttctatacattaaaacagttctagtttgtagaataataccatacaagttttatttttaaattctagttattttcagtgcttacttaaatgtaattctagaattcctccacaacttttaatattttgtatgccagtgattctcaagataaatcatgattgtagtagttgttactgttggcagtttgtagtagtattcaggtattttggggatgggggaaaacaccaaaaatcagtgtcttttatctggtgatcactgtggtatctacagtattctagtctcctgcacaaaaactgaacccactgggcctatgcatccctcacactttttttctagtataaaagcaatacataatgtgttgtagaacaattaaaaattcagaaagtgatacatgagaaaataaaaataaatccttaattctgtcatc

SEQ ID NO: 428884 - DNA, 3999 bp, Homo sapiens
tcaatttctacaccacagagaaatgcaaatcgaaaccacagtgagatatcatctcacaccagttagaatggcaatcattaaaaagtcaggaaacaacaggtgctggagaagatgtggagaaataggaacacttttacactgttggtgggactgtaaactagttcaaccattgtggaagtcagtgtagaaattgaacttcaatttctacactgattaaataaatgactcaaagacatctgtaagtcatgctgctgtgttttgaaagtctttaactaaattaagattgcagaatgatagtgattattcaattagattttaagtaaggattgtgatattagaggctggaaatccttattttttaaaaaatcagataggcataaatagttaaatcactttcattctccccaaacctgtagttacagaaaaagttttatgctagaggtgggatgccaagttttcactatccatgaagcagcgctgcatgtcactaggtaacacagatccatccagatggtgtttacatttgatttatttgggatcttattgacatcaggtatacttggaagacatttcttttattcttcagcgtatgaatttaaagctattttttgtaaatatttctaatcagcgataatttctacctatgttctcaaccaacttagccagtttgtttttcagagcctgtagtcttattggaaatctattttatcagtgtgctttattgagtgtggattttgcatacattcaaaacattaaccacaaaatacagcaagtgcacctatattcaccattaacttatatcccaagtccattttttcctgtacactacaaacaaaagatatattagagacttttgaaaaatgctgaaatactttgcttcagaattggaatgtttatattatgtagaaatcttcaaaggtagcattattaaatagcaaagaataattagaacccacatatctttttttgtgtggatggggaaaatgttttaaaatccagttatttaatatgagtttgagagagaaaattgttttttaaaaatatatgtgcattgaaatgatggcaatgcttatagtatgatcaagtatgaaaggaactttaaattcttatatttacttttctctcagtaaattgttaaattttcactcagcaaaagattggcatttgttaagtgttctatatttagtactaaaatcacagtcatgaaatcatagtcataaaatggtcttcacacagcagtcatccgtgtcatttatcattttgtaatattaaattatggcaattttatttcaaactaaagtttgaacaccggaaagtcattactcagtgatttgtaatttgggacttggattatttatctagagatgtttgtatattttgtcagtaactaatactgcgctgccatcatggtgactgtcatggttctacagaaatgccctccatgtgtccctctaatgttgcatgtttcagtgggttggaagttttgtatatttattgtattaacacagagtgtcataaaataaaatgctgtttactggatgtttgtttgtataattttgaacactataatagcaattcagagacagacattgttaaaggtttgatgtatatagaaattccatgtttgattttttaaaatatgtgtataagtctgtcatgtgctaaacaaaataatatgaaagacctagttaaaaattctaaccaatgtaaaatgaccatttttctgttgcattagacctttacaggtaatggaacatgagcttcacccatattaaatattttggcccctttaaggtcaaaatacagatcatctagaagttagattcaaaatggaaaacctattcatggctcagatttttcattgtgggttaaaaatgggtgtctctgtactagtattgtatttattcaattgaacttgtattctgatttctaaccttgctacctattgctgttttatgtactgatgaaagtacctatttgtgtatattggatttttcacttggttagctaaagaagatgtaaaaatatctaaaataatgttcatggtgaatcttattttgagaaatacatgttaaaaaaggaacagtattctttattttctgggtgttatatttaaaaaagcaagtttggatttttacacctaatttactaggaaaatattttattctgtaattcatgttaagattatgtatggtttgcattttaaggggatttatgttaggttaattagttgtttctgtaaatcatttgtaatagcatagtgctttttactcattgctgtatctttttctgaaaacactgttgttaacatctaattcagtatccttattggtacaaatctgtgtttggcatgactgtttatatacagaatttgttacattttgagcattttttcccctgcttatgtataccttagagttaccatggctgtcatataccatttcactatatctcctttcagtttttccttaaggaaaatgtttagaggaatttgttcatttcatgtgattaagccctttagagatgaaataagattggttaattttaaaaaaattgaggatggttaaaaaatagaaaacaccttactttgatacattttaaagtacaatagtatacatttatttagagtagactaatgtgtttaaaacatgagttgttttaaatacttttttattgagctaaaaagttttatctcacatattaagtattacagaaagtgaagtattttggctagaattttagggcatattttataaagcagcatgcctgtaatattggtgggtatttttaaactttaggactttatcacagtatgtagagagctagaaataaatctagaaactttctaagccaggtattgccactaacctgtcttatataagcagatacctcttatttgaagattgtaggaaaatagagaaagactgttctccagttttctcacccccgctgtgggttttatatttacaatttaactttggggtttgggtaagacaaacatttaatgtataggattttggccaggtgtggtggctcacgcctgtaatcccagcactttgggaggccaaggtgggcggatcacgaggtcaggagatcgaaaccatcctggctaacatggtgaaaccccatctctactaaaaatacaaaaaaaaaattagctgagcatggtggcgggcgcctgtagtcccagctacttgggaggctgaggcaggagaatgacgtgaacctgggaggcggagcttgcagtgagccgagatctctccactgcactccagcctgggcgacagagcgagactccatctcaagaaaaaaaaaaaagaattttcattagtgctggccgtgtttcaaatggcaagggaacatgggaactatcatgtggcaatgtagtgagtgttaaactttgtgtttgtccaaatcctgatttatttttcagttcatatctttctgggcttgacatggctgatggtgtagctgaaaccctcctaacactaaaagccatttaatcttttctgtaataggagcagaaaatagttaatcatccacctagtaatataagattactgtgaatattatcttctatacattaaaacagttctagtttgtagaataataccatacaagttttatttttaaattctagttattttcagtgcttacttaaatgtaattctagaattcctccacaacttttaatattttgtatgccagtgattctcaagataaatcatgattgtagtagttgttactgttggcagtttgtagtagtattcaggtattttggggatgggggaaaacaccaaaaatcagtgtcttttatctggtgatcactgtggtatctacagtattctagtctcctgcacaaaaactgaacccactgggcctatgcatccctcacactttttttctagtataaaagcaatacataatgtgttgtagaacaattaaaaattcagaaagtgatacatgagaaaataaaaataaatccttaattctgtcatc

SEQ ID NO: 428885 - DNA, 1388 bp, Homo sapiens
agcgggtggagcggccggctgggtggcccgcgagctgcacccggatctgctccgcggggcgacgtgagcgcgcaggggggcggcggcctcgcctcgtctctctctctgcgcctgggtcgggtgggtgacgccgagagccagagagatgtcggatttcgacagtaacccgtttgccgacccggatctcaacaatcccttcaaggatccatcagttacacaagtgacaagaaatgttccaccaggacttgatgaatataatccattctcggattctagaacacctccaccaggcggtgtgaagatgcctaatgtacccaatacacaaccagcaataatgaaaccaacagaggaacatccagcttatacacagattgcaaaggaacatgcattggcccaagctgaacttcttaagcgccaggaagaactagaaagaaaagccgcagaattagatcgtcgggaacgagaaatgcaaaacctcagtcaacatggtagaaaaaataattggccacctcttcctagcaattttcctgtcggaccttgtttctatcaggatttttctgtagacattcctgtagaattccaaaagacagtaaagcttatgtactacttgtggatgttccatgcagtaacactgtttctaaatatcttcggatgcttggcttggttttgtgttgattctgcaagagcggttgattttggattgagtatcctgtggttcttgctttttactccttgttcatttgtctgttggtacagaccactttatggagctttcagtggttggatttcatcccttactggtctcaaccaaaatattcctgttggaatcatgatgataatcatagcagcacttttcacagcatcagcagtcatctcactagttatgttcaaaaaagtacatggactatatcgcacaacaggtgctagttttgagaaggcccaacaggagtttgcaacaggtgtgatgtccaacaaaactgtccagaccgcagctgcaaatgcagcttcaactgcagcatctagtgcagctcagaatgctttcaagggtaaccagatttaagaatcttcaaacaatacactgttaccttttgactgtacctttttctccagttactgtattctacaaatatttttatgttcaaaacacacagtacagacagcatggatatttcctgttcacttgtgcatgggctaaaaccaggaaaacttccttgtcttattactttacctaatagtttcttaatatttcagtgccccttgcagaaaaaatattacatgctaaataaatattctccatatttttgggggatgacattcagtgaattatttcagtggtgacccactgaaaattaataatggtacttatgattaaaaacgcatttaatact

SEQ ID NO: 428886 - DNA, 3775 bp, Homo sapiens
agcgggtggagcggccggctgggtggcccgcgagctgcacccggatctgctccgcggggcgacgtgagcgcgcaggggggcggcggcctcgcctcgtctctctctctgcgcctgggtcgggtgggtgacgccgagagccagagagatgtcggatttcgacagtaacccgtttgccgacccggatctcaacaatcccttcaaggatccatcagttacacaagtgacaagaaatgttccaccaggacttgatgaatataatccattctcggattctagaacacctccaccaggcggtgtgaagatgcctaatgtacccaatacacaaccagcaataatgaaaccaacagaggaacatccagcttatacacagattgcaaaggaacatgcattggcccaagctgaacttcttaagcgccaggaagaactagaaagaaaagccgcagaattagatcgtcgggaacgagaaatgcaaaacctcagtcaacatggtagaaaaaataattggccacctcttcctagcaattttcctgtcggaccttgtttctatcaggatttttctgtagacattcctgtagaattccaaaagacagtaaagcttatgtactacttgtggatgttccatgcagtaacactgtttctaaatatcttcggatgcttggcttggttttgtgttgattctgcaagagcggttgattttggattgagtatcctgtggttcttgctttttactccttgttcatttgtctgttggtacagaccactttatggagctttcaggagtgacagttcatttagattctttgtattcttcttcgtctatatttgtcagtttgctgtacatgtactccaagctgcaggatttcataactggggcaattgtggttggatttcatcccttactggtctcaaccaaaatattcctgttggaatcatgatgataatcatagcagcacttttcacagcatcagcagtcatctcactagttatgttcaaaaaagtacatggactatatcgcacaacaggtgctagttttgagaaggcccaacaggagtttgcaacaggtgtgatgtccaacaaaactgtccagaccgcagctgcaaatgcagcttcaactgcagcatctagtgcagctcagaatgctttcaagggtaaccagatttaagaatcttcaaacaatacactgttaccttttgactgtacctttttctccagttactgtattctacaaatatttttatgttcaaaacacacagtacagacagcatggatatttcctgttcacttgtgcatgggctaaaaccaggaaaacttccttgtcttattactttacctaatagtttcttaatatttcagtgccccttgcagaaaaaatattacatgctaaataaatattctccatatttttgggggatgacattcagtgaattatttcagtggtgacccactgaaaattaataatggtacttatgattaaaaacgcatttaatactaactgcagtagttctttcaagaatctttagagataaggattgcacattggaaaagtaaaccatgtttcattcctttttccctatttatattgaaagaaataggccagcagagacttagggattttaaattggcttgctttttagctgtttcagtcaccagtgaagagcctatgtgcattttgtagtagataatgtaaaatttgtcatctttttcttttcttttttttagaatagctgatattttgataacaatctctaatttgcatgggcaccacatttcttatattaaaagaattagtgttttggcttctgtactgcttatggttgtaggattcaggggttaatggaatcacagaaatgatattctgcaagaatttcttttaaataaaaagtttgggggtgcaatataagaagtttatataatatgcagtacattatccaaaagagaaggtagttaatgcagtagaaagtagtggtaataattcctttttaaaaaaatttcggtagtcatatagtaacattttgctatatgaaaactttggtatattctgtggttacaactaagattgtgtctggcagctcttttttggggatgtgtgtgtgtgatttttaacagaggtattaaaggctagcctaactgttgtctaaaaagattgtacagtatttaagggattttccttttagcttttcatctccagtggcattaaacataaaaagaccctggcattttttcacatacttgaatccctaaatgcacctgtctttcactttttgagacagactgaatatatctaaaatttccagcaataaaaaaaaaagcatttaacttgcaccaagcaagaaaatataaatacagttaactgcattaagataatcacgttaaaattgttactatgcagcacagaacttcattcttatagtattcttgggttcaacctttgaatcaattttaccactgattaaataaatgactcaaagacatctgtaagtcatgctgctgtgttttgaaagtctttaactaaattaagattgcagaatgatagtgattattcaattagattttaagtaaggattgtgatattagaggctggaaatccttattttttaaaaaatcagataggcataaatagttaaatcactttcattctccccaaacctgtagttacagaaaaagttttatgctagaggtgggatgccaagttttcactatccatgaagcagcgctgcatgtcactaggtaacacagatccatccagatggtgtttacatttgatttatttgggatcttattgacatcaggtatacttggaagacatttcttttattcttcagcgtatgaatttaaagctattttttgtaaatatttctaatcagcgataatttctacctatgttctcaaccaacttagccagtttgtttttcagagcctgtagtcttattggaaatctattttatcagtgtgctttattgagtgtggattttgcatacattcaaaacattaaccacaaaatacagcaagtgcacctatattcaccattaacttatatcccaagtccattttttcctgtacactacaaacaaaagatatattagagacttttgaaaaatgctgaaatactttgcttcagaattggaatgtttatattatgtagaaatcttcaaaggtagcattattaaatagcaaagaataattagaacccacatatctttttttgtgtggatggggaaaatgttttaaaatccagttatttaatatgagtttgagagagaaaattgttttttaaaaatatatgtgcattgaaatgatggcaatgcttatagtatgatcaagtatgaaaggaactttaaattcttatatttacttttctctcagtaaattgttaaattttcactcagcaaaagattggcatttgttaagtgttctatatttagtactaaaatcacagtcatgaaatcatagtcataaaatggtcttcacacagcagtcatccgtgtcatttatcattttgtaatattaaattatggcaattttatttcaaactaaagtttgaacaccggaaagtcattactcagtgatttgtaatttgggacttggattatttatctagagatgtttgtatattttgtcagtaactaatactgcgctgccatcatggtgactgtcatggttctacagaaatgccctccatgtgtccctctaatgttgcatgtttcagtgggttggaagttttgtatatttattgtattaacacagagtgtcataaaataaaatgctgtttactgga

SEQ ID NO: 428887 - DNA, 1973 bp, Homo sapiens
agcgggtggagcggccggctgggtggcccgcgagctgcacccggatctgctccgcggggcgacgtgagcgcgcaggggggcggcggcctcgcctcgtctctctctctgcgcctgggtcgggtgggtgacgccgagagccagagagatgtcggatttcgacagtaacccgtttgccgacccggatctcaacaatcccttcaaggatccatcagttacacaagtgacaagaaatgttccaccaggacttgatgaatataatccattctcggattctagaacacctccaccaggcggtgtgaagatgcctaatgtacccaatacacaaccagcaataatgaaaccaacagaggaacatccagcttatacacagattgcaaaggaacatgcattggcccaagctgaacttcttaagcgccaggaagaactagaaagaaaagccgcagaattagatcgtcgggaacgagaaatgcaaaacctcagtcaacatggtagaaaaaataattggccacctcttcctagcaattttcctgtcggaccttgtttctatcaggatttttctgtagacattcctgtagaattccaaaagacagtaaagcttatgtactacttgtggatgttccatgcagtaacactgtttctaaatatcttcggatgcttggcttggttttgtgttgattctgcaagagcggttgattttggattgagtatcctgtggttcttgctttttactccttgttcatttgtctgttggtacagaccactttatggagctttcaggagtgacagttcatttagattctttgtattcttcttcgtctatatttgtcagtttgctgtacatgtactccaagctgcaggatttcataactggggcaattgtggttggatttcatcccttactggtctcaaccaaaatattcctgttggaatcatgatgataatcatagcagcacttttcacagcatcagcagtcatctcactagttatgttcaaaaaagtacatggactatatcgcacaacaggtgctagttttgagaaggcccaacaggagtttgcaacaggtgtgatgtccaacaaaactgtccagaccgcagctgcaaatgcagcttcaactgcagcatctagtgcagctcagaatgctttcaagggtaaccagatttaagaatcttcaaacaatacactgttaccttttgactgtacctttttctccagttactgtattctacaaatatttttatgttcaaaacacacagtacagacagcatggatatttcctgttcacttgtgcatgggctaaaaccaggaaaacttccttgtcttattactttacctaatagtttcttaatatttcagtgccccttgcagaaaaaatattacatgctaaataaatattctccatatttttgggggatgacattcagtgaattatttcagtggtgacccactgaaaattaataatggtacttatgattaaaaacgcatttaatactaactgcagtagttctttcaagaatctttagagataaggattgcacattggaaaagtaaaccatgtttcattcctttttccctatttatattgaaagaaataggccagcagagacttagggattttaaattggcttgctttttagctgtttcagtcaccagtgaagagcctatgtgcattttgtagtagataatgtaaaatttgtcatctttttcttttcttttttttagaatagctgatattttgataacaatctctaatttgcatgggcaccacatttcttatattaaagatagggttggttctgacgtaggggagatcgggtgaggatccgaatgtatctgagattcttactaaagttggggcaaaaagttttaatgggcttttcagagaggtcgggcaaggggaaccttaaacgggctacaacgtttaacggttggccaagtgggtggggggatagaacaggaagaggtttgaagaatag

SEQ ID NO: 428888 - DNA, 716 bp, Homo sapiens
gtaggtctggggcgcaccctgagaatctgcatttcttagaagttttaggtgatgctgatactgctgattggggttccacactttgagaagcactagtctaaaggactgtatggcttgttgtagtgaaatgaaaggaagctaggaaaggaaggaattgttgaaatggccttgaaagtaaattagagtttttcaagtcaagtaaattatctagacttcagttttgctcacgttcttccaactttaaacaatgattgctgttcctagacgtaggtttcctgagcagttcttttgtttcaaacttcttttcagaacaggcttagtcattgactggaagaaagttagggggaaggaaactaaaaggatagttggtttatttatcttgactctaaaaatttggaaatcagcagcagccataattttaactactttatgtcatgttctacatgtatactaaaacatactgtattgttacctttttaagtaacatgaaccaaatgaactcttgaggattcaggttcaccggttttgagcatcagtgattgcactgtgacaccttctggatttctcactgttctgtggatttctcgtttccctctctgcctccactcatcccagatggttgtgctttttgcgtgatatgccctgtctggtgttttcctgcctttcatcactgtcagcagttagcttactggtaataaatagaagaaatttctcca

SEQ ID NO: 428889 - DNA, 1934 bp, Homo sapiens
  misc_feature (77)..(77): n is a, c, g, or t
  misc_feature (128)..(128): n is a, c, g, or t
  misc_feature (378)..(378): n is a, c, g, or t
  misc_feature (467)..(467): n is a, c, g, or t
  misc_feature (494)..(494): n is a, c, g, or t
  misc_feature (557)..(557): n is a, c, g, or t
  misc_feature (640)..(640): n is a, c, g, or t
gaaatattgaaagtaaaactggcaaacatatggggaaatactaaaactcatgaatcaaagaaatgcaaattaaaatnaagagccagctttttaagaaaattacaaatgtcttctattgagggggcaangggaacagcctccttgccccggcagagactggaggtgtcgcacacctctccagagggagctgcgacaaccctgagccactcatctgaaggctccttggcctttcttctagaaacctgacttttgttttggtgatacaaagtgtggggagaccaggaacataaagatgttcaccgcagcgttatttcctaaaaccagaaaaaacctttaagctgtcacgtgagtggagtgatttaaaggtgtggactctgntcaagccagcccagggaccagctcatgtgctcacacaactgggagaccccaggccctgcgggaaccccctgctcctgcactcatgtcangttgttggggtgatcttgctggatagnaggggttctggactttcttcctccctctggggacgccgggtggaaaccccttatgtagaatangggctttggtcttgtgtcgaggaaatgcgactctgggctcttgatgtaaaaacattgtcccacaattgtgtagaaatacatgnaaacggaagagactagaggaatacgcagaagctcctccagcctcctggcctccccaggccacatctcagtcaaggagccgacccccagcatcgcctcggacatctcgctgcccatcgccacccaggagctgcggcaaaggctgaggcagctggaaaacgggacgaccctgggacagtctccactggggcagatccagctgaccatccggcacagctcgcagagaaacaagcttatcgtggtcgtgcatgcctgcagagacaagaggcggtcaggaaggaggaaaacacacgtgtcaaagaaaacattaaatccagtgtttgatcaaagctttgatttcagtgtttcgttaccagaagtgcagaggagaacgctcgacgttgccgtgaagaacagtggcggcttcctgtccaaagacaaagggctccttggcaaagtattggttgctctggcatctgaagaacttgccaaaggctggacccagtggtatgacctcacggaagatgggacgaggcctcaggcgatgacatagccgcagcaggcaggaggcgtcctcttcagcgtagctctccacctctacccggaacacaccctctcacagacgtaccaatgttatttttataatttcatggatttagttatacataccttaatagttttataaaattgttgacatttcaggcaaatttggccaatattatcattgaattttctgtgttggatttcctctaggatttcgccagttcctacaacgtgcagtagggcggcggtagctcttgtgtctgtggactctgctcagctgtgtccgtaggagtcggatgtgtctgtgctttattatggccttgtttatatatcactgaggtatactatgccatgtaaatagactattttttataatctttacatgctggtttaaattcagaaggaaatagatcaaggaaatatatatattttcttctaaaacttattaaattcgtgtgacaaataatcattttcatcttggcagcaaaaagttctcagtgacctattttgtggtgtttctttttgaaaagaaaagctgaaatattattaaatgctagtatgtttctgcccattatgaaagatgaaataaagtattcaaaatattaacattttcataaatataaggatgtattattgagaagtaagttgaagggcttataaggaaaaatgttttataactgagtaatatattaagagaattgtcatggttcataaatcacattatgctaatctgaaatttcttacataaaaatgaagtgtcttatgtttatttta

SEQ ID NO: 428890 - DNA, 458 bp, Homo sapiens
gggtttttgttttttattttattttttgagacagtctcccctctgtcacccaggccggagttgcagtgagccaagatcgcaccactgcactccagcctgggcaacagagtgagactccgtctcaaaaaataaataaaatagaagcagccttgtaactgtatttaccatgataatatattctgcacggtaagaattccttttacagacattctttatcaagaggtcggcccttctttttcaggcacataagccaaatgcaggcctgtgtgtagctgtgtgttttttctgtggttgccgcatttattccacctccagctggaccccccactgcaaatagagaacagcggtgggggatgggggttaaaaagtagagaacctcctttctgttcaactaatttcacgtgacagtgcatgtatttattcaataaaacctttatgttagctcagtaagagatttg

SEQ ID NO: 428891 - DNA, 244 bp, Homo sapiens
  misc_feature (4)..(4): n is a, c, g, or t
  misc_feature (103)..(103): n is a, c, g, or t
tgtncctgctggtttaatgcagcagccctaggctagaagcagtcctcctgcctgggcctcccaaactgctgggatgacaggtttgaaccactgcacctgcccnatggcagcaaaaagttctcagtgacctattttgtggtgtttctttttgaaaagaaaagctgaaatattattaaatgctagtatgtttctgcccattatgaaagatgaaataaagtattcaaaatattaacattttcataaa

SEQ ID NO: 428892 - DNA, 5896 bp, Homo sapiens
accgtcccgggcggaggcgggcgtgcggcggagccgcgtcccctcagaggggcgctggcgcggggctgagccgcccgggatcagcgcgagcacccagcccgcctcggccgggagggcagcgcggcactgcggggcgatgagcggcgcccggggcgagggcccggaggcgggcgccggcggggctgggggccgcgcggcgcctgagaaccccgggggcgtgctgagcgtggagctgcccgggctgctggcgcagctggcgcggagcttcgcgctgctgctgcccgtgtacgcgctgggctacctggggctcagcttcagctgggttctcctcgcgctcgcgctgctcgcctggtgtcgccgcagccgcggcctcaaggccctgcgcctgtgccgcgcgctggcgctgctggaagacgaggagcgcgtcgtgcgcctgggggtgcgcgcctgcgacctgcccgcctgggttcattttccagacactgaaagagcagaatggctaaataagactgtaaaacacatgtggcctttcatttgccaatttatagagaagttgtttcgagaaactatagaaccagccgtgcggggagcaaacacccaccttagcacctttagtttcacgaaggtcgacgtgggccagcagcccctcaggatcaatggtgttaaggtatacactgaaaatgtagacaaaaggcaaattattttggaccttcagattagttttgtaggaaattgtgagattgatttggagatcaaacgatatttttgtagagctggtgtgaaaagtatccagattcatggtaccatgcgggtgatcctggaaccgttgattggagatatgcccttagttggagctttgtctatcttcttccttaggaaaccacttttagaaattaactggacaggactgacgaatcttctggatgtccctggattgaatggtttatcagatactatcattttggatataatatcaaactatctggtgcttcccaatcgaatcaccgttccacttgtcagtgaagttcaaatagctcagttgcggtttcctgtaccaaagggtgttctaaggatacattttattgaagctcaggatcttcaggggaaagacacttaccttaagggacttgtcaagggaaagtcagacccctatggaatcattagagttggcaaccaaatcttccaaagcagagtcatcaaggagaacctcagtccaaagtggaatgaagtctatgaggctttagtgtatgaacatcctggacaagaattagagattgagctctttgatgaagacccagacaaggatgactttttaggaagtcttatgattgacctcattgaagttgaaaaggagcgccttttagatgaatggttcactctggacgaggttcccaaggggaagctacacttgagactggagtggctcacgttaatgccaaatgcgtcaaacctcgacaaggtgctaacagacatcaaagctgacaaagaccaagccaacgatggtctttcctctgcattgctgatcttgtacttggattcagcaaggaaccttccgtcagggaagaaaataagcagcaacccaaatcctgttgtccagatgtcagttgggcacaaggcccaggagagcaagattcgatacaaaaccaatgaacctgtgtgggaggaaaacttcactttcttcattcacaatcccaagcgccaggaccttgaagttgaggtcagagacgagcagcaccagtgttccctggggaacctgaaggtccccctcagccagctgctcaccagtgaggacatgactgtgagccagcgcttccagctcagtaactcgggtccaaacagcaccatcaagatgaagattgccctgcgggtgctccatctcgaaaagcgagaaaggcctccagaccaccaacactcagctcaagtcaaacgtccctctgtgtccaaagaggggaggaaaacatccatcaaatctcatatgtctgggtctccaggccctggtggcagcaacacagctccatccacaccagtcattgggggcagtgataagcctggtatggaagaaaaggcccagccccctgaggccggccctcaggggctgcacgacctgggcagaagctcctccagcctcctggcctccccaggccacatctcagtcaaggagccgacccccagcatcgcctcggacatctcgctgcccatcgccacccaggagctgcggcaaaggctgaggcagctggaaaacgggacgaccctgggacagtctccactggggcagatccagctgaccatccggcacagctcgcagagaaacaagcttatcgtggtcgtgcatgcctgcagaaacctcattgccttctctgaagacggctctgacccctatgtccgcatgtatttattaccagacaagaggcggtcaggaaggaggaaaacacacgtgtcaaagaaaacattaaatccagtgtttgatcaaagctttgatttcagtgtttcgttaccagaagtgcagaggagaacgctcgacgttgccgtgaagaacagtggcggcttcctgtccaaagacaaagggctccttggcaaagtattggttgctctggcatctgaagaacttgccaaaggctggacccagtggtatgacctcacggaagatgggacgaggcctcaggcgatgacatagccgcagcaggcaggaggcgtcctcttcagcgtagctctccacctctacccggaacacaccctctcacagacgtaccaatgttatttttataatttcatggatttagttatacataccttaatagttttataaaattgttgacatttcaggcaaatttggccaatattatcattgaattttctgtgttggatttcctctaggatttcgccagttcctacaacgtgcagtagggcggcggtagctcttgtgtctgtggactctgctcagctgtgtccgtaggagtcggatgtgtctgtgctttattatggccttgtttatatatcactgaggtatactatgccatgtaaatagactattttttataatctttacatgctggtttaaattcagaaggaaatagatcaaggaaatatatatattttcttctaaaacttattaaattcgtgtgacaaataatcattttcatcttggcagcaaaaagttctcagtgacctattttgtggtgtttctttttgaaaagaaaagctgaaatattattaaatgctagtatgtttctgcccattatgaaagatgaaataaagtattcaaaatattaacattttcataaatataaggatgtattattgagaagtaagttgaagggcttataaggaaaaatgttttataactgagtaatatattaagagaattgtcatggttcataaatcacattatgctaatctgaaatttcttacataaaaatgaagtgtcttatgtttattttaattgctgttgtaacttactcatgaaacagtatacagacaccttgtacttttcctcaactgtaagagcagactttcaatgttagcaattaagctgttgtcaaacaatcagtcatgagctttgttaattttcaatgttttcccagcctataaaaaaaggaaggtacacgttgtccttttaaaggttgtgaggtagattggagtgagtagacaggatattgcattaaaaattgaaagctcgatctcattattgtcaggaacccccagtgtgacctcacacataggatgtgggacctttgagccgatgtgcactggccaccaccagggttgggggcgccacagctgcgagcccggcccctgctgttctcagcagccacttcccaggctgcctcactttatgccatgactgaccttaatattgggatattgttatgcaatttttatcctgtttagactgttaaaagcaggtttctgtacttaagagtcccccagacctcctgtgaggtgaggctctgttgcagtgtcgtaggctgtgtgtgtctgtaaagaaagaatgcacatatgtagacgattaagtgtatattataagctatatgctgaaaatggcttccatagccatgagaacatcttaaaactatgtgtaaatatattaaggaaagtatagctttgtaatttaaattggagcttttagcttgtttcatggaactatacaacttgtgggtaactcacatgaccaaacaaaccaaagtgcctgtgacggggcgggtggcgtctacccaccctcccttctagcagattcttattttgtttgaatttataaacaaggctggtggctgtctacccaccctcccttctagcagattttgattttgtttcaatttataacttacactttgaaccatgggtttacttataatggagtctgtagcttcacagcatatttcatgtaatcataaagaccagtatattccctcctgctgaatgacatgcgactgtaaagcctctttataaaccatttccaatgttagtatataggattatttgggaagcgtatcaatacctttatagacaaatacgaacatgtatgcacacaaaacatttaactatggtatttatggaagacaggtaacaacattaaatctagttgctttcccttagtattagatttgttgagggttttttaaaaatcaggtctgttgaaagtcttctgtcataatctataaagcagcagcactcatggaaattgtagcatgccagtaatttttaccaacatcccatacatctgagttctgcagtccagtgtgtaatccgctccatgtgtattttgcttaatggaatgctttatttaagcacttaggcagagtagacacaattaaaggtacaaagcccagaggaagtggtagagcagcaccgtgcctgccctgaggcagtggagtcagtagcgctgtccccagggccttgagtgcctggaggtgcttggcctccagtagctgcctccattctcttttaaaaaaagggggtgattctgaggcactgaagtgcctcccagatgtggaggagtgaagccaccatcgaggccacactcagcactccaggatcccagcgatgtcagacactcttgagttgtcaaaacgttaattttcagttttaaataatcagtttatctaagaaaagggaattttaacttttctaccttgagccaagccaatgaagggaaaattaattaacttagtaaatttgaagtgcagctctgttagctcgtacatgtgggttcttatcctgatcctgtgccttaaagtaggaaggtgtttccaagttcagattaaaatagaagcagctggccgggtgcggtggctcacgcctgtaatcccagcactttgggaggccgaggcgggcggatgacctgaggtcaggagttcaagaccagcctggccaacatggagaaaccccatctttactaaaaatacaaaaattagccgggcgtggtggtggagcgcacgcctgtagtcccagctactcgggaggctgaggcaggagaattgcttgaacccaggaggcggaggttgcagtgagccaagatcgcaccactgcactccagcctgggcaacagagtgagactccgtctcaaaaaataaataaaatagaagcagccttgtaactgtatttaccatgataatatattctgcacggtaagaattccttttacagacattctttatcaagaggtcggcccttctttttcaggcacataagccaaatgcaggcctgtgtgtagctgtgtgttttttctgtggttgccgcatttattccacctccagctggaccccccactgcaaatagagaacagcggtgggggatgggggttaaaaagtagagaacctcctttctgttcaactaatttcacgtgacagtgcatgtatttattcaataaaacctttatgttagctcagtaagagatttg

SEQ ID NO: 428893 - DNA, 6098 bp, Homo sapiens
accgtcccgggcggaggcgggcgtgcggcggagccgcgtcccctcagaggggcgctggcgcggggctgagccgcccgggatcagcgcgagcacccagcccgcctcggccgggagggcagcgcggcactgcggggcgatgagcggcgcccggggcgagggcccggaggcgggcgccggcggggctgggggccgcgcggcgcctgagaaccccgggggcgtgctgagcgtggagctgcccgggctgctggcgcagctggcgcggagcttcgcgctgctgctgcccgtgtacgcgctgggctacctggggctcagcttcagctgggttctcctcgcgctcgcgctgctcgcctggtgtcgccgcagccgcggcctcaaggccctgcgcctgtgccgcgcgctggcgctgctggaagacgaggagcgcgtcgtgcgcctgggggtgcgcgcctgcgacctgcccgcctgggttcattttccagacactgaaagagcagaatggctaaataagactgtaaaacacatgtggcctttcatttgccaatttatagagaagttgtttcgagaaactatagaaccagccgtgcggggagcaaacacccaccttagcacctttagtttcacgaaggtcgacgtgggccagcagcccctcaggatcaatggtgttaaggtatacactgaaaatgtagacaaaaggcaaattattttggaccttcagattagttttgtaggaaattgtgagattgatttggagatcaaacgatatttttgtagagctggtgtgaaaagtatccagattcatggtaccatgcgggtgatcctggaaccgttgattggagatatgcccttagttggagctttgtctatcttcttccttaggaaaccacttttagaaattaactggacaggactgacgaatcttctggatgtccctggattgaatggtttatcagatactatcattttggatataatatcaaactatctggtgcttcccaatcgaatcaccgttccacttgtcagtgaagttcaaatagctcagttgcggtttcctgtaccaaagggtgttctaaggatacattttattgaagctcaggatcttcaggggaaagacacttaccttaagggacttgtcaagggaaagtcagacccctatggaatcattagagttggcaaccaaatcttccaaagcagagtcatcaaggagaacctcagtccaaagtggaatgaagtctatgaggctttagtgtatgaacatcctggacaagaattagagattgagctctttgatgaagacccagacaaggatgactttttaggaagtcttatgattgacctcattgaagttgaaaaggagcgccttttagatgaatggttcactctggacgaggttcccaaggggaagctacacttgagactggagtggctcacgttaatgccaaatgcgtcaaacctcgacaaggtgctaacagacatcaaagctgacaaagaccaagccaacgatggtctttcctctgcattgctgatcttgtacttggattcagcaaggaaccttccgtcagggaagaaaataagcagcaacccaaatcctgttgtccagatgtcagttgggcacaaggcccaggagagcaagattcgatacaaaaccaatgaacctgtgtgggaggaaaacttcactttcttcattcacaatcccaagcgccaggaccttgaagttgaggtcagagacgagcagcaccagtgttccctggggaacctgaaggtccccctcagccagctgctcaccagtgaggacatgactgtgagccagcgcttccagctcagtaactcgggtccaaacagcaccatcaagatgaagattgccctgcgggtgctccatctcgaaaagcgagaaaggcctccagaccaccaacactcagctcaagtcaaacgtccctctgtgtccaaagaggggaggaaaacatccatcaaatctcatatgtctgggtctccaggccctggtggcagcaacacagctccatccacaccagtcattgggggcagtgataagcctggtatggaagaaaaggcccagccccctgaggccggccctcaggggctgcacgacctgggcagaagctcctccagcctcctggcctccccaggccacatctcagtcaaggagccgacccccagcatcgcctcggacatctcgctgcccatcgccacccaggagctgcggcaaaggctgaggcagctggaaaacgggacgaccctgggacagtctccactggggcagatccagctgaccatccggcacagctcgcagagaaacaagcttatcgtggtcgtgcatgcctgcagaaacctcattgccttctctgaagacggctctgacccctatgtccgcatgtatttattaccagacaagaggcggtcaggaaggaggaaaacacacgtgtcaaagaaaacattaaatccagtgtttgatcaaagctttgatttcagtgtttcgttaccagaagtgcagaggagaacgctcgacgttgccgtgaagaacagtggcggcttcctgtccaaagacaaagggctccttggcaaagtattggttgctctggcatctgaagaacttgccaaaggctggacccagtggtatgacctcacggaagatgggacgaggcctcaggcgatgacatagccgcagcaggcaggaggcgtcctcttcagcgtagctctccacctctacccggaacacaccctctcacagacgtaccaatgttatttttataatttcatggatttagttatacataccttaatagttttataaaattgttgacatttcaggcaaatttggccaatattatcattgaattttctgtgttggatttcctctaggatttcgccagttcctacaacgtgcagtagggcggcggtagctcttgtgtctgtggactctgctcagctgtgtccgtaggagtcggatgtgtctgtgctttattatggccttgtttatatatcactgaggtatactatgccatgtaaatagactattttttataatctttacatgctggtttaaattcagaaggaaatagatcaaggaaatatatatattttcttctaaaacttattaaattcgtgtgacaaataatcattttcatcttggcagcaaaaagttctcagtgacctattttgtggtgtttctttttgaaaagaaaagctgaaatattattaaatgctagtatgtttctgcccattatgaaagatgaaataaagtattcaaaatattaacattttcataaatataaggatgtattattgagaagtaagttgaagggcttataaggaaaaatgttttataactgagtaatatattaagagaattgtcatggttcataaatcacattatgctaatctgaaatttcttacataaaaatgaagtgtcttatgtttattttaattgctgttgtaacttactcatgaaacagtatacagacaccttgtacttttcctcaactgtaagagcagactttcaatgttagcaattaagctgttgtcaaacaatcagtcatgagctttgttaattttcaatgttttcccagcctataaaaaaaggaaggtacacgttgtccttttaaaggttgtgaggtagattggagtgagtagacaggatattgcattaaaaattgaaagctcgatctcattattgtcaggaacccccagtgtgacctcacacataggatgtgggacctttgagccgatgtgcactggccaccaccagggttgggggcgccacagctgcgagcccggcccctgctgttctcagcagccacttcccaggctgcctcactttatgccatgactgaccttaatattgggatattgttatgcaatttttatcctgtttagactgttaaaagcaggtttctgtacttaagagtcccccagacctcctgtgaggtgaggctctgttgcagtgtcgtaggctgtgtgtgtctgtaaagaaagaatgcacatatgtagacgattaagtgtatattataagctatatgctgaaaatggcttccatagccatgagaacatcttaaaactatgtgtaaatatattaaggaaagtatagctttgtaatttaaattggagcttttagcttgtttcatggaactatacaacttgtgggtaactcacatgaccaaacaaaccaaagtgcctgtgacggggcgggtggcgtctacccaccctcccttctagcagattcttattttgtttgaatttataaacaaggctggtggctgtctacccaccctcccttctagcagattttgattttgtttcaatttataacttacactttgaaccatgggtttacttataatggagtctgtagcttcacagcatatttcatgtaatcataaagaccagtatattccctcctgctgaatgacatgcgactgtaaagcctctttataaaccatttccaatgttagtatataggattatttgggaagcgtatcaatacctttatagacaaatacgaacatgtatgcacacaaaacatttaactatggtatttatggaagacaggtaacaacattaaatctagttgctttcccttagtattagatttgttgagggttttttaaaaatcaggtctgttgaaagtcttctgtcataatctataaagcagcagcactcatggaaattgtagcatgccagtaatttttaccaacatcccatacatctgagttctgcagtccagtgtgtaatccgctccatgtgtattttgcttaatggaatgctttatttaagcacttaggcagagtagacacaattaaaggtacaaagcccagaggaagtggtagagcagcaccgtgcctgccctgaggcagtggagtcagtagcgctgtccccagggccttgagtgcctggaggtgcttggcctccagtagctgcctccattctcttttaaaaaaagggggtgattctgaggcactgaagtgcctcccagatgtggaggagtgaagccaccatcgaggccacactcagcactccaggatcccagcgatgtcagacactcttgagttgtcaaaacgttaattttcagttttaaataatcagtttatctaagaaaagggaattttaacttttctaccttgagccaagccaatgaagggaaaattaattaacttagtaaatttgaagtgcagctctgttagctcgtacatgtgggttcttatcctgatcctgtgccttaaagtaggaaggtgtttccaagttcagattaaaatagaagcagctggccgggtgcggtggctcacgcctgtaatcccagcactttgggaggccgaggcgggcggatgacctgaggtcaggagttcaagaccagcctggccaacatggagaaaccccatctttactaaaaatacaaaaattagccgggcgtggtggtggagcgcacgcctgtagtcccagctactcgggaggctgaggcaggagaattgcttgaacccaggaggcggaggttgcagtgagccaagatcgcaccactgcactccagcctgggcaacagagtgagactccgtctcaaaaaataaataaaatagaagcagccttgtaactgtatttaccatgataatatattctgcacggtaagaattccttttacagacattctttatcaagaggtcggcccttctttttcaggcacataagccaaatgcaggcctgtgtgtagctgtgtgttttttctgtggttgccgcatttattccacctccagctggaccccccactgcaaatagagaacagcggtgggggatgggggttaaaaagtagagaacctcctttctgttcaactaatttcacgtgacagtgcatgtatttattcaataaaacctggccgaattcggacgaggttgaacccggagggaggttgcgtgagctgagatcatccactggctcagctggcagagagccgacttatctatataaatatagtcagacctttagaaatgctacagtggttggcacggtggttacgcctgaatccaagacttggggagctgagccggccgatggctgaactcagaattcaaaccagcctgggaaacacgggaaccttgtt

SEQ ID NO: 428894 - DNA, 6369 bp, Homo sapiens
ggtatttagtttttatttcataatcataaacttaactctgcaatccagctaggcatgggagggaacaaggaaaacatggaacccaaagggaactgcagcgagagcacaaagattctaggatactgcgagcaaatggggtggaggggtgctctcctgagctacagaaggaatgatctggtggttaagataaaacacaagtcaaacttattcgagttgtccacagtcagcaatggtgatcttcttgctggtcttgccattcctggacccaaagcgctccatggcctccacaatattcatgccttctttcactttgccaaacaccacatgcttgccatccaaccactcagtcttggcagtgcagatgaaaaactgggaaccatttgtgttgggtccagcatttgccatggacaagatgccaggacccgtatgctttaggatgaagttctcatcttcaaatttctccccatagatggacttgccaccagtgccattatggcgtgtgaagtcaccaccctgacacataaaccctggaataattctgtgaaagcgcgagcacccagcccgcctcggccgggagggcagcgcggcactgcggggcgatgagcggcgcccggggcgagggcccggaggcgggcgccggcggggctgggggccgcgcggcgcctgagaaccccgggggcgtgctgagcgtggagctgcccgggctgctggcgcagctggcgcggagcttcgcgctgctgctgcccgtgtacgcgctgggctacctggggctcagcttcagctgggttctcctcgcgctcgcgctgctcgcctggtgtcgccgcagccgcggcctcaaggccctgcgcctgtgccgcgcgctggcgctgctggaagacgaggagcgcgtcgtgcgcctgggggtgcgcgcctgcgacctgcccgcctgggttcattttccagacactgaaagagcagaatggctaaataagactgtaaaacacatgtggcctttcatttgccaatttatagagaagttgtttcgagaaactatagaaccagccgtgcggggagcaaacacccaccttagcacctttagtttcacgaaggtcgacgtgggccagcagcccctcaggatcaatggtgttaaggtatacactgaaaatgtagacaaaaggcaaattattttggaccttcagattagttttgtaggaaattgtgagattgatttggagatcaaacgatatttttgtagagctggtgtgaaaagtatccagattcatggtaccatgcgggtgatcctggaaccgttgattggagatatgcccttagttggagctttgtctatcttcttccttaggaaaccacttttagaaattaactggacaggactgacgaatcttctggatgtccctggattgaatggtttatcagatactatcattttggatataatatcaaactatctggtgcttcccaatcgaatcaccgttccacttgtcagtgaagttcaaatagctcagttgcggtttcctgtaccaaagggtgttctaaggatacattttattgaagctcaggatcttcaggggaaagacacttaccttaagggacttgtcaagggaaagtcagacccctatggaatcattagagttggcaaccaaatcttccaaagcagagtcatcaaggagaacctcagtccaaagtggaatgaagtctatgaggctttagtgtatgaacatcctggacaagaattagagattgagctctttgatgaagacccagacaaggatgactttttaggaagtcttatgattgacctcattgaagttgaaaaggagcgccttttagatgaatggttcactctggacgaggttcccaaggggaagctacacttgagactggagtggctcacgttaatgccaaatgcgtcaaacctcgacaaggtgctaacagacatcaaagctgacaaagaccaagccaacgatggtctttcctctgcattgctgatcttgtacttggattcagcaaggaaccttccgagtaacccattagaatttaaccccgatgtcttgaagaagactgcagttcagagagctttaaagtcagggaagaaaataagcagcaacccaaatcctgttgtccagatgtcagttgggcacaaggcccaggagagcaagattcgatacaaaaccaatgaacctgtgtgggaggaaaacttcactttcttcattcacaatcccaagcgccaggaccttgaagttgaggtcagagacgagcagcaccagtgttccctggggaacctgaaggtccccctcagccagctgctcaccagtgaggacatgactgtgagccagcgcttccagctcagtaactcgggtccaaacagcaccatcaagatgaagattgccctgcgggtgctccatctcgaaaagcgagaaaggcctccagaccaccaacactcagctcaagtcaaacgtccctctgtgtccaaagaggggaggaaaacatccatcaaatctcatatgtctgggtctccaggccctggtggcagcaacacagctccatccacaccagtcattgggggcagtgataagcctggtatggaagaaaaggcccagccccctgaggccggccctcaggggctgcacgacctgggcagaagctcctccagcctcctggcctccccaggccacatctcagtcaaggagccgacccccagcatcgcctcggacatctcgctgcccatcgccacccaggagctgcggcaaaggctgaggcagctggaaaacgggacgaccctgggacagtctccactggggcagatccagctgaccatccggcacagctcgcagagaaacaagcttatcgtggtcgtgcatgcctgcagaaacctcattgccttctctgaagacggctctgacccctatgtccgcatgtatttattaccagacaagaggcggtcaggaaggaggaaaacacacgtgtcaaagaaaacattaaatccagtgtttgatcaaagctttgatttcagtgtttcgttaccagaagtgcagaggagaacgctcgacgttgccgtgaagaacagtggcggcttcctgtccaaagacaaagggctccttggcaaagtattggttgctctggcatctgaagaacttgccaaaggctggacccagtggtatgacctcacggaagatgggacgaggcctcaggcgatgacatagccgcagcaggcaggaggcgtcctcttcagcgtagctctccacctctacccggaacacaccctctcacagacgtaccaatgttatttttataatttcatggatttagttatacataccttaatagttttataaaattgttgacatttcaggcaaatttggccaatattatcattgaattttctgtgttggatttcctctaggatttcgccagttcctacaacgtgcagtagggcggcggtagctcttgtgtctgtggactctgctcagctgtgtccgtaggagtcggatgtgtctgtgctttattatggccttgtttatatatcactgaggtatactatgccatgtaaatagactattttttataatctttacatgctggtttaaattcagaaggaaatagatcaaggaaatatatatattttcttctaaaacttattaaattcgtgtgacaaataatcattttcatcttggcagcaaaaagttctcagtgacctattttgtggtgtttctttttgaaaagaaaagctgaaatattattaaatgctagtatgtttctgcccattatgaaagatgaaataaagtattcaaaatattaacattttcataaatataaggatgtattattgagaagtaagttgaagggcttataaggaaaaatgttttataactgagtaatatattaagagaattgtcatggttcataaatcacattatgctaatctgaaatttcttacataaaaatgaagtgtcttatgtttattttaattgctgttgtaacttactcatgaaacagtatacagacaccttgtacttttcctcaactgtaagagcagactttcaatgttagcaattaagctgttgtcaaacaatcagtcatgagctttgttaattttcaatgttttcccagcctataaaaaaaggaaggtacacgttgtccttttaaaggttgtgaggtagattggagtgagtagacaggatattgcattaaaaattgaaagctcgatctcattattgtcaggaacccccagtgtgacctcacacataggatgtgggacctttgagccgatgtgcactggccaccaccagggttgggggcgccacagctgcgagcccggcccctgctgttctcagcagccacttcccaggctgcctcactttatgccatgactgaccttaatattgggatattgttatgcaatttttatcctgtttagactgttaaaagcaggtttctgtacttaagagtcccccagacctcctgtgaggtgaggctctgttgcagtgtcgtaggctgtgtgtgtctgtaaagaaagaatgcacatatgtagacgattaagtgtatattataagctatatgctgaaaatggcttccatagccatgagaacatcttaaaactatgtgtaaatatattaaggaaagtatagctttgtaatttaaattggagcttttagcttgtttcatggaactatacaacttgtgggtaactcacatgaccaaacaaaccaaagtgcctgtgacggggcgggtggcgtctacccaccctcccttctagcagattcttattttgtttgaatttataaacaaggctggtggctgtctacccaccctcccttctagcagattttgattttgtttcaatttataacttacactttgaaccatgggtttacttataatggagtctgtagcttcacagcatatttcatgtaatcataaagaccagtatattccctcctgctgaatgacatgcgactgtaaagcctctttataaaccatttccaatgttagtatataggattatttgggaagcgtatcaatacctttatagacaaatacgaacatgtatgcacacaaaacatttaactatggtatttatggaagacaggtaacaacattaaatctagttgctttcccttagtattagatttgttgagggttttttcatggaaattgtagcatgccagtaatttttaccaacatcccatacatctgagttctgcagtccagtgtgtaatccgctccatgtgtattttgcttaatggaatgctttatttaagcacttaggcagagtagacacaattaaaggtacaaagcccagaggaagtggtagagcagcaccgtgcctgccctgaggcagtggagtcagtagcgctgtccccagggccttgagtgcctggaggtgcttggcctccagtagctgcctccattctcttttaaaaaaagggggtgattctgaggcactgaagtgcctcccagatgtggaggagtgaagccaccatcgaggccacactcagcactccaggatcccagcgatgtcagacactcttgagttgtcaaaacgttaattttcagttttaaataatcagtttatctaagaaaagggaattttaacttttctaccttgagccaagccaatgaagggaaaattaattaacttagtaaatttgaagtgcagctctgttagctcgtacatgtgggttcttatcctgatcctgtgccttaaagtaggaaggtgtttccaagttcagattaaaatagaagcagctggccgggtgcggtggctcacgcctgtaatcccagcactttgggaggccgaggcgggcggatgacctgaggtcaggagttcaagaccagcctggccaacatggagaaaccccatctttactaaaaatacaaaaattagccgggcgtggtggtggagcgcacgcctgtagtcccagctactcgggaggctgaggcaggagaattgcttgaacccaggaggcggaggttgcagtgagccaagatcgcaccactgcactccagcctgggcaacagagtgagactccgtctcaaaaaataaataaaatagaagcagccttgtaactgtatttaccatgataatatattctgcacggtaagaattccttttacagacattctttatcaagaggtcggcccttctttttcaggcacataagccaaatgcaggcctgtgtgtagctgtgtgttttttctgtggttgccgcatttattccacctccagctggaccccccactgcaaatagagaacagcggtgggggatgggggttaaaaagtagagaacctcctttctgttcaactaatttcacgtgacagtgcatgtatttattcaataaaacctttatgttagctcagtaagagatttg

SEQ ID NO: 428895 - DNA, 4723 bp, Homo sapiens
cgctaggtggggctgggagtaatcggccgaggtagacattgagctctttgatgaagacccagacaaggatgactttttaggaagtcttatgattgacctcattgaagttgaaaaggagcgccttttagatgaatggttcactctggacgaggttcccaaggggaagctacacttgagactggagtggctcacgttaatgccaaatgcgtcaaacctcgacaaggtgctaacagacatcaaagctgacaaagaccaagccaacgatggtctttcctctgcattgctgatcttgtacttggattcagcaaggaaccttccgagtaacccattagaatttaaccccgatgtcttgaagaagactgcagttcagagagctttaaagtcagggaagaaaataagcagcaacccaaatcctgttgtccagatgtcagttgggcacaaggcccaggagagcaagattcgatacaaaaccaatgaacctgtgtgggaggaaaacttcactttcttcattcacaatcccaagcgccaggaccttgaagttgaggtcagagacgagcagcaccagtgttccctggggaacctgaaggtccccctcagccagctgctcaccagtgaggacatgactgtgagccagcgcttccagctcagtaactcgggtccaaacagcaccatcaagatgaagattgccctgcgggtgctccatctcgaaaagcgagaaaggcctccagaccaccaacactcagctcaagtcaaacgtccctctgtgtccaaagaggggaggaaaacatccatcaaatctcatatgtctgggtctccaggccctggtggcagcaacacagctccatccacaccagtcattgggggcagtgataagcctggtatggaagaaaaggcccagccccctgaggccggccctcaggggctgcacgacctgggcagaagctcctccagcctcctggcctccccaggccacatctcagtcaaggagccgacccccagcatcgcctcggacatctcgctgcccatcgccacccaggagctgcggcaaaggctgaggcagctggaaaacgggacgaccctgggacagtctccactggggcagatccagctgaccatccggcacagctcgcagagaaacaagcttatcgtggtcgtgcatgcctgcagaaacctcattgccttctctgaagacggctctgacccctatgtccgcatgtatttattaccagacaagaggcggtcaggaaggaggaaaacacacgtgtcaaagaaaacattaaatccagtgtttgatcaaagctttgatttcagtgtttcgttaccagaagtgcagaggagaacgctcgacgttgccgtgaagaacagtggcggcttcctgtccaaagacaaagggctccttggcaaagtattggttgctctggcatctgaagaacttgccaaaggctggacccagtggtatgacctcacggaagatgggacgaggcctcaggcgatgacatagccgcagcaggcaggaggcgtcctcttcagcgtagctctccacctctacccggaacacaccctctcacagacgtaccaatgttatttttataatttcatggatttagttatacataccttaatagttttataaaattgttgacatttcaggcaaatttggccaatattatcattgaattttctgtgttggatttcctctaggatttcgccagttcctacaacgtgcagtagggcggcggtagctcttgtgtctgtggactctgctcagctgtgtccgtaggagtcggatgtgtctgtgctttattatggccttgtttatatatcactgaggtatactatgccatgtaaatagactattttttataatctttacatgctggtttaaattcagaaggaaatagatcaaggaaatatatatattttcttctaaaacttattaaattcgtgtgacaaataatcattttcatcttggcagcaaaaagttctcagtgacctattttgtggtgtttctttttgaaaagaaaagctgaaatattattaaatgctagtatgtttctgcccattatgaaagatgaaataaagtattcaaaatattaacattttcataaatataaggatgtattattgagaagtaagttgaagggcttataaggaaaaatgttttataactgagtaatatattaagagaattgtcatggttcataaatcacattatgctaatctgaaatttcttacataaaaatgaagtgtcttatgtttattttaattgctgttgtaacttactcatgaaacagtatacagacaccttgtacttttcctcaactgtaagagcagactttcaatgttagcaattaagctgttgtcaaacaatcagtcatgagctttgttaattttcaatgttttcccagcctataaaaaaaggaaggtacacgttgtccttttaaaggttgtgaggtagattggagtgagtagacaggatattgcattaaaaattgaaagctcgatctcattattgtcaggaacccccagtgtgacctcacacataggatgtgggacctttgagccgatgtgcactggccaccaccagggttgggggcgccacagctgcgagcccggcccctgctgttctcagcagccacttcccaggctgcctcactttatgccatgactgaccttaatattgggatattgttatgcaatttttatcctgtttagactgttaaaagcaggtttctgtacttaagagtcccccagacctcctgtgaggtgaggctctgttgcagtgtcgtaggctgtgtgtgtctgtaaagaaagaatgcacatatgtagacgattaagtgtatattataagctatatgctgaaaatggcttccatagccatgagaacatcttaaaactatgtgtaaatatattaaggaaagtatagctttgtaatttaaattggagcttttagcttgtttcatggaactatacaacttgtgggtaactcacatgaccaaacaaaccaaagtgcctgtgacggggcgggtggcgtctacccaccctcccttctagcagattcttattttgtttgaatttataaacaaggctggtggctgtctacccaccctcccttctagcagattttgattttgtttcaatttataacttacactttgaaccatgggtttacttataatggagtctgtagcttcacagcatatttcatgtaatcataaagaccagtatattccctcctgctgaatgacatgcgactgtaaagcctctttataaaccatttccaatgttagtatataggattatttgggaagcgtatcaatacctttatagacaaatacgaacatgtatgcacacaaaacatttaactatggtatttatggaagacaggtaacaacattaaatctagttgctttcccttagtattagatttgttgagggttttttaaaaatcaggtctgttgaaagtcttctgtcataatctataaagcagcagcactcatggaaattgtagcatgccagtaatttttaccaacatcccatacatctgagttctgcagtccagtgtgtaatccgctccatgtgtattttgcttaatggaatgctttatttaagcacttaggcagagtagacacaattaaaggtacaaagcccagaggaagtggtagagcagcaccgtgcctgccctgaggcagtggagtcagtagcgctgtccccagggccttgagtgcctggaggtgcttggcctccagtagctgcctccattctcttttaaaaaaagggggtgattctgaggcactgaagtgcctcccagatgtggaggagtgaagccaccatcgaggccacactcagcactccaggatcccagcgatgtcagacactcttgagttgtcaaaacgttaattttcagttttaaataatcagtttatctaagaaaagggaattttaacttttctaccttgagccaagccaatgaagggaaaattaattaacttagtaaatttgaagtgcagctctgttagctcgtacatgtgggttcttatcctgatcctgtgccttaaagtaggaaggtgtttccaagttcagattaaaatagaagcagctggccgggtgcggtggctcacgcctgtaatcccagcactttgggaggccgaggcgggcggatgacctgaggtcaggagttcaagaccagcctggccaacatggagaaaccccatctttactaaaaatacaaaaattagccgggcgtggtggtggagcgcacgcctgtagtcccagctactcgggaggctgaggcaggagaattgcttgaacccaggaggcggaggttgcagtgagccaagatcgcaccactgcactccagcctgggcaacagagtgagactccgtctcaaaaaataaataaaatagaagcagccttgtaactgtatttaccatgataatatattctgcacggtaagaattccttttacagacattctttatcaagaggtcggcccttctttttcaggcacataagccaaatgcaggcctgtgtgtagctgtgtgttttttctgtggttgccgcatttattccacctccagctggaccccccactgcaaatagagaacagcggtgggggatgggggttaaaaagtagagaacctcctttctgttcaactaatttcacgtgacagtgcatgtatttattcaataaaacctttatgttagctcagtaagagatttg

SEQ ID NO: 428896 - DNA, 4691 bp, Homo sapiens
tggttttcattaattgcactttattcattttcgttatccttgtaaataaaagaactttcgaaaagtgtgattaacattaagaatttttagaagattcagttttccaaagtagttggctttaaaaataccagactctaacctttaaaatttgtgtgcaaatgaaagttttgtagttatggtttggggtgtgtgtagcttatgttttcccattaaattgttcccagatattcccttaaatatcagagataaataaaaatgactactaatataagccagtaatttcatttttagttaagacccatttaaaatgtgtttatttattttgtctgttttctgtttgttttgggtagtcagggaagaaaataagcagcaacccaaatcctgttgtccagatgtcagttgggcacaaggcccaggagagcaagattcgatacaaaaccaatgaacctgtgtgggaggaaaacttcactttcttcattcacaatcccaagcgccaggaccttgaagttgaggtcagagacgagcagcaccagtgttccctggggaacctgaaggtccccctcagccagctgctcaccagtgaggacatgactgtgagccagcgcttccagctcagtaactcgggtccaaacagcaccatcaagatgaagattgccctgcgggtgctccatctcgaaaagcgagaaaggcctccagaccaccaacactcagctcaagtcaaacgtccctctgtgtccaaagaggggaggaaaacatccatcaaatctcatatgtctgggtctccaggccctggtggcagcaacacagctccatccacaccagtcattgggggcagtgataagcctggtatggaagaaaaggcccagccccctgaggccggccctcaggggctgcacgacctgggcagaagctcctccagcctcctggcctccccaggccacatctcagtcaaggagccgacccccagcatcgcctcggacatctcgctgcccatcgccacccaggagctgcggcaaaggctgaggcagctggaaaacgggacgaccctgggacagtctccactggggcagatccagctgaccatccggcacagctcgcagagaaacaagcttatcgtggtcgtgcatgcctgcagaaacctcattgccttctctgaagacggctctgacccctatgtccgcatgtatttattaccagacaagaggcggtcaggaaggaggaaaacacacgtgtcaaagaaaacattaaatccagtgtttgatcaaagctttgatttcagtgtttcgttaccagaagtgcagaggagaacgctcgacgttgccgtgaagaacagtggcggcttcctgtccaaagacaaagggctccttggcaaagtattggttgctctggcatctgaagaacttgccaaaggctggacccagtggtatgacctcacggaagatgggacgaggcctcaggcgatgacatagccgcagcaggcaggaggcgtcctcttcagcgtagctctccacctctacccggaacacaccctctcacagacgtaccaatgttatttttataatttcatggatttagttatacataccttaatagttttataaaattgttgacatttcaggcaaatttggccaatattatcattgaattttctgtgttggatttcctctaggatttcgccagttcctacaacgtgcagtagggcggcggtagctcttgtgtctgtggactctgctcagctgtgtccgtaggagtcggatgtgtctgtgctttattatggccttgtttatatatcactgaggtatactatgccatgtaaatagactattttttataatctttacatgctggtttaaattcagaaggaaatagatcaaggaaatatatatattttcttctaaaacttattaaattcgtgtgacaaataatcattttcatcttggcagcaaaaagttctcagtgacctattttgtggtgtttctttttgaaaagaaaagctgaaatattattaaatgctagtatgtttctgcccattatgaaagatgaaataaagtattcaaaatattaacattttcataaatataaggatgtattattgagaagtaagttgaagggcttataaggaaaaatgttttataactgagtaatatattaagagaattgtcatggttcataaatcacattatgctaatctgaaatttcttacataaaaatgaagtgtcttatgtttattttaattgctgttgtaacttactcatgaaacagtatacagacaccttgtacttttcctcaactgtaagagcagactttcaatgttagcaattaagctgttgtcaaacaatcagtcatgagctttgttaattttcaatgttttcccagcctataaaaaaaggaaggtacacgttgtccttttaaaggttgtgaggtagattggagtgagtagacaggatattgcattaaaaattgaaagctcgatctcattattgtcaggaacccccagtgtgacctcacacataggatgtgggacctttgagccgatgtgcactggccaccaccagggttgggggcgccacagctgcgagcccggcccctgctgttctcagcagccacttcccaggctgcctcactttatgccatgactgaccttaatattgggatattgttatgcaatttttatcctgtttagactgttaaaagcaggtttctgtacttaagagtcccccagacctcctgtgaggtgaggctctgttgcagtgtcgtaggctgtgtgtgtctgtaaagaaagaatgcacatatgtagacgattaagtgtatattataagctatatgctgaaaatggcttccatagccatgagaacatcttaaaactatgtgtaaatatattaaggaaagtatagctttgtaatttaaattggagcttttagcttgtttcatggaactatacaacttgtgggtaactcacatgaccaaacaaaccaaagtgcctgtgacggggcgggtggcgtctacccaccctcccttctagcagattcttattttgtttgaatttataaacaaggctggtggctgtctacccaccctcccttctagcagattttgattttgtttcaatttataacttacactttgaaccatgggtttacttataatggagtctgtagcttcacagcatatttcatgtaatcataaagaccagtatattccctcctgctgaatgacatgcgactgtaaagcctctttataaaccatttccaatgttagtatataggattatttgggaagcgtatcaatacctttatagacaaatacgaacatgtatgcacacaaaacatttaactatggtatttatggaagacaggtaacaacattaaatctagttgctttcccttagtattagatttgttgagggttttttaaaaatcaggtctgttgaaagtcttctgtcataatctataaagcagcagcactcatggaaattgtagcatgccagtaatttttaccaacatcccatacatctgagttctgcagtccagtgtgtaatccgctccatgtgtattttgcttaatggaatgctttatttaagcacttaggcagagtagacacaattaaaggtacaaagcccagaggaagtggtagagcagcaccgtgcctgccctgaggcagtggagtcagtagcgctgtccccagggccttgagtgcctggaggtgcttggcctccagtagctgcctccattctcttttaaaaaaagggggtgattctgaggcactgaagtgcctcccagatgtggaggagtgaagccaccatcgaggccacactcagcactccaggatcccagcgatgtcagacactcttgagttgtcaaaacgttaattttcagttttaaataatcagtttatctaagaaaagggaattttaacttttctaccttgagccaagccaatgaagggaaaattaattaacttagtaaatttgaagtgcagctctgttagctcgtacatgtgggttcttatcctgatcctgtgccttaaagtaggaaggtgtttccaagttcagattaaaatagaagcagctggccgggtgcggtggctcacgcctgtaatcccagcactttgggaggccgaggcgggcggatgacctgaggtcaggagttcaagaccagcctggccaacatggagaaaccccatctttactaaaaatacaaaaattagccgggcgtggtggtggagcgcacgcctgtagtcccagctactcgggaggctgaggcaggagaattgcttgaacccaggaggcggaggttgcagtgagccaagatcgcaccactgcactccagcctgggcaacagagtgagactccgtctcaaaaaataaataaaatagaagcagccttgtaactgtatttaccatgataatatattctgcacggtaagaattccttttacagacattctttatcaagaggtcggcccttctttttcaggcacataagccaaatgcaggcctgtgtgtagctgtgtgttttttctgtggttgccgcatttattccacctccagctggaccccccactgcaaatagagaacagcggtgggggatgggggttaaaaagtagagaacctcctttctgttcaactaatttcacgtgacagtgcatgtatttattcaataaaacctttatgttagctcagtaagagatttg

SEQ ID NO: 428897 - DNA, 3782 bp, Homo sapiens
aaacctaggcagtgaggcgggtttaatcggacgaggcagtcaaggagccgacccccagcatcgcctcggacatctcgctgcccatcgccacccaggagctgcggcaaaggctgaggcagctggaaaacgggacgaccctgggacagtctccactggggcagatccagctgaccatccggcacagctcgcagagaaacaagcttatcgtggtcgtgcatgcctgcagaaacctcattgccttctctgaagacggctctgacccctatgtccgcatgtatttattaccagacaagaggcggtcaggaaggaggaaaacacacgtgtcaaagaaaacattaaatccagtgtttgatcaaagctttgatttcagtgtttcgttaccagaagtgcagaggagaacgctcgacgttgccgtgaagaacagtggcggcttcctgtccaaagacaaagggctccttggcaaagtattggttgctctggcatctgaagaacttgccaaaggctggacccagtggtatgacctcacggaagatgggacgaggcctcaggcgatgacatagccgcagcaggcaggaggcgtcctcttcagcgtagctctccacctctacccggaacacaccctctcacagacgtaccaatgttatttttataatttcatggatttagttatacataccttaatagttttataaaattgttgacatttcaggcaaatttggccaatattatcattgaattttctgtgttggatttcctctaggatttcgccagttcctacaacgtgcagtagggcggcggtagctcttgtgtctgtggactctgctcagctgtgtccgtaggagtcggatgtgtctgtgctttattatggccttgtttatatatcactgaggtatactatgccatgtaaatagactattttttataatctttacatgctggtttaaattcagaaggaaatagatcaaggaaatatatatattttcttctaaaacttattaaattcgtgtgacaaataatcattttcatcttggcagcaaaaagttctcagtgacctattttgtggtgtttctttttgaaaagaaaagctgaaatattattaaatgctagtatgtttctgcccattatgaaagatgaaataaagtattcaaaatattaacattttcataaatataaggatgtattattgagaagtaagttgaagggcttataaggaaaaatgttttataactgagtaatatattaagagaattgtcatggttcataaatcacattatgctaatctgaaatttcttacataaaaatgaagtgtcttatgtttattttaattgctgttgtaacttactcatgaaacagtatacagacaccttgtacttttcctcaactgtaagagcagactttcaatgttagcaattaagctgttgtcaaacaatcagtcatgagctttgttaattttcaatgttttcccagcctataaaaaaaggaaggtacacgttgtccttttaaaggttgtgaggtagattggagtgagtagacaggatattgcattaaaaattgaaagctcgatctcattattgtcaggaacccccagtgtgacctcacacataggatgtgggacctttgagccgatgtgcactggccaccaccagggttgggggcgccacagctgcgagcccggcccctgctgttctcagcagccacttcccaggctgcctcactttatgccatgactgaccttaatattgggatattgttatgcaatttttatcctgtttagactgttaaaagcaggtttctgtacttaagagtcccccagacctcctgtgaggtgaggctctgttgcagtgtcgtaggctgtgtgtgtctgtaaagaaagaatgcacatatgtagacgattaagtgtatattataagctatatgctgaaaatggcttccatagccatgagaacatcttaaaactatgtgtaaatatattaaggaaagtatagctttgtaatttaaattggagcttttagcttgtttcatggaactatacaacttgtgggtaactcacatgaccaaacaaaccaaagtgcctgtgacggggcgggtggcgtctacccaccctcccttctagcagattcttattttgtttgaatttataaacaaggctggtggctgtctacccaccctcccttctagcagattttgattttgtttcaatttataacttacactttgaaccatgggtttacttataatggagtctgtagcttcacagcatatttcatgtaatcataaagaccagtatattccctcctgctgaatgacatgcgactgtaaagcctctttataaaccatttccaatgttagtatataggattatttgggaagcgtatcaatacctttatagacaaatacgaacatgtatgcacacaaaacatttaactatggtatttatggaagacaggtaacaacattaaatctagttgctttcccttagtattagatttgttgagggttttttaaaaatcaggtctgttgaaagtcttctgtcataatctataaagcagcagcactcatggaaattgtagcatgccagtaatttttaccaacatcccatacatctgagttctgcagtccagtgtgtaatccgctccatgtgtattttgcttaatggaatgctttatttaagcacttaggcagagtagacacaattaaaggtacaaagcccagaggaagtggtagagcagcaccgtgcctgccctgaggcagtggagtcagtagcgctgtccccagggccttgagtgcctggaggtgcttggcctccagtagctgcctccattctcttttaaaaaaagggggtgattctgaggcactgaagtgcctcccagatgtggaggagtgaagccaccatcgaggccacactcagcactccaggatcccagcgatgtcagacactcttgagttgtcaaaacgttaattttcagttttaaataatcagtttatctaagaaaagggaattttaacttttctaccttgagccaagccaatgaagggaaaattaattaacttagtaaatttgaagtgcagctctgttagctcgtacatgtgggttcttatcctgatcctgtgccttaaagtaggaaggtgtttccaagttcagattaaaatagaagcagctggccgggtgcggtggctcacgcctgtaatcccagcactttgggaggccgaggcgggcggatgacctgaggtcaggagttcaagaccagcctggccaacatggagaaaccccatctttactaaaaatacaaaaattagccgggcgtggtggtggagcgcacgcctgtagtcccagctactcgggaggctgaggcaggagaattgcttgaacccaggaggcggaggttgcagtgagccaagatcgcaccactgcactccagcctgggcaacagagtgagactccgtctcaaaaaataaataaaatagaagcagccttgtaactgtatttaccatgataatatattctgcacggtaagaattccttttacagacattctttatcaagaggtcggcccttctttttcaggcacataagccaaatgcaggcctgtgtgtagctgtgtgttttttctgtggttgccgcatttattccacctccagctggaccccccactgcaaatagagaacagcggtgggggatgggggttaaaaagtagagaacctcctttctgttcaactaatttcacgtgacagtgcatgtatttattcaataaaacctttatgttagctcagtaagagatttg

SEQ ID NO: 428898 - DNA, 3552 bp, Homo sapiens
acattacgagagagggaaactggtctaaaatactgtagcattataaattcaacaacagacaagaggcggtcaggaaggaggaaaacacacgtgtcaaagaaaacattaaatccagtgtttgatcaaagctttgatttcagtgtttcgttaccagaagtgcagaggagaacgctcgacgttgccgtgaagaacagtggcggcttcctgtccaaagacaaagggctccttggcaaagtattggttgctctggcatctgaagaacttgccaaaggctggacccagtggtatgacctcacggaagatgggacgaggcctcaggcgatgacatagccgcagcaggcaggaggcgtcctcttcagcgtagctctccacctctacccggaacacaccctctcacagacgtaccaatgttatttttataatttcatggatttagttatacataccttaatagttttataaaattgttgacatttcaggcaaatttggccaatattatcattgaattttctgtgttggatttcctctaggatttcgccagttcctacaacgtgcagtagggcggcggtagctcttgtgtctgtggactctgctcagctgtgtccgtaggagtcggatgtgtctgtgctttattatggccttgtttatatatcactgaggtatactatgccatgtaaatagactattttttataatctttacatgctggtttaaattcagaaggaaatagatcaaggaaatatatatattttcttctaaaacttattaaattcgtgtgacaaataatcattttcatcttggcagcaaaaagttctcagtgacctattttgtggtgtttctttttgaaaagaaaagctgaaatattattaaatgctagtatgtttctgcccattatgaaagatgaaataaagtattcaaaatattaacattttcataaatataaggatgtattattgagaagtaagttgaagggcttataaggaaaaatgttttataactgagtaatatattaagagaattgtcatggttcataaatcacattatgctaatctgaaatttcttacataaaaatgaagtgtcttatgtttattttaattgctgttgtaacttactcatgaaacagtatacagacaccttgtacttttcctcaactgtaagagcagactttcaatgttagcaattaagctgttgtcaaacaatcagtcatgagctttgttaattttcaatgttttcccagcctataaaaaaaggaaggtacacgttgtccttttaaaggttgtgaggtagattggagtgagtagacaggatattgcattaaaaattgaaagctcgatctcattattgtcaggaacccccagtgtgacctcacacataggatgtgggacctttgagccgatgtgcactggccaccaccagggttgggggcgccacagctgcgagcccggcccctgctgttctcagcagccacttcccaggctgcctcactttatgccatgactgaccttaatattgggatattgttatgcaatttttatcctgtttagactgttaaaagcaggtttctgtacttaagagtcccccagacctcctgtgaggtgaggctctgttgcagtgtcgtaggctgtgtgtgtctgtaaagaaagaatgcacatatgtagacgattaagtgtatattataagctatatgctgaaaatggcttccatagccatgagaacatcttaaaactatgtgtaaatatattaaggaaagtatagctttgtaatttaaattggagcttttagcttgtttcatggaactatacaacttgtgggtaactcacatgaccaaacaaaccaaagtgcctgtgacggggcgggtggcgtctacccaccctcccttctagcagattcttattttgtttgaatttataaacaaggctggtggctgtctacccaccctcccttctagcagattttgattttgtttcaatttataacttacactttgaaccatgggtttacttataatggagtctgtagcttcacagcatatttcatgtaatcataaagaccagtatattccctcctgctgaatgacatgcgactgtaaagcctctttataaaccatttccaatgttagtatataggattatttgggaagcgtatcaatacctttatagacaaatacgaacatgtatgcacacaaaacatttaactatggtatttatggaagacaggtaacaacattaaatctagttgctttcccttagtattagatttgttgagggttttttaaaaatcaggtctgttgaaagtcttctgtcataatctataaagcagcagcactcatggaaattgtagcatgccagtaatttttaccaacatcccatacatctgagttctgcagtccagtgtgtaatccgctccatgtgtattttgcttaatggaatgctttatttaagcacttaggcagagtagacacaattaaaggtacaaagcccagaggaagtggtagagcagcaccgtgcctgccctgaggcagtggagtcagtagcgctgtccccagggccttgagtgcctggaggtgcttggcctccagtagctgcctccattctcttttaaaaaaagggggtgattctgaggcactgaagtgcctcccagatgtggaggagtgaagccaccatcgaggccacactcagcactccaggatcccagcgatgtcagacactcttgagttgtcaaaacgttaattttcagttttaaataatcagtttatctaagaaaagggaattttaacttttctaccttgagccaagccaatgaagggaaaattaattaacttagtaaatttgaagtgcagctctgttagctcgtacatgtgggttcttatcctgatcctgtgccttaaagtaggaaggtgtttccaagttcagattaaaatagaagcagctggccgggtgcggtggctcacgcctgtaatcccagcactttgggaggccgaggcgggcggatgacctgaggtcaggagttcaagaccagcctggccaacatggagaaaccccatctttactaaaaatacaaaaattagccgggcgtggtggtggagcgcacgcctgtagtcccagctactcgggaggctgaggcaggagaattgcttgaacccaggaggcggaggttgcagtgagccaagatcgcaccactgcactccagcctgggcaacagagtgagactccgtctcaaaaaataaataaaatagaagcagccttgtaactgtatttaccatgataatatattctgcacggtaagaattccttttacagacattctttatcaagaggtcggcccttctttttcaggcacataagccaaatgcaggcctgtgtgtagctgtgtgttttttctgtggttgccgcatttattccacctccagctggaccccccactgcaaatagagaacagcggtgggggatgggggttaaaaagtagagaacctcctttctgttcaactaatttcacgtgacagtgcatgtatttattcaataaaacctttatgttagctcagtaagagatttg

SEQ ID NO: 428899 - DNA, 3964 bp, Homo sapiens
ggtatttagtttttatttcataatcataaacttaactctgcaatccagctaggcatgggagggaacaaggaaaacatggaacccaaagggaactgcagcgagagcacaaagattctaggatactgcgagcaaatggggtggaggggtgctctcctgagctacagaaggaatgatctggtggttaagataaaacacaagtcaaacttattcgagttgtccacagtcagcaatggtgatcttcttgctggtcttgccattcctggacccaaagcgctccatggcctccacaatattcatgccttctttcactttgccaaacaccacatgcttgccatccaaccactcagtcttggcagtgcagatgaaaaactgggaaccatttgtgttgggtccagcatttgccatggacaagatgccaggacccgtatgctttaggatgaagttctcatcttcaaatttctccccatagatggacttgccaccagtgccattatggcgtgtgaagtcaccaccctgacacataaaccctggaataattctgtgaaagcgcgagcacccagcccgcctcggccgggagggcagcgcggcactgcggggcgatgagcggcgcccggggcgagggcccggaggcgggcgccggcggggctgggggccgcgcggcgcctgagaaccccgggggcgtgctgagcgtggagctgcccgggctgctggcgcagctggcgcggagcttcgcgctgctgctgcccgtgtacgcgctgggctacctggggctcagcttcagctgggttctcctcgcgctcgcgctgctcgcctggtgtcgccgcagccgcggcctcaaggccctgcgcctgtgccgcgcgctggcgctgctggaagacgaggagcgcgtcgtgcgcctgggggtgcgcgcctgcgacctgcccgcctgggttcattttccagacactgaaagagcagaatggctaaataagactgtaaaacacatgtggcctttcatttgccaatttatagagaagttgtttcgagaaactatagaaccagccgtgcggggagcaaacacccaccttagcacctttagtttcacgaaggtcgacgtgggccagcagcccctcaggatcaatggtgttaaggtatacactgaaaatgtagacaaaaggcaaattattttggaccttcagattagttttgtaggaaattgtgagattgatttggagatcaaacgatatttttgtagagctggtgtgaaaagtatccagattcatggtaccatgcgggtgatcctggaaccgttgattggagatatgcccttagttggagctttgtctatcttcttccttaggaaaccacttttagaaattaactggacaggactgacgaatcttctggatgtccctggattgaatggtttatcagatactatcattttggatataatatcaaactatctggtgcttcccaatcgaatcaccgttccacttgtcagtgaagttcaaatagctcagttgcggtttcctgtaccaaagggtgttctaaggatacattttattgaagctcaggatcttcaggggaaagacacttaccttaagggacttgtcaagggaaagtcagacccctatggaatcattagagttggcaaccaaatcttccaaagcagagtcatcaaggagaacctcagtccaaagtggaatgaagtctatgaggctttagtgtatgaacatcctggacaagaattagagattgagctctttgatgaagacccagacaaggatgactttttaggaagtcttatgattgacctcattgaagttgaaaaggagcgccttttagatgaatggttcactctggacgaggttcccaaggggaagctacacttgagactggagtggctcacgttaatgccaaatgcgtcaaacctcgacaaggtgctaacagacatcaaagctgacaaagaccaagccaacgatggtctttcctctgcattgctgatcttgtacttggattcagcaaggaaccttccgagtaacccattagaatttaaccccgatgtcttgaagaagactgcagttcagagagctttaaagtcagggaagaaaataagcagcaacccaaatcctgttgtccagatgtcagttgggcacaaggcccaggagagcaagattcgatacaaaaccaatgaacctgtgtgggaggaaaacttcactttcttcattcacaatcccaagcgccaggaccttgaagttgaggtcagagacgagcagcaccagtgttccctggggaacctgaaggtccccctcagccagctgctcaccagtgaggacatgactgtgagccagcgcttccagctcagtaactcgggtccaaacagcaccatcaagatgaagattgccctgcgggtgctccatctcgaaaagcgagaaaggcctccagaccaccaacactcagctcaagtcaaacgtccctctgtgtccaaagaggggaggaaaacatccatcaaatctcatatgtctgggtctccaggccctggtggcagcaacacagctccatccacaccagtcattgggggcagtgataagcctggtatggaagaaaaggcccagccccctgaggccggccctcaggggctgcacgacctgggcagaagctcctccagcctcctggcctccccaggccacatctcagtcaaggagccgacccccagcatcgcctcggacatctcgctgcccatcgccacccaggagctgcggcaaaggctgaggcagctggaaaacgggacgaccctgggacagtctccactggggcagatccagctgaccatccggcacagctcgcagagaaacaagcttatcgtggtcgtgcatgcctgcagaaacctcattgccttctctgaagacggctctgacccctatgtccgcatgtatttattaccagacaagaggcggtcaggaaggaggaaaacacacgtgtcaaagaaaacattaaatccagtgtttgatcaaagctttgatttcagtgtttcgttaccagaagtgcagaggagaacgctcgacgttgccgtgaagaacagtggcggcttcctgtccaaagacaaagggctccttggcaaagtattggttgctctggcatctgaagaacttgccaaaggctggacccagtggtatgacctcacggaagatgggacgaggcctcaggcgatgacatagccgcagcaggcaggaggcgtcctcttcagcgtagctctccacctctacccggaacacaccctctcacagacgtaccaatgttatttttataatttcatggatttagttatacataccttaatagttttataaaattgttgacatttcaggcaaatttggccaatattatcattgaattttctgtgttggatttcctctaggatttcgccagttcctacaacgtgcagtagggcggcggtagctcttgtgtctgtggactctgctcagctgtgtccgtaggagtcggatgtgtctgtgctttattatggccttgtttatatatcactgaggtatactatgccatgtaaatagactattttttataatctttacatgctggtttaaattcagaaggaaatagatcaaggaaatatatatattttcttctaaaacttattaaattcgtgtgacaaataatcattttcatcttggcagcaaaaagttctcagtgacctattttgtggtgtttctttttgaaaagaaaagctgaaatattattaaatgctagtatgtttctgcccattatgaaagatgaaataaagtattcaaaatattaacattttcataaatataaggatgtattattgagaagtaagttgaagggcttataaggaaaaatgttttataactgagtaatatattaagagaattgtcatggttcataaatcacattatgctaatctgaaatttcttacataaaaatgaagtgtcttatgtttatttta

SEQ ID NO: 428900 - DNA, 3894 bp, Homo sapiens
ggtatttagtttttatttcataatcataaacttaactctgcaatccagctaggcatgggagggaacaaggaaaacatggaacccaaagggaactgcagcgagagcacaaagattctaggatactgcgagcaaatggggtggaggggtgctctcctgagctacagaaggaatgatctggtggttaagataaaacacaagtcaaacttattcgagttgtccacagtcagcaatggtgatcttcttgctggtcttgccattcctggacccaaagcgctccatggcctccacaatattcatgccttctttcactttgccaaacaccacatgcttgccatccaaccactcagtcttggcagtgcagatgaaaaactgggaaccatttgtgttgggtccagcatttgccatggacaagatgccaggacccgtatgctttaggatgaagttctcatcttcaaatttctccccatagatggacttgccaccagtgccattatggcgtgtgaagtcaccaccctgacacataaaccctggaataattctgtgaaagcgcgagcacccagcccgcctcggccgggagggcagcgcggcactgcggggcgatgagcggcgcccggggcgagggcccggaggcgggcgccggcggggctgggggccgcgcggcgcctgagaaccccgggggcgtgctgagcgtggagctgcccgggctgctggcgcagctggcgcggagcttcgcgctgctgctgcccgtgtacgcgctgggctacctggggctcagcttcagctgggttctcctcgcgctcgcgctgctcgcctggtgtcgccgcagccgcggcctcaaggccctgcgcctgtgccgcgcgctggcgctgctggaagacgaggagcgcgtcgtgcgcctgggggtgcgcgcctgcgacctgcccgcctgggttcattttccagacactgaaagagcagaatggctaaataagactgtaaaacacatgtggcctttcatttgccaatttatagagaagttgtttcgagaaactatagaaccagccgtgcggggagcaaacacccaccttagcacctttagtttcacgaaggtcgacgtgggccagcagcccctcaggatcaatggtgttaaggtatacactgaaaatgtagacaaaaggcaaattattttggaccttcagattagttttgtaggaaattgtgagattgatttggagatcaaacgatatttttgtagagctggtgtgaaaagtatccagattcatggtaccatgcgggtgatcctggaaccgttgattggagatatgcccttagttggagctttgtctatcttcttccttaggaaaccacttttagaaattaactggacaggactgacgaatcttctggatgtccctggattgaatggtttatcagatactatcattttggatataatatcaaactatctggtgcttcccaatcgaatcaccgttccacttgtcagtgaagttcaaatagctcagttgcggtttcctgtaccaaagggtgttctaaggatacattttattgaagctcaggatcttcaggggaaagacacttaccttaagggacttgtcaagggaaagtcagacccctatggaatcattagagttggcaaccaaatcttccaaagcagagtcatcaaggagaacctcagtccaaagtggaatgaagtctatgaggctttagtgtatgaacatcctggacaagaattagagattgagctctttgatgaagacccagacaaggatgactttttaggaagtcttatgattgacctcattgaagttgaaaaggagcgccttttagatgaatggttcactctggacgaggttcccaaggggaagctacacttgagactggagtggctcacgttaatgccaaatgcgtcaaacctcgacaaggtgctaacagacatcaaagctgacaaagaccaagccaacgatggtctttcctctgcattgctgatcttgtacttggattcagcaaggaaccttccgagtaacccattagaatttaaccccgatgtcttgaagaagactgcagttcagagagctttaaagtcagggaagaaaataagcagcaacccaaatcctgttgtccagatgtcagttgggcacaaggcccaggagagcaagattcgatacaaaaccaatgaacctgtgtgggaggaaaacttcactttcttcattcacaatcccaagcgccaggaccttgaagttgaggtcagagacgagcagcaccagtgttccctggggaacctgaaggtccccctcagccagctgctcaccagtgaggacatgactgtgagccagcgcttccagctcagtaactcgggtccaaacagcaccatcaagatgaagattgccctgcgggtgctccatctcgaaaagcgagaaaggcctccagaccaccaacactcagctcaagtcaaacgtccctctgtgtccaaagaggggaggaaaacatccatcaaatctcatatgtctgggtctccaggccctggtggcagcaacacagctccatccacaccagtcattgggggcagtgataagcctggtatggaagaaaaggcccagccccctgaggccggccctcaggggctgcacgacctgggcagaagctcctccagcctcctggcctccccaggccacatctcagtcaaggagccgacccccagcatcgcctcggacatctcgctgcccatcgccacccaggagctgcggcaaaggctgaggcagctggaaaacgggacgaccctgggacagtctccactggggcagatccagctgaccatccggcacagctcgcagagaaacaagcttatcgtggtcgtgcatgcctgcagaaacctcattgccttctctgaagacggctctgacccctatgtccgcatgtatttattaccagacaagaggcggtcaggaaggaggaaaacacacgtgtcaaagaaaacattaaatccagtgtttgatcaaagctttgatttcagtgtttcgttaccagaagtgcagaggagaacgctcgacgttgccgtgaagaacagtggcggcttcctgtccaaagacaaagggctccttggcaaagtattggttgctctggcatctgaagaacttgccaaaggctggacccagtggtatgacctcacggaagatgggacgaggcctcaggcgatgacatagccgcagcaggcaggaggcgtcctcttcagcgtagctctccacctctacccggaacacaccctctcacagacgtaccaatgttatttttataatttcatggatttagttatacataccttaatagttttataaaattgttgacatttcaggcaaatttggccaatattatcattgaattttctgtgttggatttcctctaggatttcgccagttcctacaacgtgcagtagggcggcggtagctcttgtgtctgtggactctgctcagctgtgtccgtaggagtcggatgtgtctgtgctttattatggccttgtttatatatcactgaggtatactatgccatgtaaatagactattttttataatctttacatgctggtttaaattcagaaggaaatagatcaaggaaatatatatattttcttctaaaacttattaaattcgtgtgacaaataatcattttcatcttggcagcaaaaagttctcagtgacctattttgtggtgtttctttttgaaaagaaaagctgaaatattattaaatgctagtatgtttctgcccattatgaaagatgaaataaagtattcaaaatattaacattttcataaaaaaattgtaaaaaaactccggggcgcctatggcgggggggggaaaaaggggtttgaaatggcccttggccaaggggtttccggacc

SEQ ID NO: 428901 - DNA, 461 bp, Homo sapiens
cactcatacaggtaccacttctttttcttttttttgagatagagtcttgctctgtcaacagagttgcagtgagccaagatcgcaccactgcactccagcctgggcaacagagtgagactccgtctcaaaaaataaataaaatagaagcagccttgtaactgtatttaccatgataatatattctgcacggtaagaattccttttacagacattctttatcaagaggtcggcccttctttttcaggcacataagccaaatgcaggcctgtgtgtagctgtgtgttttttctgtggttgccgcatttattccacctccagctggaccccccactgcaaatagagaacagcggtgggggatgggggttaaaaagtagagaacctcctttctgttcaactaatttcacgtgacagtgcatgtatttattcaataaaacctttatgttagctcagtaagagatttg

SEQ ID NO: 428902 - DNA, 1748 bp, Homo sapiens
accgtcccgggcggaggcgggcgtgcggcggagccgcgtcccctcagaggggcgctggcgcggggctgagccgcccgggatcagcgcgagcacccagcccgcctcggccgggagggcagcgcggcactgcggggcgatgagcggcgcccggggcgagggcccggaggcgggcgccggcggggctgggggccgcgcggcgcctgagaaccccgggggcgtgctgagcgtggagctgcccgggctgctggcgcagctggcgcggagcttcgcgctgctgctgcccgtgtacgcgctgggctacctggggctcagcttcagctgggttctcctcgcgctcgcgctgctcgcctggtgtcgccgcagccgcggcctcaaggccctgcgcctgtgccgcgcgctggcgctgctggaagacgaggagcgcgtcgtgcgcctgggggtgcgcgcctgcgacctgcccgcctgggttcattttccagacactgaaagagcagaatggctaaataagactgtaaaacacatgtggcctttcatttgccaatttatagagaagttgtttcgagaaactatagaaccagccgtgcggggagcaaacacccaccttagcacctttagtttcacgaaggtcgacgtgggccagcagcccctcaggatcaatggtgttaaggtatacactgaaaatgtagacaaaaggcaaattattttggaccttcagattagttttgtaggaaattgtgagattgatttggagatcaaacgatatttttgtagagctggtgtgaaaagtatccagattcatggtaccatgcgggtgatcctggaaccgttgattggagatatgcccttagttggagctttgtctatcttcttccttaggaaaccacttttagaaattaactggacaggactgacgaatcttctggatgtccctggattgaatggtttatcagatactatcattttggatataatatcaaactatctggtgcttcccaatcgaatcaccgttccacttgtcagtgaagttcaaatagctcagttgcggtttcctgtaccaaagggtgttctaaggatacattttattgaagctcaggatcttcaggggaaagacacttaccttaagggacttgtcaagggaaagtcagacccctatggaatcattagagttggcaaccaaatcttccaaagcagagtcatcaaggagaacctcagtccaaagtggaatgaagtctatgaggctttagtgtatgaacatcctggacaagaattagagattgagctctttgatgaagacccagacaaggatgactttttaggaagtcttatgattgacctcattgaagttgaaaaggagcgccttttagatgaatggttcactctggacgaggttcccaaggggaagctacacttgagactggagtggctcacgttaatgccaaatgcgtcaaacctcgacaaggtgctaacagacatcaaagctgacaaagaccaagccaacgatggtctttcctctgcattgctgatcttgtacttggattcagcaaggaaccttccgagtaacccattagaatttaaccccgatgtcttgaagaagactgcagttcagagagctttaaagtcagggaagaaaataagcagcaacccaaatcctgttgtccagatgtcagttgggcacaaggcccaggagagcaagattcgatacaaaaccaatgaacccgtggggtaggaggtggggatactctagagcg

SEQ ID NO: 428903 - DNA, 1125 bp, Homo sapiens
accgtcccgggcggaggcgggcgtgcggcggagccgcgtcccctcagaggggcgctggcgcggggctgagccgcccgggatcagcgcgagcacccagcccgcctcggccgggagggcagcgcggcactgcggggcgatgagcggcgcccggggcgagggcccggaggcgggcgccggcggggctgggggccgcgcggcgcctgagaaccccgggggcgtgctgagcgtggagctgcccgggctgctggcgcagctggcgcggagcttcgcgctgctgctgcccgtgtacgcgctgggctacctggggctcagcttcagctgggttctcctcgcgctcgcgctgctcgcctggtgtcgccgcagccgcggcctcaaggccctgcgcctgtgccgcgcgctggcgctgctggaagacgaggagcgcgtcgtgcgcctgggggtgcgcgcctgcgacctgcccgcctgggttcattttccagacactgaaagagcagaatggctaaataagactgtaaaacacatgtggcctttcatttgccaatttatagagaagttgtttcgagaaactatagaaccagccgtgcggggagcaaacacccaccttagcacctttagtttcacgaaggtcgacgtgggccagcagcccctcaggatcaatggtgttaaggtatacactgaaaatgtagacaaaaggcaaattattttggaccttcagattagttttgtaggaaattgtgagattgatttggagatcaaacgatatttttgtagagctggtgtgaaaagtatccagattcatggtaccatgcgggtgatcctggaaccgttgattggagatatgcccttagttggagctttgtctatcttcttccttaggaaaccagtaagtcaatatttatttcatttttattttcccatttggtggcaaaaatacatacccgtggaagaatatataaagtggagaaacaaaattttatcaactcaccgttgtccctttctgttgtgtgaatcctgtgggagttttttgtatttctttgtgccttaactgagagcttatctcttgataaacagctctctttcctgattataaaaatgttacaaaaatttggaaacatggacttcttc

SEQ ID NO: 428904 - DNA, 361 bp, Homo sapiens
caccaagttgaaaccacaggacttctagaaatctttaaatgtgctgacatatttaaccagaataactagttcctgcaacatattggttaatcagtagttggtttttctaataactttttagaatttagatcacgttgattttgcataacaacaagatcctcccgccctttattttcaaaaccaggtttggtctgttgcgagggtttctcacgagcactcgtgtgtgtcatgcattatatagcattttgtttaaactgagttctttttcctttccagactgtaaaacacatgtggcctttcatttgccaatttatagagaagttgtttcgagaaactatagaaccagccgtgcggggagcaa

SEQ ID NO: 428905 - DNA, 382 bp, Homo sapiens
ttggggcctcatgacaaactctaaaggctttagaccgtctcgttatcttttcaacacatccaccatcaatacataatagtgcatacctgcaaatacatgtcttggaatttaattaaggtcaacctaagcttctagttttttgttttatttattttctttttatttttcattctaagcttctaaacacataaaatgagtagcccttttccacagaaaatatcagagctaataatttggatatttcttctagattcgatacaaaaccaatgaacctgtgtgggaggaaaacttcactttcttcattcacaatcccaagcgccaggaccttgaagttgaggtattttatttgcattttttaaccaatttattgacaaataattga

SEQ ID NO: 428906 - DNA, 669 bp, Homo sapiens
ggttgagcctgactctgtgctgtggttgtgaggctggaatgcggagaggccagtgaacacactggacatgggcgggcagggaggcatgtcctcgggtcagccgtctgagtcacaggcccagagatgcccagctgtgaccagtgctccgcttgcaggttcattttccagacactgaaagagcagaatggctaaataagactgtaaaacacatgtggcctttcatttgccaatttatagagaagttgtttcgagaaactatagaaccagccgtgcggggagcaaacacccaccttagcacctttagtttcacgaaggtcgacgtgggccagcagcccctcaggatcaatggtgttaaggtatacactgaaaatgtagacaaaaggcaaattattttggaccttcagattagttttgtaggaaattgtgagattgatttggagatcaaacgatatttttgtagagctggtgtgaaaagtatccagattcatggtaccatgcgggtgatcctggaaccgttgattggagatatgcccttagttggagctttgtctatcttcttccttaggaaaccacttttagaaattaactggacaggactgacgaatcttctggatgtccctggattgaatggtcttatacagatactatcactttcgggaatatacatat

SEQ ID NO: 428907 - DNA, 6422 bp, Homo sapiens
ggtatttagtttttatttcataatcataaacttaactctgcaatccagctaggcatgggagggaacaaggaaaacatggaacccaaagggaactgcagcgagagcacaaagattctaggatactgcgagcaaatggggtggaggggtgctctcctgagctacagaaggaatgatctggtggttaagataaaacacaagtcaaacttattcgagttgtccacagtcagcaatggtgatcttcttgctggtcttgccattcctggacccaaagcgctccatggcctccacaatattcatgccttctttcactttgccaaacaccacatgcttgccatccaaccactcagtcttggcagtgcagatgaaaaactgggaaccatttgtgttgggtccagcatttgccatggacaagatgccaggacccgtatgctttaggatgaagttctcatcttcaaatttctccccatagatggacttgccaccagtgccattatggcgtgtgaagtcaccaccctgacacataaaccctggaataattctgtgaaagcgcgagcacccagcccgcctcggccgggagggcagcgcggcactgcggggcgatgagcggcgcccggggcgagggcccggaggcgggcgccggcggggctgggggccgcgcggcgcctgagaaccccgggggcgtgctgagcgtggagctgcccgggctgctggcgcagctggcgcggagcttcgcgctgctgctgcccgtgtacgcgctgggctacctggggctcagcttcagctgggttctcctcgcgctcgcgctgctcgcctggtgtcgccgcagccgcggcctcaaggccctgcgcctgtgccgcgcgctggcgctgctggaagacgaggagcgcgtcgtgcgcctgggggtgcgcgcctgcgacctgcccgcctgggttcattttccagacactgaaagagcagaatggctaaataagactgtaaaacacatgtggcctttcatttgccaatttatagagaagttgtttcgagaaactatagaaccagccgtgcggggagcaaacacccaccttagcacctttagtttcacgaaggtcgacgtgggccagcagcccctcaggatcaatggtgttaaggtatacactgaaaatgtagacaaaaggcaaattattttggaccttcagattagttttgtaggaaattgtgagattgatttggagatcaaacgatatttttgtagagctggtgtgaaaagtatccagattcatggtaccatgcgggtgatcctggaaccgttgattggagatatgcccttagttggagctttgtctatcttcttccttaggaaaccacttttagaaattaactggacaggactgacgaatcttctggatgtccctggattgaatggtttatcagatactatcattttggatataatatcaaactatctggtgcttcccaatcgaatcaccgttccacttgtcagtgaagttcaaatagctcagttgcggtttcctgtaccaaagggtgttctaaggatacattttattgaagctcaggatcttcaggggaaagacacttaccttaagggacttgtcaagggaaagtcagacccctatggaatcattagagttggcaaccaaatcttccaaagcagagtcatcaaggagaacctcagtccaaagtggaatgaagtctatgaggctttagtgtatgaacatcctggacaagaattagagattgagctctttgatgaagacccagacaaggatgactttttaggaagtcttatgattgacctcattgaagttgaaaaggagcgccttttagatgaatggttcactctggacgaggttcccaaggggaagctacacttgagactggagtggctcacgttaatgccaaatgcgtcaaacctcgacaaggtgctaacagacatcaaagctgacaaagaccaagccaacgatggtctttcctctgcattgctgatcttgtacttggattcagcaaggaaccttccgagtaacccattagaatttaaccccgatgtcttgaagaagactgcagttcagagagctttaaagtcagggaagaaaataagcagcaacccaaatcctgttgtccagatgtcagttgggcacaaggcccaggagagcaagattcgatacaaaaccaatgaacctgtgtgggaggaaaacttcactttcttcattcacaatcccaagcgccaggaccttgaagttgaggtcagagacgagcagcaccagtgttccctggggaacctgaaggtccccctcagccagctgctcaccagtgaggacatgactgtgagccagcgcttccagctcagtaactcgggtccaaacagcaccatcaagatgaagattgccctgcgggtgctccatctcgaaaagcgagaaaggcctccagaccaccaacactcagctcaagtcaaacgtccctctgtgtccaaagaggggaggaaaacatccatcaaatctcatatgtctgggtctccaggccctggtggcagcaacacagctccatccacaccagtcattgggggcagtgataagcctggtatggaagaaaaggcccagccccctgaggccggccctcaggggctgcacgacctgggcagaagctcctccagcctcctggcctccccaggccacatctcagtcaaggagccgacccccagcatcgcctcggacatctcgctgcccatcgccacccaggagctgcggcaaaggctgaggcagctggaaaacgggacgaccctgggacagtctccactggggcagatccagctgaccatccggcacagctcgcagagaaacaagcttatcgtggtcgtgcatgcctgcagaaacctcattgccttctctgaagacggctctgacccctatgtccgcatgtatttattaccagacaagaggcggtcaggaaggaggaaaacacacgtgtcaaagaaaacattaaatccagtgtttgatcaaagctttgatttcagtgtttcgttaccagaagtgcagaggagaacgctcgacgttgccgtgaagaacagtggcggcttcctgtccaaagacaaagggctccttggcaaagtattggttgctctggcatctgaagaacttgccaaaggctggacccagtggtatgacctcacggaagatgggacgaggcctcaggcgatgacatagccgcagcaggcaggaggcgtcctcttcagcgtagctctccacctctacccggaacacaccctctcacagacgtaccaatgttatttttataatttcatggatttagttatacataccttaatagttttataaaattgttgacatttcaggcaaatttggccaatattatcattgaattttctgtgttggatttcctctaggatttcgccagttcctacaacgtgcagtagggcggcggtagctcttgtgtctgtggactctgctcagctgtgtccgtaggagtcggatgtgtctgtgctttattatggccttgtttatatatcactgaggtatactatgccatgtaaatagactattttttataatctttacatgctggtttaaattcagaaggaaatagatcaaggaaatatatatattttcttctaaaacttattaaattcgtgtgacaaataatcattttcatcttggcagcaaaaagttctcagtgacctattttgtggtgtttctttttgaaaagaaaagctgaaatattattaaatgctagtatgtttctgcccattatgaaagatgaaataaagtattcaaaatattaacattttcataaatataaggatgtattattgagaagtaagttgaagggcttataaggaaaaatgttttataactgagtaatatattaagagaattgtcatggttcataaatcacattatgctaatctgaaatttcttacataaaaatgaagtgtcttatgtttattttaattgctgttgtaacttactcatgaaacagtatacagacaccttgtacttttcctcaactgtaagagcagactttcaatgttagcaattaagctgttgtcaaacaatcagtcatgagctttgttaattttcaatgttttcccagcctataaaaaaaggaaggtacacgttgtccttttaaaggttgtgaggtagattggagtgagtagacaggatattgcattaaaaattgaaagctcgatctcattattgtcaggaacccccagtgtgacctcacacataggatgtgggacctttgagccgatgtgcactggccaccaccagggttgggggcgccacagctgcgagcccggcccctgctgttctcagcagccacttcccaggctgcctcactttatgccatgactgaccttaatattgggatattgttatgcaatttttatcctgtttagactgttaaaagcaggtttctgtacttaagagtcccccagacctcctgtgaggtgaggctctgttgcagtgtcgtaggctgtgtgtgtctgtaaagaaagaatgcacatatgtagacgattaagtgtatattataagctatatgctgaaaatggcttccatagccatgagaacatcttaaaactatgtgtaaatatattaaggaaagtatagctttgtaatttaaattggagcttttagcttgtttcatggaactatacaacttgtgggtaactcacatgaccaaacaaaccaaagtgcctgtgacggggcgggtggcgtctacccaccctcccttctagcagattcttattttgtttgaatttataaacaaggctggtggctgtctacccaccctcccttctagcagattttgattttgtttcaatttataacttacactttgaaccatgggtttacttataatggagtctgtagcttcacagcatatttcatgtaatcataaagaccagtatattccctcctgctgaatgacatgcgactgtaaagcctctttataaaccatttccaatgttagtatataggattatttgggaagcgtatcaatacctttatagacaaatacgaacatgtatgcacacaaaacatttaactatggtatttatggaagacaggtaacaacattaaatctagttgctttcccttagtattagatttgttgagggttttttaaaaatcaggtctgttgaaagtcttctgtcataatctataaagcagcagcactcatggaaattgtagcatgccagtaatttttaccaacatcccatacatctgagttctgcagtccagtgtgtaatccgctccatgtgtattttgcttaatggaatgctttatttaagcacttaggcagagtagacacaattaaaggtacaaagcccagaggaagtggtagagcagcaccgtgcctgccctgaggcagtggagtcagtagcgctgtccccagggccttgagtgcctggaggtgcttggcctccagtagctgcctccattctcttttaaaaaaagggggtgattctgaggcactgaagtgcctcccagatgtggaggagtgaagccaccatcgaggccacactcagcactccaggatcccagcgatgtcagacactcttgagttgtcaaaacgttaattttcagttttaaataatcagtttatctaagaaaagggaattttaacttttctaccttgagccaagccaatgaagggaaaattaattaacttagtaaatttgaagtgcagctctgttagctcgtacatgtgggttcttatcctgatcctgtgccttaaagtaggaaggtgtttccaagttcagattaaaatagaagcagctggccgggtgcggtggctcacgcctgtaatcccagcactttgggaggccgaggcgggcggatgacctgaggtcaggagttcaagaccagcctggccaacatggagaaaccccatctttactaaaaatacaaaaattagccgggcgtggtggtggagcgcacgcctgtagtcccagctactcgggaggctgaggcaggagaattgcttgaacccaggaggcggaggttgcagtgagccaagatcgcaccactgcactccagcctgggcaacagagtgagactccgtctcaaaaaataaataaaatagaagcagccttgtaactgtatttaccatgataatatattctgcacggtaagaattccttttacagacattctttatcaagaggtcggcccttctttttcaggcacataagccaaatgcaggcctgtgtgtagctgtgtgttttttctgtggttgccgcatttattccacctccagctggaccccccactgcaaatagagaacagcggtgggggatgggggttaaaaagtagagaacctcctttctgttcaactaatttcacgtgacagtgcatgtatttattcaataaaacctttatgttagctcagtaagagatttg

SEQ ID NO: 428908 - DNA, 5965 bp, Homo sapiens
accgtcccgggcggaggcgggcgtgcggcggagccgcgtcccctcagaggggcgctggcgcggggctgagccgcccgggatcagcgcgagcacccagcccgcctcggccgggagggcagcgcggcactgcggggcgatgagcggcgcccggggcgagggcccggaggcgggcgccggcggggctgggggccgcgcggcgcctgagaaccccgggggcgtgctgagcgtggagctgcccgggctgctggcgcagctggcgcggagcttcgcgctgctgctgcccgtgtacgcgctgggctacctggggctcagcttcagctgggttctcctcgcgctcgcgctgctcgcctggtgtcgccgcagccgcggcctcaaggccctgcgcctgtgccgcgcgctggcgctgctggaagacgaggagcgcgtcgtgcgcctgggggtgcgcgcctgcgacctgcccgcctgggttcattttccagacactgaagagagccgaatggctacagtaaggaccactgtaaaacacatgtggcctttcatttgccaatttatagagaagttgtttcgagaaactatagaaccagccgtgcggggagcaaacacccaccttagcacctttagtttcacgaaggtcgacgtgggccagcagcccctcaggatcaatggtgttaaggtatacactgaaaatgtagacaaaaggcaaattattttggaccttcagattagttttgtaggaaattgtgagattgatttggagatcaaacgatatttttgtagagctggtgtgaaaagtatccagattcatggtaccatgcgggtgatcctggaaccgttgattggagatatgcccttagttggagctttgtctatcttcttccttaggaaaccacttttagaaattaactggacaggactgacgaatcttctggatgtccctggattgaatggtttatcagatactatcattttggatataatatcaaactatctggtgcttcccaatcgaatcaccgttccacttgtcagtgaagttcaaatagctcagttgcggtttcctgtaccaaagggtgttctaaggatacattttattgaagctcaggatcttcaggggaaagacacttaccttaagggacttgtcaagggaaagtcagacccctatggaatcattagagttggcaaccaaatcttccaaagcagagtcatcaaggagaacctcagtccaaagtggaatgaagtctatgaggctttagtgtatgaacatcctggacaagaattagagattgagctctttgatgaagacccagacaaggatgactttttaggaagtcttatgattgacctcattgaagttgaaaaggagcgccttttagatgaatggttcactctggacgaggttcccaaggggaagctacacttgagactggagtggctcacgttaatgccaaatgcgtcaaacctcgacaaggtgctaacagacatcaaagctgacaaagaccaagccaacgatggtctttcctctgcattgctgatcttgtacttggattcagcaaggaaccttccgagtaacccattagaatttaaccccgatgtcttgaagaagactgcagttcagagagctttaaagtcagggaagaaaataagcagcaacccaaatcctgttgtccagatgtcagttgggcacaaggcccaggagagcaagattcgatacaaaaccaatgaacctgtgtgggaggaaaacttcactttcttcattcacaatcccaagcgccaggaccttgaagttgaggtcagagacgagcagcaccagtgttccctggggaacctgaaggtccccctcagccagctgctcaccagtgaggacatgactgtgagccagcgcttccagctcagtaactcgggtccaaacagcaccatcaagatgaagattgccctgcgggtgctccatctcgaaaagcgagaaaggcctccagaccaccaacactcagctcaagtcaaacgtccctctgtgtccaaagaggggaggaaaacatccatcaaatctcatatgtctgggtctccaggccctggtggcagcaacacagctccatccacaccagtcattgggggcagtgataagcctggtatggaagaaaaggcccagccccctgaggccggccctcaggggctgcacgacctgggcagaagctcctccagcctcctggcctccccaggccacatctcagtcaaggagccgacccccagcatcgcctcggacatctcgctgcccatcgccacccaggagctgcggcaaaggctgaggcagctggaaaacgggacgaccctgggacagtctccactggggcagatccagctgaccatccggcacagctcgcagagaaacaagcttatcgtggtcgtgcatgcctgcagaaacctcattgccttctctgaagacggctctgacccctatgtccgcatgtatttattaccagacaagaggcggtcaggaaggaggaaaacacacgtgtcaaagaaaacattaaatccagtgtttgatcaaagctttgatttcagtgtttcgttaccagaagtgcagaggagaacgctcgacgttgccgtgaagaacagtggcggcttcctgtccaaagacaaagggctccttggcaaagtattggttgctctggcatctgaagaacttgccaaaggctggacccagtggtatgacctcacggaagatgggacgaggcctcaggcgatgacatagccgcagcaggcaggaggcgtcctcttcagcgtagctctccacctctacccggaacacaccctctcacagacgtaccaatgttatttttataatttcatggatttagttatacataccttaatagttttataaaattgttgacatttcaggcaaatttggccaatattatcattgaattttctgtgttggatttcctctaggatttcgccagttcctacaacgtgcagtagggcggcggtagctcttgtgtctgtggactctgctcagctgtgtccgtaggagtcggatgtgtctgtgctttattatggccttgtttatatatcactgaggtatactatgccatgtaaatagactattttttataatctttacatgctggtttaaattcagaaggaaatagatcaaggaaatatatatattttcttctaaaacttattaaattcgtgtgacaaataatcattttcatcttggcagcaaaaagttctcagtgacctattttgtggtgtttctttttgaaaagaaaagctgaaatattattaaatgctagtatgtttctgcccattatgaaagatgaaataaagtattcaaaatattaacattttcataaatataaggatgtattattgagaagtaagttgaagggcttataaggaaaaatgttttataactgagtaatatattaagagaattgtcatggttcataaatcacattatgctaatctgaaatttcttacataaaaatgaagtgtcttatgtttattttaattgctgttgtaacttactcatgaaacagtatacagacaccttgtacttttcctcaactgtaagagcagactttcaatgttagcaattaagctgttgtcaaacaatcagtcatgagctttgttaattttcaatgttttcccagcctataaaaaaaggaaggtacacgttgtccttttaaaggttgtgaggtagattggagtgagtagacaggatattgcattaaaaattgaaagctcgatctcattattgtcaggaacccccagtgtgacctcacacataggatgtgggacctttgagccgatgtgcactggccaccaccagggttgggggcgccacagctgcgagcccggcccctgctgttctcagcagccacttcccaggctgcctcactttatgccatgactgaccttaatattgggatattgttatgcaatttttatcctgtttagactgttaaaagcaggtttctgtacttaagagtcccccagacctcctgtgaggtgaggctctgttgcagtgtcgtaggctgtgtgtgtctgtaaagaaagaatgcacatatgtagacgattaagtgtatattataagctatatgctgaaaatggcttccatagccatgagaacatcttaaaactatgtgtaaatatattaaggaaagtatagctttgtaatttaaattggagcttttagcttgtttcatggaactatacaacttgtgggtaactcacatgaccaaacaaaccaaagtgcctgtgacggggcgggtggcgtctacccaccctcccttctagcagattcttattttgtttgaatttataaacaaggctggtggctgtctacccaccctcccttctagcagattttgattttgtttcaatttataacttacactttgaaccatgggtttacttataatggagtctgtagcttcacagcatatttcatgtaatcataaagaccagtatattccctcctgctgaatgacatgcgactgtaaagcctctttataaaccatttccaatgttagtatataggattatttgggaagcgtatcaatacctttatagacaaatacgaacatgtatgcacacaaaacatttaactatggtatttatggaagacaggtaacaacattaaatctagttgctttcccttagtattagatttgttgagggttttttaaaaatcaggtctgttgaaagtcttctgtcataatctataaagcagcagcactcatggaaattgtagcatgccagtaatttttaccaacatcccatacatctgagttctgcagtccagtgtgtaatccgctccatgtgtattttgcttaatggaatgctttatttaagcacttaggcagagtagacacaattaaaggtacaaagcccagaggaagtggtagagcagcaccgtgcctgccctgaggcagtggagtcagtagcgctgtccccagggccttgagtgcctggaggtgcttggcctccagtagctgcctccattctcttttaaaaaaagggggtgattctgaggcactgaagtgcctcccagatgtggaggagtgaagccaccatcgaggccacactcagcactccaggatcccagcgatgtcagacactcttgagttgtcaaaacgttaattttcagttttaaataatcagtttatctaagaaaagggaattttaacttttctaccttgagccaagccaatgaagggaaaattaattaacttagtaaatttgaagtgcagctctgttagctcgtacatgtgggttcttatcctgatcctgtgccttaaagtaggaaggtgtttccaagttcagattaaaatagaagcagctggccgggtgcggtggctcacgcctgtaatcccagcactttgggaggccgaggcgggcggatgacctgaggtcaggagttcaagaccagcctggccaacatggagaaaccccatctttactaaaaatacaaaaattagccgggcgtggtggtggagcgcacgcctgtagtcccagctactcgggaggctgaggcaggagaattgcttgaacccaggaggcggaggttgcagtgagccaagatcgcaccactgcactccagcctgggcaacagagtgagactccgtctcaaaaaataaataaaatagaagcagccttgtaactgtatttaccatgataatatattctgcacggtaagaattccttttacagacattctttatcaagaggtcggcccttctttttcaggcacataagccaaatgcaggcctgtgtgtagctgtgtgttttttctgtggttgccgcatttattccacctccagctggaccccccactgcaaatagagaacagcggtgggggatgggggttaaaaagtagagaacctcctttctgttcaactaatttcacgtgacagtgcatgtatttattcaataaaacctttatgttagctcagtaagagatttg

SEQ ID NO: 428909 - DNA, 3808 bp, Homo sapiens
ggtatttagtttttatttcataatcataaacttaactctgcaatccagctaggcatgggagggaacaaggaaaacatggaacccaaagggaactgcagcgagagcacaaagattctaggatactgcgagcaaatggggtggaggggtgctctcctgagctacagaaggaatgatctggtggttaagataaaacacaagtcaaacttattcgagttgtccacagtcagcaatggtgatcttcttgctggtcttgccattcctggacccaaagcgctccatggcctccacaatattcatgccttctttcactttgccaaacaccacatgcttgccatccaaccactcagtcttggcagtgcagatgaaaaactgggaaccatttgtgttgggtccagcatttgccatggacaagatgccaggacccgtatgctttaggatgaagttctcatcttcaaatttctccccatagatggacttgccaccagtgccattatggcgtgtgaagtcaccaccctgacacataaaccctggaataattctgtgaaagcgcgagcacccagcccgcctcggccgggagggcagcgcggcactgcggggcgatgagcggcgcccggggcgagggcccggaggcgggcgccggcggggctgggggccgcgcggcgcctgagaaccccgggggcgtgctgagcgtggagctgcccgggctgctggcgcagctggcgcggagcttcgcgctgctgctgcccgtgtacgcgctgggctacctggggctcagcttcagctgggttctcctcgcgctcgcgctgctcgcctggtgtcgccgcagccgcggcctcaaggccctgcgcctgtgccgcgcgctggcgctgctggaagacgaggagcgcgtcgtgcgcctgggggtgcgcgcctgcgacctgcccgcctgggttcattttccagacactgaaagagcagaatggctaaataagactgtaaaacacatgtggcctttcatttgccaatttatagagaagttgtttcgagaaactatagaaccagccgtgcggggagcaaacacccaccttagcacctttagtttcacgaaggtcgacgtgggccagcagcccctcaggatcaatggtgttaaggtatacactgaaaatgtagacaaaaggcaaattattttggaccttcagattagttttgtaggaaattgtgagattgatttggagatcaaacgatatttttgtagagctggtgtgaaaagtatccagattcatggtaccatgcgggtgatcctggaaccgttgattggagatatgcccttagttggagctttgtctatcttcttccttaggaaaccacttttagaaattaactggacaggactgacgaatcttctggatgtccctggattgaatggtttatcagatactatcattttggatataatatcaaactatctggtgcttcccaatcgaatcaccgttccacttgtcagtgaagttcaaatagctcagttgcggtttcctgtaccaaagggtgttctaaggatacattttattgaagctcaggatcttcaggggaaagacacttaccttaagggacttgtcaagggaaagtcagacccctatggaatcattagagttggcaaccaaatcttccaaagcagagtcatcaaggagaacctcagtccaaagtggaatgaagtctatgaggctttagtgtatgaacatcctggacaagaattagagattgagctctttgatgaagacccagacaaggatgactttttaggaagtcttatgattgacctcattgaagttgaaaaggagcgccttttagatgaatggttcactctggacgaggttcccaaggggaagctacacttgagactggagtggctcacgttaatgccaaatgcgtcaaacctcgacaaggtgctaacagacatcaaagctgacaaagaccaagccaacgatggtctttcctctgcattgctgatcttgtacttggattcagcaaggaaccttccgagtaacccattagaatttaaccccgatgtcttgaagaagactgcagttcagagagctttaaagtcagggaagaaaataagcagcaacccaaatcctgttgtccagatgtcagttgggcacaaggcccaggagagcaagattcgatacaaaaccaatgaacctgtgtgggaggaaaacttcactttcttcattcacaatcccaagcgccaggaccttgaagttgaggtcagagacgagcagcaccagtgttccctggggaacctgaaggtccccctcagccagctgctcaccagtgaggacatgactgtgagccagcgcttccagctcagtaactcgggtccaaacagcaccatcaagatgaagattgccctgcgggtgctccatctcgaaaagcgagaaaggcctccagaccaccaacactcagctcaagtcaaacgtccctctgtgtccaaagaggggaggaaaacatccatcaaatctcatatgtctgggtctccaggccctggtggcagcaacacagctccatccacaccagtcattgggggcagtgataagcctggtatggaagaaaaggcccagccccctgaggccggccctcaggggctgcacgacctgggcagaagctcctccagcctcctggcctccccaggccacatctcagtcaaggagccgacccccagcatcgcctcggacatctcgctgcccatcgccacccaggagctgcggcaaaggctgaggcagctggaaaacgggacgaccctgggacagtctccactggggcagatccagctgaccatccggcacagctcgcagagaaacaagcttatcgtggtcgtgcatgcctgcagaaacctcattgccttctctgaagacggctctgacccctatgtccgcatgtatttattaccagacaagaggcggtcaggaaggaggaaaacacacgtgtcaaagaaaacattaaatccagtgtttgatcaaagctttgatttcagtgtttcgttaccagaagtgcagaggagaacgctcgacgttgccgtgaagaacagtggcggcttcctgtccaaagacaaagggctccttggcaaagtattggttgctctggcatctgaagaacttgccaaaggctggacccagtggtatgacctcacggaagatgggacgaggcctcaggcgatgacatagccgcagcaggcaggaggcgtcctcttcagcgtagctctccacctctacccggaacacaccctctcacagacgtaccaatgttatttttataatttcatggatttagttatacataccttaatagttttataaaattgttgacatttcaggcaaatttggccaatattatcattgaattttctgtgttggatttcctctaggatttcgccagttcctacaacgtgcagtagggcggcggtagctcttgtgtctgtggactctgctcagctgtgtccgtaggagtcggatgtgtctgtgctttattatggccttgtttatatatcactgaggtatactatgccatgtaaatagactattttttataatctttacatgctggtttaaattcagaaggaaatagatcaaggaaatatatatattttcttctaaaacttattaaattcgtgtgacaaataatcattttcatcttggcagcaaaaagttctcagtgacctattttgtggtgtttctttttgaaaagaaaagctgaaatattattaaatgctagtatgtttctgcccattatgaaagatgaaataaagtattcaaaatattaacattttcataaa

SEQ ID NO: 428910 - DNA, 3712 bp, Homo sapiens
  misc_feature (49)..(49): n is a, c, g, or t
  misc_feature (54)..(54): n is a, c, g, or t
  misc_feature (57)..(57): n is a, c, g, or t
aaaaaattaggctaggtacgaggctggtgtggaatcggccgaggggcanctggnaancgggacgaccctgggacagtctccactggggcagatccagctgaccatccggcacagctcgcagagaaacaagcttatcgtggtcgtgcatgcctgcagaaacctcattgccttctctgaagacggctctgacccctatgtccgcatgtatttattaccagacaagaggcggtcaggaaggaggaaaacacacgtgtcaaagaaaacattaaatccagtgtttgatcaaagctttgatttcagtgtttcgttaccagaagtgcagaggagaacgctcgacgttgccgtgaagaacagtggcggcttcctgtccaaagacaaagggctccttggcaaagtattggttgctctggcatctgaagaacttgccaaaggctggacccagtggtatgacctcacggaagatgggacgaggcctcaggcgatgacatagccgcagcaggcaggaggcgtcctcttcagcgtagctctccacctctacccggaacacaccctctcacagacgtaccaatgttatttttataatttcatggatttagttatacataccttaatagttttataaaattgttgacatttcaggcaaatttggccaatattatcattgaattttctgtgttggatttcctctaggatttcgccagttcctacaacgtgcagtagggcggcggtagctcttgtgtctgtggactctgctcagctgtgtccgtaggagtcggatgtgtctgtgctttattatggccttgtttatatatcactgaggtatactatgccatgtaaatagactattttttataatctttacatgctggtttaaattcagaaggaaatagatcaaggaaatatatatattttcttctaaaacttattaaattcgtgtgacaaataatcattttcatcttggcagcaaaaagttctcagtgacctattttgtggtgtttctttttgaaaagaaaagctgaaatattattaaatgctagtatgtttctgcccattatgaaagatgaaataaagtattcaaaatattaacattttcataaatataaggatgtattattgagaagtaagttgaagggcttataaggaaaaatgttttataactgagtaatatattaagagaattgtcatggttcataaatcacattatgctaatctgaaatttcttacataaaaatgaagtgtcttatgtttattttaattgctgttgtaacttactcatgaaacagtatacagacaccttgtacttttcctcaactgtaagagcagactttcaatgttagcaattaagctgttgtcaaacaatcagtcatgagctttgttaattttcaatgttttcccagcctataaaaaaaggaaggtacacgttgtccttttaaaggttgtgaggtagattggagtgagtagacaggatattgcattaaaaattgaaagctcgatctcattattgtcaggaacccccagtgtgacctcacacataggatgtgggacctttgagccgatgtgcactggccaccaccagggttgggggcgccacagctgcgagcccggcccctgctgttctcagcagccacttcccaggctgcctcactttatgccatgactgaccttaatattgggatattgttatgcaatttttatcctgtttagactgttaaaagcaggtttctgtacttaagagtcccccagacctcctgtgaggtgaggctctgttgcagtgtcgtaggctgtgtgtgtctgtaaagaaagaatgcacatatgtagacgattaagtgtatattataagctatatgctgaaaatggcttccatagccatgagaacatcttaaaactatgtgtaaatatattaaggaaagtatagctttgtaatttaaattggagcttttagcttgtttcatggaactatacaacttgtgggtaactcacatgaccaaacaaaccaaagtgcctgtgacggggcgggtggcgtctacccaccctcccttctagcagattcttattttgtttgaatttataaacaaggctggtggctgtctacccaccctcccttctagcagattttgattttgtttcaatttataacttacactttgaaccatgggtttacttataatggagtctgtagcttcacagcatatttcatgtaatcataaagaccagtatattccctcctgctgaatgacatgcgactgtaaagcctctttataaaccatttccaatgttagtatataggattatttgggaagcgtatcaatacctttatagacaaatacgaacatgtatgcacacaaaacatttaactatggtatttatggaagacaggtaacaacattaaatctagttgctttcccttagtattagatttgttgagggttttttaaaaatcaggtctgttgaaagtcttctgtcataatctataaagcagcagcactcatggaaattgtagcatgccagtaatttttaccaacatcccatacatctgagttctgcagtccagtgtgtaatccgctccatgtgtattttgcttaatggaatgctttatttaagcacttaggcagagtagacacaattaaaggtacaaagcccagaggaagtggtagagcagcaccgtgcctgccctgaggcagtggagtcagtagcgctgtccccagggccttgagtgcctggaggtgcttggcctccagtagctgcctccattctcttttaaaaaaagggggtgattctgaggcactgaagtgcctcccagatgtggaggagtgaagccaccatcgaggccacactcagcactccaggatcccagcgatgtcagacactcttgagttgtcaaaacgttaattttcagttttaaataatcagtttatctaagaaaagggaattttaacttttctaccttgagccaagccaatgaagggaaaattaattaacttagtaaatttgaagtgcagctctgttagctcgtacatgtgggttcttatcctgatcctgtgccttaaagtaggaaggtgtttccaagttcagattaaaatagaagcagctggccgggtgcggtggctcacgcctgtaatcccagcactttgggaggccgaggcgggcggatgacctgaggtcaggagttcaagaccagcctggccaacatggagaaaccccatctttactaaaaatacaaaaattagccgggcgtggtggtggagcgcacgcctgtagtcccagctactcgggaggctgaggcaggagaattgcttgaacccaggaggcggaggttgcagtgagccaagatcgcaccactgcactccagcctgggcaacagagtgagactccgtctcaaaaaataaataaaatagaagcagccttgtaactgtatttaccatgataatatattctgcacggtaagaattccttttacagacattctttatcaagaggtcggcccttctttttcaggcacataagccaaatgcaggcctgtgtgtagctgtgtgttttttctgtggttgccgcatttattccacctccagctggaccccccactgcaaatagagaacagcggtgggggatgggggttaaaaagtagagaacctcctttctgttcaactaatttcacgtgacagtgcatgtatttattcaataaaacctttatgttagctcagtaagagatttg

SEQ ID NO: 428911 - DNA, 3509 bp, Homo sapiens
gcctactactactactaaattcgcggccgcgtcgacggaaaacacacgtgtcaaagaaaacattaaatccagtgtttgatcaaagctttgatttcagtgtttcgttaccagaagtgcagaggagaacgctcgacgttgccgtgaagaacagtggcggcttcctgtccaaagacaaagggctccttggcaaagtattggttgctctggcatctgaagaacttgccaaaggctggacccagtggtatgacctcacggaagatgggacgaggcctcaggcgatgacatagccgcagcaggcaggaggcgtcctcttcagcgtagctctccacctctacccggaacacaccctctcacagacgtaccaatgttatttttataatttcatggatttagttatacataccttaatagttttataaaattgttgacatttcaggcaaatttggccaatattatcattgaattttctgtgttggatttcctctaggatttcgccagttcctacaacgtgcagtagggcggcggtagctcttgtgtctgtggactctgctcagctgtgtccgtaggagtcggatgtgtctgtgctttattatggccttgtttatatatcactgaggtatactatgccatgtaaatagactattttttataatctttacatgctggtttaaattcagaaggaaatagatcaaggaaatatatatattttcttctaaaacttattaaattcgtgtgacaaataatcattttcatcttggcagcaaaaagttctcagtgacctattttgtggtgtttctttttgaaaagaaaagctgaaatattattaaatgctagtatgtttctgcccattatgaaagatgaaataaagtattcaaaatattaacattttcataaatataaggatgtattattgagaagtaagttgaagggcttataaggaaaaatgttttataactgagtaatatattaagagaattgtcatggttcataaatcacattatgctaatctgaaatttcttacataaaaatgaagtgtcttatgtttattttaattgctgttgtaacttactcatgaaacagtatacagacaccttgtacttttcctcaactgtaagagcagactttcaatgttagcaattaagctgttgtcaaacaatcagtcatgagctttgttaattttcaatgttttcccagcctataaaaaaaggaaggtacacgttgtccttttaaaggttgtgaggtagattggagtgagtagacaggatattgcattaaaaattgaaagctcgatctcattattgtcaggaacccccagtgtgacctcacacataggatgtgggacctttgagccgatgtgcactggccaccaccagggttgggggcgccacagctgcgagcccggcccctgctgttctcagcagccacttcccaggctgcctcactttatgccatgactgaccttaatattgggatattgttatgcaatttttatcctgtttagactgttaaaagcaggtttctgtacttaagagtcccccagacctcctgtgaggtgaggctctgttgcagtgtcgtaggctgtgtgtgtctgtaaagaaagaatgcacatatgtagacgattaagtgtatattataagctatatgctgaaaatggcttccatagccatgagaacatcttaaaactatgtgtaaatatattaaggaaagtatagctttgtaatttaaattggagcttttagcttgtttcatggaactatacaacttgtgggtaactcacatgaccaaacaaaccaaagtgcctgtgacggggcgggtggcgtctacccaccctcccttctagcagattcttattttgtttgaatttataaacaaggctggtggctgtctacccaccctcccttctagcagattttgattttgtttcaatttataacttacactttgaaccatgggtttacttataatggagtctgtagcttcacagcatatttcatgtaatcataaagaccagtatattccctcctgctgaatgacatgcgactgtaaagcctctttataaaccatttccaatgttagtatataggattatttgggaagcgtatcaatacctttatagacaaatacgaacatgtatgcacacaaaacatttaactatggtatttatggaagacaggtaacaacattaaatctagttgctttcccttagtattagatttgttgagggttttttaaaaatcaggtctgttgaaagtcttctgtcataatctataaagcagcagcactcatggaaattgtagcatgccagtaatttttaccaacatcccatacatctgagttctgcagtccagtgtgtaatccgctccatgtgtattttgcttaatggaatgctttatttaagcacttaggcagagtagacacaattaaaggtacaaagcccagaggaagtggtagagcagcaccgtgcctgccctgaggcagtggagtcagtagcgctgtccccagggccttgagtgcctggaggtgcttggcctccagtagctgcctccattctcttttaaaaaaagggggtgattctgaggcactgaagtgcctcccagatgtggaggagtgaagccaccatcgaggccacactcagcactccaggatcccagcgatgtcagacactcttgagttgtcaaaacgttaattttcagttttaaataatcagtttatctaagaaaagggaattttaacttttctaccttgagccaagccaatgaagggaaaattaattaacttagtaaatttgaagtgcagctctgttagctcgtacatgtgggttcttatcctgatcctgtgccttaaagtaggaaggtgtttccaagttcagattaaaatagaagcagctggccgggtgcggtggctcacgcctgtaatcccagcactttgggaggccgaggcgggcggatgacctgaggtcaggagttcaagaccagcctggccaacatggagaaaccccatctttactaaaaatacaaaaattagccgggcgtggtggtggagcgcacgcctgtagtcccagctactcgggaggctgaggcaggagaattgcttgaacccaggaggcggaggttgcagtgagccaagatcgcaccactgcactccagcctgggcaacagagtgagactccgtctcaaaaaataaataaaatagaagcagccttgtaactgtatttaccatgataatatattctgcacggtaagaattccttttacagacattctttatcaagaggtcggcccttctttttcaggcacataagccaaatgcaggcctgtgtgtagctgtgtgttttttctgtggttgccgcatttattccacctccagctggaccccccactgcaaatagagaacagcggtgggggatgggggttaaaaagtagagaacctcctttctgttcaactaatttcacgtgacagtgcatgtatttattcaataaaacctttatgttagctcagtaagagatttg

SEQ ID NO: 428912 - DNA, 3438 bp, Homo sapiens
accgtcccgggcggaggcgggcgtgcggcggagccgcgtcccctcagaggggcgctggcgcggggctgagccgcccgggatcagcgcgagcacccagcccgcctcggccgggagggcagcgcggcactgcggggcgatgagcggcgcccggggcgagggcccggaggcgggcgccggcggggctgggggccgcgcggcgcctgagaaccccgggggcgtgctgagcgtggagctgcccgggctgctggcgcagctggcgcggagcttcgcgctgctgctgcccgtgtacgcgctgggctacctggggctcagcttcagctgggttctcctcgcgctcgcgctgctcgcctggtgtcgccgcagccgcggcctcaaggccctgcgcctgtgccgcgcgctggcgctgctggaagacgaggagcgcgtcgtgcgcctgggggtgcgcgcctgcgacctgcccgcctgggttcattttccagacactgaaagagcagaatggctaaataagactgtaaaacacatgtggcctttcatttgccaatttatagagaagttgtttcgagaaactatagaaccagccgtgcggggagcaaacacccaccttagcacctttagtttcacgaaggtcgacgtgggccagcagcccctcaggatcaatggtgttaaggtatacactgaaaatgtagacaaaaggcaaattattttggaccttcagattagttttgtaggaaattgtgagattgatttggagatcaaacgatatttttgtagagctggtgtgaaaagtatccagattcatggtaccatgcgggtgatcctggaaccgttgattggagatatgcccttagttggagctttgtctatcttcttccttaggaaaccacttttagaaattaactggacaggactgacgaatcttctggatgtccctggattgaatggtttatcagatactatcattttggatataatatcaaactatctggtgcttcccaatcgaatcaccgttccacttgtcagtgaagttcaaatagctcagttgcggtttcctgtaccaaagggtgttctaaggatacattttattgaagctcaggatcttcaggggaaagacacttaccttaagggacttgtcaagggaaagtcagacccctatggaatcattagagttggcaaccaaatcttccaaagcagagtcatcaaggagaacctcagtccaaagtggaatgaagtctatgaggctttagtgtatgaacatcctggacaagaattagagattgagctctttgatgaagacccagacaaggatgactttttaggaagtcttatgattgacctcattgaagttgaaaaggagcgccttttagatgaatggttcactctggacgaggttcccaaggggaagctacacttgagactggagtggctcacgttaatgccaaatgcgtcaaacctcgacaaggtgctaacagacatcaaagctgacaaagaccaagccaacgatggtctttcctctgcattgctgatcttgtacttggattcagcaaggaaccttccgtcagggaagaaaataagcagcaacccaaatcctgttgtccagatgtcagttgggcacaaggcccaggagagcaagattcgatacaaaaccaatgaacctgtgtgggaggaaaacttcactttcttcattcacaatcccaagcgccaggaccttgaagttgaggtcagagacgagcagcaccagtgttccctggggaacctgaaggtccccctcagccagctgctcaccagtgaggacatgactgtgagccagcgcttccagctcagtaactcgggtccaaacagcaccatcaagatgaagattgccctgcgggtgctccatctcgaaaagcgagaaaggcctccagaccaccaacactcagctcaagtcaaacgtccctctgtgtccaaagaggggaggaaaacatccatcaaatctcatatgtctgggtctccaggccctggtggcagcaacacagctccatccacaccagtcattgggggcagtgataagcctggtatggaagaaaaggcccagccccctgaggccggccctcaggggctgcacgacctgggcagaagctcctccagcctcctggcctccccaggccacatctcagtcaaggagccgacccccagcatcgcctcggacatctcgctgcccatcgccacccaggagctgcggcaaaggctgaggcagctggaaaacgggacgaccctgggacagtctccactggggcagatccagctgaccatccggcacagctcgcagagaaacaagcttatcgtggtcgtgcatgcctgcagaaacctcattgccttctctgaagacggctctgacccctatgtccgcatgtatttattaccagacaagaggcggtcaggaaggaggaaaacacacgtgtcaaagaaaacattaaatccagtgtttgatcaaagctttgatttcagtgtttcgttaccagaagtgcagaggagaacgctcgacgttgccgtgaagaacagtggcggcttcctgtccaaagacaaagggctccttggcaaagtattggttgctctggcatctgaagaacttgccaaaggctggacccagtggtatgacctcacggaagatgggacgaggcctcaggcgatgacatagccgcagcaggcaggaggcgtcctcttcagcgtagctctccacctctacccggaacacaccctctcacagacgtaccaatgttatttttataatttcatggatttagttatacataccttaatagttttataaaattgttgacatttcaggcaaatttggccaatattatcattgaattttctgtgttggatttcctctaggatttcgccagttcctacaacgtgcagtagggcggcggtagctcttgtgtctgtggactctgctcagctgtgtccgtaggagtcggatgtgtctgtgctttattatggccttgtttatatatcactgaggtatactatgccatgtaaatagactattttttataatctttacatgctggtttaaattcagaaggaaatagatcaaggaaatatatatattttcttctaaaacttattaaattcgtgtgacaaataatcattttcatcttggcagcaaaaagttctcagtgacctattttgtggtgtttctttttgaaaagaaaagctgaaatattattaaatgctagtatgtttctgcccattatgaaagatgaaataaagtattcaaaatattaacattttcataaatataaggatgtattattgagaagtaagttgaagggcttataaggaaaaatgttttataactgagtaatatattaagagaattgtcatggttcataaatcacattatgctaatctgaaatttcttacataaaaatgaagtgtcttatgtttatttta

SEQ ID NO: 428913 - DNA, 1385 bp, Homo sapiens
accgtcccgggcggaggcgggcgtgcggcggagccgcgtcccctcagaggggcgctggcgcggggctgagccgcccgggatcagcgcgagcacccagcccgcctcggccgggagggcagcgcggcactgcggggcgatgagcggcgcccggggcgagggcccggaggcgggcgccggcggggctgggggccgcgcggcgcctgagaaccccgggggcgtgctgagcgtggagctgcccgggctgctggcgcagctggcgcggagcttcgcgctgctgctgcccgtgtacgcgctgggctacctggggctcagcttcagctgggttctcctcgcgctcgcgctgctcgcctggtgtcgccgcagccgcggcctcaaggccctgcgcctgtgccgcgcgctggcgctgctggaagacgaggagcgcgtcgtgcgcctgggggtgcgcgcctgcgacctgcccgcctgggttcattttccagacactgaaagagcagaatggctaaataagactgtaaaacacatgtggcctttcatttgccaatttatagagaagttgtttcgagaaactatagaaccagccgtgcggggagcaaacacccaccttagcacctttagtttcacgaaggtcgacgtgggccagcagcccctcaggatcaatggtgttaaggtatacactgaaaatgtagacaaaaggcaaattattttggaccttcagattaggtaagtttttatttgttatatttgtgttatggttaatggcgtgtaatgtcacttagctgtacctgtaaggtggaggatacagtgagcacacgtcttacctgctgttgattggaattcgactaaattcttgttagacatccaaatattatttaccttctgggtctcagtttctaacagccttgatcattgccattcataaaatatgttaaataagaagttaaagacactgcaaaaaaagaaaactatggaccaatattctttatgaacattgataaaatccttaacaaaatactagcaaactgaattcggcagcatattaaaaagattttacaccatgaccaagtaggatttattcccagaatgcaaagataattcagcatacaaaaatttgtcgatgtaacacaccacattaaaaggaaggaaaaaaccaaatcgtgattatctcagttgatggagaaaaagcatttaacaaaattcaataccctttcatgataaaaacactgaatgaactaggaatagaaggaaactaactcaacataataaaaaccatataagaaaaccccacagttaacatactcagtgggccgggcgtggtggctcatgcctgtaatcccagcaatttggaaggccgaggcgggcggatcacgaggtcaggagatcaggac

SEQ ID NO: 428914 - DNA, 641 bp, Homo sapiens
tgtggacatatgttttcatttctcttgggtatgtacctacaggtggaattgctgggtcatatagtaactgtttaagcatttgatgaactgctagtttcctaagtggctgcattagtttacatttccaataccagtgtgtgagggttccaatttctaacacttattttccttttttaaaataatcatctcctgtggtttaaatgtgttccctaaattttatgtgttggaaacttcaccctcaaattcatatgttgattggaggtgggcctgtgggaggtaattaggattagataaaggtcatcagggtgaggcctccatgatgagactgttggctttgtaagaagagaaagagatttgcactgacatgcatgtgtttgcattgttttgtcatgtgatgcgtcttgccatgtcatgatacagcaggaaggccctcaccagatgccagtgccatggtcttggacttcatagcctccagaaccatgagctatgtcaacttttctttatgaattacccagtctagggctaggcacggtgactcatgcctgcaatctcaacactttgggaggccaaggcaagaagactgcttgagaacaggaattcgagacaatgtgggcaacataacaaaaccatttcgcttaaaa

SEQ ID NO: 428915 - DNA, 836 bp, Homo sapiens
ccgtcgcaaaagcgggacgacttcggtctgcgccggaagtgcatgagctgccgatgtggtgcttagtgattgcggtttcggtcgctctcccgtgtttcccgggctgggtatttgcctcgcaccatggcgcccaagggcaaagtgggcacgagagggaagaagcagatatttgaagagaacagagagactctgaagttctacctgcggatcatactgggggccaatgccatttactgccttgtgacgttggtcttcttttactcatctgcctcattttgggcctggttggccctgggctttagtctggcagtgtatggggccagctaccactctatgagctcgatggcacgagcagcgttctctgaggatggggccctgatggatggtggcatggacctcaacatggagcagggcatggcagagtgagtgtcccccaccgccagcccaggcaccttaaggatgtgatcctactgacagccatcgtgcaggtgctcagctgcttctctctctatgtctggtccttctggcttctggctccaggccgggccctttacctcctgtgggtgaatgtgctgggcccctggttcactgcagacagtggcaccccagcaccagagcacaatgagaaacggcagcgccgacaggagcggcggcagatgaagcggttatagccattgacattgtggccacaggccactggccctgggtggctctgtcagggtgcacagcccctcatgcctggagcaatgagggtctagtccaggggccaaaagcagtctgaggtattgggtatacttatactctatagggtcgttgaataaatggcttagaatgtg

SEQ ID NO: 428916 - DNA, 974 bp, Homo sapiens
ccgtcgcaaaagcgggacgacttcggtctgcgccggaagtgcatgagctgccgatgtggtgcttagtgattgcggtttcggtcgctctcccgtgtttcccgggctgggtatttgcctcgcaccatggcgcccaagggcaaagtgggcacgagagggaagaagcagatatttgaagagaacagagagactctgaagttctacctgcggatcatactgggggccaatgccatttactgccttgtgacgttggtcttcttttactcatctgcctcattttgggcctggttggccctgggctttagtctggcagtgtatggggccagctaccactctatgagctcgatggcacgagcagcgttctctgaggatggggccctgatggatggtggcatggacctcaacatggagcagggcatggcagagtgagtgtcccccaccgccagcccaggtgagcggccccagggctggggcccagatagcccaagaagcacagctacttgtaacttgaaaagggtggaagggagttgcaacttgaaaagggtggaagggcccatatgctgtctttccagctttatttctatccacagcaccttaaggatgtgatcctactgacagccatcgtgcaggtgctcagctgcttctctctctatgtctggtccttctggcttctggctccaggccgggccctttacctcctgtgggtgaatgtgctgggcccctggttcactgcagacagtggcaccccagcaccagagcacaatgagaaacggcagcgccgacaggagcggcggcagatgaagcggttatagccattgacattgtggccacaggccactggccctgggtggctctgtcagggtgcacagcccctcatgcctggagcaatgagggtctagtccaggggccaaaagcagtctgaggtattgggtatacttatactctatagggtcgttgaataaatggcttagaatgtg

SEQ ID NO: 428917 - DNA, 688 bp, Homo sapiens
gcgaattcactagtgattgtgagctgagatcgcaccatggcgcccaagggcaaagtgggcacgagagggaagaagcagatatttgaagagaacagagagactctgaagttctacctgcggatcatactgggggccaatgccatttactgccttgtgacgttggtcttcttttactcatctgcctcattttgggcctggttggccctgggctttagtctggcagtgtatggggccagctaccactctatgagctcgatggcacgagcagcgttctctgaggatggggccctgatggatggtggcatggacctcaacatggagcagggcatggcagagcaccttaaggatgtgatcctactgacagccatcgtgcaggtgctcagctgcttctctctctatgtctggtccttctggcttctggctccaggccgggccctttacctcctgtgggtgaatgtgctgggcccctggttcactgcagacagtggcaccccagcaccagagcacaatgagaaacggcagcgccgacaggagcggcggcagatgaagcggttatagccattgacattgtggccacaggccactggccctgggtggctctgtcagggtgcgatctcagctcacaatcactagtgaattcgcgccgcctgcaggtcgacaatatgagagctcccaacgcgttgatgca

SEQ ID NO: 428918 - DNA, 595 bp, Homo sapiens
  misc_feature (589)..(589): n is a, c, g, or t
ccgtcgcaaaagcgggacgacttcggtctgcgccggaagtgcatgagctgccgatgtggtgcttagtgattgcggtttcggtcgctctcccgtgtttcccgggctgggtatttgcctcgcaccatggcgcccaagggcaaagtgggcacgagagggaagaagcagatatttgaagagaacagagagactctgaagttctacctgcggatcatactgggggccaatgccatttactgccttgtgacgttggtcttcttttactcatctgcctcattttgggcctggttggccctgggctttagtctggcagtgtatggggccagctaccactctatgagctcgatggcacgagcagcgttctctgaggatggggccctgatggatggtggcatggacctcaacatggagcagggcatggcagagtgagtgtcccccaccgccagcccaggcaccttaaggatgtgatcctactgacagccatcgtgcaggtgctcagctgcttctctctctatgtctggtccttctggcttctggtccagcggccttactccgtggtggtgctgggcccggtcatgagcatggcacccanaccagg

SEQ ID NO: 428919 - DNA, 1143 bp, Homo sapiens
ccgtcgcaaaagcgggacgacttcggtctgcgccggaagtgcatgagctgccgatgtggtgcttagtgattgcggtttcggtcgctctcccgtgtttcccgggctgggtatttgcctcgcaccatggcgcccaagggcaaagtgggcacgagagggaagaagcagatatttgaagagaacagagagactctgaagttctacctgcggatcatactgggggccaatgccatttactgccttgtgacgttggtcttcttttactcatctgcctcattttgggcctggttggccctgggctttagtctggcagtgtatggggccagctaccactctatgagctcgatggcacgagcagcgttctctgaggatggggccctgatggatggtggcatggacctcaacatggagcagggcatggcagagcaccttaaggatgtgatcctactgacagccatcgtgcaggtgctcagctgcttctctctctatgtctggtccttctggcttctggctccaggccgggccctttacctcctgtgggtgaatgtgctgggcccctggttcactgcagacagtggcaccccagcaccagagcacaatgagaaacggcagcgccgacaggagcggcggcagatgaagcggttatagccattgacattgtggccacaggccactggccctgggtggctctgtcagggtgcacagcccctcatgcctggagcaatgagggtctagtccaggggccaaaagcagtctgaggtattgggtatacttatactctatagggtcgttgaataaatggcttagaatgtgaaaaaaaaaaaaaaaaaaaaaaaaaaaaaaaaaaaaaaaaaaaaaaaaaagggggggggggttaaaattatcatcccggagggggccccatgttatggcgatccccccgggttttggtgaaagagagggacccatatagggagggtgattaaaaagggaggagcgaggggccagtaaaaacagcgtcggtcgtcggaacaatggtagcgggattctgtggagagaacgatcttcgggccgtgaaatatgggacaactactagagatttaggctgaggaaattaatgaggttaaagtgtaaaagattggggcaagatggtcgggtgttgcagtc

SEQ ID NO: 428920 - DNA, 1056 bp, Homo sapiens
gcgaattcactagtgattgtgagctgagatcgcaccatggcgcccaagggcaaagtgggcacgagagggaagaagcagatatttgaagagaacagagagactctgaagttctacctgcggatcatactgggggccaatgccatttactgccttgtgacgttggtcttcttttactcatctgcctcattttgggcctggttggccctgggctttagtctggcagtgtatggggccagctaccactctatgagctcgatggcacgagcagcgttctctgaggatggggccctgatggatggtggcatggacctcaacatggagcagggcatggcagagcaccttaaggatgtgatcctactgacagccatcgtgcaggtgctcagctgcttctctctctatgtctggtccttctggcttctggctccaggccgggccctttacctcctgtgggtgaatgtgctgggcccctggttcactgcagacagtggcaccccagcaccagagcacaatgagaaacggcagcgccgacaggagcggcggcagatgaagcggttatagccattgacattgtggccacaggccactggccctgggtggctctgtcagggtgcacagcccctcatgcctggagcaatgagggtctagtccaggggccaaaagcagtctgaggtattgggtatacttatactctatagggtcgttgaataaatggcttagaatgtgaaaaaaaaaaaaaaaaaaaaaaaaaaaaaaaaaaaaaaaaaaaaaaaaaagggggggggggttaaaattatcatcccggagggggccccatgttatggcgatccccccgggttttggtgaaagagagggacccatatagggagggtgattaaaaagggaggagcgaggggccagtaaaaacagcgtcggtcgtcggaacaatggtagcgggattctgtggagagaacgatcttcgggccgtgaaatatgggacaactactagagatttaggctgaggaaattaatgaggttaaagtgtaaaagattggggcaagatggtcgggtgttgcagtc

SEQ ID NO: 428921 - DNA, 1566 bp, Homo sapiens
ccgtcgcaaaagcgggacgacttcggtctgcgccggaagtgcatgagctgccgatgtggtgcttagtgattgcggtttcggtcgctctcccgtgtttcccgggctgggtatttgcctcgcaccatggcgcccaagggcaaagtgggcacgagagggaagaagcagatatttgaagagaacagagagactctgaagttctacctgcggatcatactgggggccaatgtaagtgcctacctccttgcttctatgcccacttatagtcagttccctagtcctcagccctgcttggtgacgaggagtggtacccgaaaaagctctagaagagagctccagtcaaaaagaaatgagagatctgggcacagagaaagtgctaactagtaaaacacaaagaaaatgaaggcgtgagtcgtagctgaatttgagagctcttcctacctccaagtacacaaaggcttctttcctgggctgagttgggtgtcagaggagagtgggtatttgggattcagggagcagggccctttcttcaaccctgtaagaacaaccttgctcctcccacagcctggcctaattcttggtcagagttgagggagacccatggtttggaggtaacttctgaccccaacctgatcctgtgattgcttgcaggccatttactgccttgtgacgttggtcttcttttactcatctgcctcattttgggcctggttggccctgggctttagtctggcagtgtatggggccagctaccactctatgagctcgatggcacgagcagcgttctctgaggatggggccctgatggatggtggcatggacctcaacatggagcagggcatggcagagcaccttaaggatgtgatcctactgacagccatcgtgcaggtgctcagctgcttctctctctatgtctggtccttctggcttctggctccaggccgggccctttacctcctgtgggtgaatgtgctgggcccctggttcactgcagacagtggcaccccagcaccagagcacaatgagaaacggcagcgccgacaggagcggcggcagatgaagcggttatagccattgacattgtggccacaggccactggccctgggtggctctgtcagggtgcacagcccctcatgcctggagcaatgagggtctagtccaggggccaaaagcagtctgaggtattgggtatacttatactctatagggtcgttgaataaatggcttagaatgtgaaaaaaaaaaaaaaaaaaaaaaaaaaaaaaaaaaaaaaaaaaaaaaaaaagggggggggggttaaaattatcatcccggagggggccccatgttatggcgatccccccgggttttggtgaaagagagggacccatatagggagggtgattaaaaagggaggagcgaggggccagtaaaaacagcgtcggtcgtcggaacaatggtagcgggattctgtggagagaacgatcttcgggccgtgaaatatgggacaactactagagatttaggctgaggaaattaatgaggttaaagtgtaaaagattggggcaagatggtcgggtgttgcagtc

SEQ ID NO: 428922 - DNA, 1646 bp, Homo sapiens
ccgtcgcaaaagcgggacgacttcggtctgcgccggaagtgcatgagctgccgatgtggtgcttagtgattgcggtttcggtcgctctcccgtgtttcccgggctgggtatttgcctcgcaccatggcgcccaagggcaaagtgggcacgagagggaagaagcagatatttgaagagaacagagagactctgaagttctacctgcggatcatactgggggccaatgtaagtgcctacctccttgcttctatgcccacttatagtcagttccctagtcctcagccctgcttggtgacgaggagtggtacccgaaaaagctctagaagagagctccagtcaaaaagaaatgagagatctgggcacagagaaagtgctaactagtaaaacacaaagaaaatgaaggcgtgagtcgtagctgaatttgagagctcttcctacctccaagtacacaaaggcttctttcctgggctgagttgggtgtcagaggagagtgggtatttgggattcagggagcagggccctttcttcaaccctgtaagaacaaccttgctcctcccacagcctggcctaattcttggtcagagttgagggagacccatggtttggaggtaacttctgaccccaacctgatcctgtgattgcttgcaggccatttactgccttgtgacgttggtcttcttttactcatctgcctcattttgggcctgggtaagtatctccatcctgggaggtggatgagtgcgtagggtcagtggctggcctttgataccctcattcttgctctgcagttggccctgggctttagtctggcagtgtatggggccagctaccactctatgagctcgatggcacgagcagcgttctctgaggatggggccctgatggatggtggcatggacctcaacatggagcagggcatggcagagcaccttaaggatgtgatcctactgacagccatcgtgcaggtgctcagctgcttctctctctatgtctggtccttctggcttctggctccaggccgggccctttacctcctgtgggtgaatgtgctgggcccctggttcactgcagacagtggcaccccagcaccagagcacaatgagaaacggcagcgccgacaggagcggcggcagatgaagcggttatagccattgacattgtggccacaggccactggccctgggtggctctgtcagggtgcacagcccctcatgcctggagcaatgagggtctagtccaggggccaaaagcagtctgaggtattgggtatacttatactctatagggtcgttgaataaatggcttagaatgtgaaaaaaaaaaaaaaaaaaaaaaaaaaaaaaaaaaaaaaaaaaaaaaaaaagggggggggggttaaaattatcatcccggagggggccccatgttatggcgatccccccgggttttggtgaaagagagggacccatatagggagggtgattaaaaagggaggagcgaggggccagtaaaaacagcgtcggtcgtcggaacaatggtagcgggattctgtggagagaacgatcttcgggccgtgaaatatgggacaactactagagatttaggctgaggaaattaatgaggttaaagtgtaaaagattggggcaagatggtcgggtgttgcagtc

SEQ ID NO: 428923 - DNA, 911 bp, Homo sapiens
cgactctgacggactccccgaacccacctcatctgcctctattttgggcctggttggccctgggctttagtctggcagtgtatggggccagctaccactctatgagctcgatggcacgagcagcgttctctgaggatggggccctgatggatggtggcatggacctcaacatggagcagggcatggcagagcaccttaaggatgtgatcctactgacagccatcgtgcaggtgctcagctgcttctctctctatgtctggtccttctggcttctggctccaggccgggccctttacctcctgtgggtgaatgtgctgggcccctggttcactgcagacagtggcaccccagcaccagagcacaatgagaaacggcagcgccgacaggagcggcggcagatgaagcggttatagccattgacattgtggccacaggccactggccctgggtggctctgtcagggtgcacagcccctcatgcctggagcaatgagggtctagtccaggggccaaaagcagtctgaggtattgggtatacttatactctatagggtcgttgaataaatggcttagaatgtgaaaaaaaaaaaaaaaaaaaaaaaaaaaaaaaaaaaaaaaaaaaaaaaaaagggggggggggttaaaattatcatcccggagggggccccatgttatggcgatccccccgggttttggtgaaagagagggacccatatagggagggtgattaaaaagggaggagcgaggggccagtaaaaacagcgtcggtcgtcggaacaatggtagcgggattctgtggagagaacgatcttcgggccgtgaaatatgggacaactactagagatttaggctgaggaaattaatgaggttaaagtgtaaaagattggggcaagatggtcgggtgttgcagtc

SEQ ID NO: 428924 - DNA, 904 bp, Homo sapiens
ccgtcgcaaaagcgggacgacttcggtctgcgccggaagtgcatgagctgccgatgtggtgcttagtgattgcggtttcggtcgctctcccgtgtttcccgggctgggtatttgcctcgcaccatggcgcccaagggcaaagtgggcacgagagggaagaagcagatatttgaagagaacagagagactctgaagttctacctgcggatcatactgggggccaatgccatttactgccttgtgacgttggtcttcttttactcatctgcctcattttgggcctggttggccctgggctttagtctggcagtgtatggggccagctaccactctatgagctcgatggcacgagcagcgttctctgaggatggggccctgatggatggtggcatggacctcaacatggagcagggcatggcagagcaccttaaggatgtgatcctactgacagccatcgtgcaggtgctcagctgcttctctctctatgtctggtccttctggcttctggtatgtgggctgggggcgctcccaagaaggggcatctaaccctccccatcttttattccctgcatcttgcttcaagttaccgtttctcttgtaggctccaggccgggccctttacctcctgtgggtgaatgtgctgggcccctggttcactgcagacagtggcaccccagcaccagagcacaatgagaaacggcagcgccgacaggagcggcggcagatgaagcggttatagccattgacattgtggccacaggccactggccctgggtggctctgtcagggtgcacagcccctcatgcctggagcaatgagggtctagtccaggggccaaaagcagtctgaggtattgggtatacttatactctatagggtcgttgaataaatggcttagaatgtg

SEQ ID NO: 428925 - DNA, 1196 bp, Homo sapiens
ccgtcgcaaaagcgggacgacttcggtctgcgccggaagtgcatgagctgccgatgtggtgcttagtgattgcggtttcggtcgctctcccgtgtttcccgggctgggtatttgcctcgcaccatggcgggcgagcaagaggcgattgatcctagctgcgggtgctggagagatggcgtcagccctaggcagaatggactggaggatgggtggacatcccagggattttgctaggtttctgcactacggggacctggctgagttgcggatggagctctatagctcaccaggctggtggggagaatgaggaggaccgtggcctcctgacggcatctcatcattcctctgcagcccaagggcaaagtgggcacgagagggaagaagcagatatttgaagagaacagagagactctgaagttctacctgcggatcatactgggggccaatgccatttactgccttgtgacgttggtcttcttttactcatctgcctcattttgggcctggttggccctgggctttagtctggcagtgtatggggccagctaccactctatgagctcgatggcacgagcagcgttctctgaggatggggccctgatggatggtggcatggacctcaacatggagcagggcatggcagagtgagtgtcccccaccgccagcccaggtgagcggccccagggctggggcccagatagcccaagaagcacagctacttgtaacttgaaaagggtggaagggagttgcaacttgaaaagggtggaagggcccatatgctgtctttccagctttatttctatccacagcaccttaaggatgtgatcctactgacagccatcgtgcaggtgctcagctgcttctctctctatgtctggtccttctggcttctggctccaggccgggccctttacctcctgtgggtgaatgtgctgggcccctggttcactgcagacagtggcaccccagcaccagagcacaatgagaaacggcagcgccgacaggagcggcggcagatgaagcggttatagccattgacattgtggccacaggccactggccctgggtggctctgtcagggtgcacagcccctcatgcctggagcaatgagggtctagtccaggggccaaaagcagtctgaggtattgggtatacttatactctatagggtcgttgaataaatggcttagaatgtg

SEQ ID NO: 428926 - DNA, 810 bp, Homo sapiens
ccgtcgcaaaagcgggacgacttcggtctgcgccggaagtgcatgagctgccgatgtggtgcttagtgattgcggtttcggtcgctctcccgtgtttcccgggctgggtatttgcctcgcaccatggcgcccaagggcaaagtgggcacgagagggaagaagcagatatttgaagagaacagagagactctgaagttctacctgcggatcatactgggggccaatgccatttactgccttgtgacgttggtcttcttttactcatctgcctcattttgggcctggttggccctgggctttagtctggcagtgtatggggccagctaccactctatgagctcgatggcacgagcagcgttctctgaggatggggccctgatggatggtggcatggacctcaacatggagcagggcatggcagagcaccttaaggatgtgatcctactgacagccatcgtgcaggtgctcagctgcttctctctctatgtctggtccttctggcttctggctccaggccgggccctttacctcctgtgggtgaatgtgctgggcccctggttcactgcagacagtggcaccccagcaccagagcacaatgagaaacggcagcgccgacaggagcggcggcagatgaagcggttatagccattgacattgtggccacaggccactggccctgggtggctctgtcagggtgcacagcccctcatgcctggagcaatgagggtctagtccaggggccaaaagcagtctgaggtattgggtatacttatactctatagggtcgttgaataaatggcttagaatgtg

SEQ ID NO: 428927 - DNA, 1260 bp, Homo sapiens
ccgtcgcaaaagcgggacgacttcggtctgcgccggaagtgcatgagctgccgatgtggtgcttagtgattgcggtttcggtcgctctcccgtgtttcccgggctgggtatttgcctcgcaccatggcggtttctgcactacggggacctggctgagttgcggatggagctctatagctcaccaggctggtggggagaatgaggaggaccgtggcctcctgacggcatctcatcattcctctgcagcccaagggcaaagtgggcacgagagggaagaagcagatatttgaagagaacagagagactctgaagttctacctgcggatcatactgggggccaatgccatttactgccttgtgacgttggtcttcttttactcatctgcctcattttgggcctggttggccctgggctttagtctggcagtgtatggggccagctaccactctatgagctcgatggcacgagcagcgttctctgaggatggggccctgatggatggtggcatggacctcaacatggagcagggcatggcagagcaccttaaggatgtgatcctactgacagccatcgtgcaggtgctcagctgcttctctctctatgtctggtccttctggcttctggctccaggccgggccctttacctcctgtgggtgaatgtgctgggcccctggttcactgcagacagtggcaccccagcaccagagcacaatgagaaacggcagcgccgacaggagcggcggcagatgaagcggttatagccattgacattgtggccacaggccactggccctgggtggctctgtcagggtgcacagcccctcatgcctggagcaatgagggtctagtccaggggccaaaagcagtctgaggtattgggtatacttatactctatagggtcgttgaataaatggcttagaatgtgaaaaaaaaaaaaaaaaaaaaaaaaaaaaaaaaaaaaaaaaaaaaaaaaaagggggggggggttaaaattatcatcccggagggggccccatgttatggcgatccccccgggttttggtgaaagagagggacccatatagggagggtgattaaaaagggaggagcgaggggccagtaaaaacagcgtcggtcgtcggaacaatggtagcgggattctgtggagagaacgatcttcgggccgtgaaatatgggacaactactagagatttaggctgaggaaattaatgaggttaaagtgtaaaagattggggcaagatggtcgggtgttgcagtc

SEQ ID NO: 428928 - DNA, 927 bp, Homo sapiens
ccgtcgcaaaagcgggacgacttcggtctgcgccggaagtgcatgagctgccgatgtggtgcttagtgattgcggtttcggtcgctctcccgtgtttcccgggctgggtatttgcctcgcaccatggcggtttctgcactacggggacctggctgagttgcggatggagctctatagctcaccaggctggtggggagaatgaggaggaccgtggcctcctgacggcatctcatcattcctctgcagcccaagggcaaagtgggcacgagagggaagaagcagatatttgaagagaacagagagactctgaagttctacctgcggatcatactgggggccaatgccatttactgccttgtgacgttggtcttcttttactcatctgcctcattttgggcctggttggccctgggctttagtctggcagtgtatggggccagctaccactctatgagctcgatggcacgagcagcgttctctgaggatggggccctgatggatggtggcatggacctcaacatggagcagggcatggcagagcaccttaaggatgtgatcctactgacagccatcgtgcaggtgctcagctgcttctctctctatgtctggtccttctggcttctggctccaggccgggccctttacctcctgtgggtgaatgtgctgggcccctggttcactgcagacagtggcaccccagcaccagagcacaatgagaaacggcagcgccgacaggagcggcggcagatgaagcggttatagccattgacattgtggccacaggccactggccctgggtggctctgtcagggtgcacagcccctcatgcctggagcaatgagggtctagtccaggggccaaaagcagtctgaggtattgggtatacttatactctatagggtcgttgaataaatggcttagaatgtg

SEQ ID NO: 428929 - DNA, 1788 bp, Homo sapiens
ccgtcgcaaaagcgggacgacttcggtctgcgccggaagtgcatgagctgccgatgtggtgcttagtgattgcggtttcggtcgctctcccgtgtttcccgggctgggtatttgcctcgcaccatggcgggcgagcaagaggcgattgatcctagctgcgggtgctggagagatggcgtcagccctaggcagaatggactggaggatgggtggacatcccagggattttgctaggtttctgcactacggggacctggctgagttgcggatggagctctatagctcaccaggctggtggggagaatgaggaggaccgtggcctcctgacggcatctcatcattcctctgcagcccaagggcaaagtgggcacgagagggaagaagcagatatttgaagagaacagagagactctgaagttctacctgcggatcatactgggggccaatgtaagtgcctacctccttgcttctatgcccacttatagtcagttccctagtcctcagccctgcttggtgacgaggagtggtacccgaaaaagctctagaagagagctccagtcaaaaagaaatgagagatctgggcacagagaaagtgctaactagtaaaacacaaagaaaatgaaggcgtgagtcgtagctgaatttgagagctcttcctacctccaagtacacaaaggcttctttcctgggctgagttgggtgtcagaggagagtgggtatttgggattcagggagcagggccctttcttcaaccctgtaagaacaaccttgctcctcccacagcctggcctaattcttggtcagagttgagggagacccatggtttggaggtaacttctgaccccaacctgatcctgtgattgcttgcaggccatttactgccttgtgacgttggtcttcttttactcatctgcctcattttgggcctggttggccctgggctttagtctggcagtgtatggggccagctaccactctatgagctcgatggcacgagcagcgttctctgaggatggggccctgatggatggtggcatggacctcaacatggagcagggcatggcagagcaccttaaggatgtgatcctactgacagccatcgtgcaggtgctcagctgcttctctctctatgtctggtccttctggcttctggctccaggccgggccctttacctcctgtgggtgaatgtgctgggcccctggttcactgcagacagtggcaccccagcaccagagcacaatgagaaacggcagcgccgacaggagcggcggcagatgaagcggttatagccattgacattgtggccacaggccactggccctgggtggctctgtcagggtgcacagcccctcatgcctggagcaatgagggtctagtccaggggccaaaagcagtctgaggtattgggtatacttatactctatagggtcgttgaataaatggcttagaatgtgaaaaaaaaaaaaaaaaaaaaaaaaaaaaaaaaaaaaaaaaaaaaaaaaaagggggggggggttaaaattatcatcccggagggggccccatgttatggcgatccccccgggttttggtgaaagagagggacccatatagggagggtgattaaaaagggaggagcgaggggccagtaaaaacagcgtcggtcgtcggaacaatggtagcgggattctgtggagagaacgatcttcgggccgtgaaatatgggacaactactagagatttaggctgaggaaattaatgaggttaaagtgtaaaagattggggcaagatggtcgggtgttgcagtc

SEQ ID NO: 428930 - DNA, 775 bp, Homo sapiens
ccgtcgcaaaagcgggacgacttcggtctgcgccggaagtgcatgagctgccgatgtggtgcttagtgattgcggtttcggtcgctctcccgtgtttcccgggctgggtatttgcctcgcaccatggcgcccaagggcaaagtgggcacgagagggaagaagcagatatttgaagagaacagagagactctgaagttctacctgcggatcatactgggggccaatgccatttactgccttgtgacgttggtcttcttttactcatctgcctcattttgggcctggttggccctgggctttagtctggcagtgtatggggccagctaccactctatgagctcgatggcacgagcagcgttctctgaggatggggccctgatggatggtggcatggacctcaacatggagcagggcatggcagagcaccttaaggatgtgatcctactgacagccatcgtgcaggtgctcagctgcttctctctctatgtctggtccttctggcttctggctccaggccgggccctttacctcctgtgggtgaatgtgctgggcccctggttcactgcagacagtggcaccccagcaccagagcacaatgagaaacggcagcgccgacaggagcggcggcagatgaagcggttatagccattgacattgtggccacaggccactggccctgggtggctctgtcagggtgcgatctcagctcacaatcactagtgaattcgcgccgcctgcaggtcgacaatatgagagctcccaacgcgttgatgca

SEQ ID NO: 428931 - DNA, 1021 bp, Homo sapiens
ccgtcgcaaaagcgggacgacttcggtctgcgccggaagtgcatgagctgccgatgtggtgcttagtgattgcggtttcggtcgctctcccgtgtttcccgggctgggtatttgcctcgcaccatggcggtttctgcactacggggacctggctgagttgcggatggagctctatagctcaccaggctggtggggagaatgaggaggaccgtggcctcctgacggcatctcatcattcctctgcagcccaagggcaaagtgggcacgagagggaagaagcagatatttgaagagaacagagagactctgaagttctacctgcggatcatactgggggccaatgccatttactgccttgtgacgttggtcttcttttactcatctgcctcattttgggcctggttggccctgggctttagtctggcagtgtatggggccagctaccactctatgagctcgatggcacgagcagcgttctctgaggatggggccctgatggatggtggcatggacctcaacatggagcagggcatggcagagcaccttaaggatgtgatcctactgacagccatcgtgcaggtgctcagctgcttctctctctatgtctggtccttctggcttctggtatgtgggctgggggcgctcccaagaaggggcatctaaccctccccatcttttattccctgcatcttgcttcaagttaccgtttctcttgtaggctccaggccgggccctttacctcctgtgggtgaatgtgctgggcccctggttcactgcagacagtggcaccccagcaccagagcacaatgagaaacggcagcgccgacaggagcggcggcagatgaagcggttatagccattgacattgtggccacaggccactggccctgggtggctctgtcagggtgcacagcccctcatgcctggagcaatgagggtctagtccaggggccaaaagcagtctgaggtattgggtatacttatactctatagggtcgttgaataaatggcttagaatgtg

SEQ ID NO: 428932 - DNA, 2898 bp, Homo sapiens
ttacaggcatgagccactgcgcccagccaacaccatttgttgaaagcactcttgcaaaaagcagttgactttactcatttgaggctatttctggattttctactttgttccactgatacttgtctatcccttcaccagtaccacactgtcttgattattgtagctatatataataagtcttgaaatttggtggtgatccctctcgctattctttttgtcagaattgttttagctattctaaattcctttgtcttttcatataaagtttagactaaccttccctggatctgcaaaacatcttgtagagattttgatagaaatggtgttatatctgtatatcaatttggtggcaattgacagctttactaattctttcaacacgtgaatacagagaatcttccatttatttaggtcttctttgatatcttttatcagtattttgttgttttcagcatacggttcctgtatgtgttttgttagatttacacgtatttctttttgttgttcttgtttttaggttttattttgcttcgtttttgtttttaacagagatgggggtcttgctttgttgcccaggctggtcttgaactcctggcctcaagtgatcctccggccttggtctcccaaaatgctgggattacaggagtgagccactgagctcggcctcttttttttttttttttttgagtgattgtaagtggtattgtattgtattccttttcttttcttttcctttcttttcttttcctttcctttcctttccttttttttttttttttttttgaggtggagtcttgctctgtcacctaggctggactgagcagtggctcagtcttggctcactgcaacctccacctcctgggttcatgtaattctcctgcctcagccacctgagtagcagggactacaggtgcttgccaccagcccagccaatttttgtatttttagtagagaggaggtttcaacagttgcccaggctagtcttgaactcctgggctcaagtgatccatcttcctcggcctcccaaagtgctgggactacaggcatgagccaccacgcccagcctggtgttgtattttaaatttcagtttacatgtgttcgttgttagtatacagaagtacaattgaatcttgtgtgttaattttgtatcccaggaccttgctaaactcttttatttggtctaggagtttatttgtagattctttgggattttctagtagaccatcgtgccatctataaataggaaccgttttatttcttctcttctgatctgtgtgactccccctcttttcttgcctactgtgctggctaggtcttccagtaccatctttaatagtgttgggagagtgaagttccttgcctttttctgcatcatgaatttgtatatttttacatttttctcaagacaaaaatccagtccttttatcccctgttgctcactatttactgtgactttttctattttaagtgggttttaaaggaggcttttcctgatgccagtttcccttgggaaatgaagggcctcttcctgtatcctcgccccttccctccccgttttcctggctttttaagggcatggactttgacgccccctagtggccgcgtggagccacgtctcctctcgcccctaggggagaagcgtggactggggacgtggggggacccggggacggctccatcctcctttccccatccctacccccaccccagtgtctcctgaggcacagggtccccacgggccgggctgaccccctgccccctggtgtctgcagacagcggtctcgggccccgggcccggccagatggtggcaccggtaaccgggtacagcctgggcgtgcggcgagctgagatcaagcccggggtgcgcgagatccacctgtgcaaggacgagcgcggcaagaccgggctgaggctgcggaaggtcgaccaggggctctttgtgcagttggtccaggccaacacccctgcatcccttgtggggctgcgctttggggaccagctcctgcagattgacgggcgtgactgtgctgggtggagctcgcacaaagcccatcaggtggtgaagaaggcatcaggcgataagattgtcatggtggttcgggacaggccgttccagcggactgtcaccatgcacaaggacagcatgggccacgtcggcttcgtgatcaagaaggggaagattgtctctctggtcaaagggagttctgcggcccgcaacgggctcctcaccaaccactacgtgtgtgaggtggacgggcagaatgttatcgggctgaaggacaaaaagatcatggagattctggccacggctgggaacgttgtcaccctgaccatcatccccagtgtgatctacgagcacatggtcaaaaagttgcctccagtcctgctccaccacaccatggaccactccatcccagatgcctgaagccactggagggcagggcaggcagggggggcttcccgccctcctgcagcaaagggcaaccacccttggatgatgggttgcagccggcctgctgcttaaggtgggggctgccatgaggggggcgtgtccaggagggtgaccatgggatggcttatacacacaggcctccttggagcctcagactccaagctaggctgaggctcaggcagggcccacaggcagccgattctcttgtgctgatttaaatgctggacacggaggcaggctgtttaaacgctgcttaaagtcgcaactgggcccctttcaagaaattttgctctaccaggaaaacagttacacattttaagagaacagagctacgttctttgtgagagctttttccttggcttgacttgctctttgtcacagactgcataagttgtcagccttgactatcttttgaataaagatttgattttaaacaaaaaaaag

SEQ ID NO: 428933 - DNA, 3353 bp, Homo sapiens
  misc_feature (2380)..(2380): n is a, c, g, or t
ttacaggcatgagccactgcgcccagccaacaccatttgttgaaagcactcttgcaaaaagcagttgactttactcatttgaggctatttctggattttctactttgttccactgatacttgtctatcccttcaccagtaccacactgtcttgattattgtagctatatataataagtcttgaaatttggtggtgatccctctcgctattctttttgtcagaattgttttagctattctaaattcctttgtcttttcatataaagtttagactaaccttccctggatctgcaaaacatcttgtagagattttgatagaaatggtgttatatctgtatatcaatttggtggcaattgacagctttactaattctttcaacacgtgaatacagagaatcttccatttatttaggtcttctttgatatcttttatcagtattttgttgttttcagcatacggttcctgtatgtgttttgttagatttacacgtatttctttttgttgttcttgtttttaggttttattttgcttcgtttttgtttttaacagagatgggggtcttgctttgttgcccaggctggtcttgaactcctggcctcaagtgatcctccggccttggtctcccaaaatgctgggattacaggagtgagccactgagctcggcctcttttttttttttttttttgagtgattgtaagtggtattgtattgtattccttttcttttcttttcctttcttttcttttcctttcctttcctttccttttttttttttttttttttgaggtggagtcttgctctgtcacctaggctggactgagcagtggctcagtcttggctcactgcaacctccacctcctgggttcatgtaattctcctgcctcagccacctgagtagcagggactacaggtgcttgccaccagcccagccaatttttgtatttttagtagagaggaggtttcaacagttgcccaggctagtcttgaactcctgggctcaagtgatccatcttcctcggcctcccaaagtgctgggactacaggcatgagccaccacgcccagcctggtgttgtattttaaatttcagtttacatgtgttcgttgttagtatacagaagtacaattgaatcttgtgtgttaattttgtatcccaggaccttgctaaactcttttatttggtctaggagtttatttgtagattctttgggattttctagtagaccatcgtgccatctataaataggaaccgttttatttcttctcttctgatctgtgtgactccccctcttttcttgcctactgtgctggctaggtcttccagtaccatctttaatagtgttgggagagtgaagttccttgcctttttctgcatcatgaatttgtatatttttacatttttctcaagacaaaaatccagtccttttatcccctgttgctcactatttactgtgactttttctattttaagtgggttttaaaggaggcttttcctgatgccagtttcccttgggaaatgaagggcctcttcctgtatcctcgccccttccctccccgttttcctggctttttaagggcatggactttgacgccccctagtggccgcgtggagccacgtctcctctcgcccctaggggagaagcgtggactggggacgtggggggacccggggacggctccatcctcctttccccatccctacccccaccccagtgtctcctgaggcacagggtccccacgggccgggctgaccccctgccccctggtgtctgcagacagcggtctcgggccccgggcccggccagatggtggcaccggtaaccgggtacagcctgggcgtgcggcgagctgagatcaagcccggggtgcgcgagatccacctgtgcaaggacgagcgcggcaagaccgggctgaggctgcggaaggtcgaccaggtagggcgcgggggctgggtgggaagaggagctcgagctgcacgcgctctcccgccaggcctcagagctcagagggcccgtccacagtaaggaaggtgcagagcgggcctcctaaccccagcggccaggctcttgcccccagtccctcctccccgagacccgggcggggctggtgctgggttgcgcagggccctccactggcctctccgtgggcttccgtcgctcggaggagcctcccttccccacctgcccttcgctgcccagggcatctagcttccaggcgacggtgtagacagccgacgccagggaagcccatgcctttgtgaatggtacagtggagtgtttcggagtgcagccccaggccagggttgaaatcctgactcacctgcttcctaactatgaggcctagagtgtttcctccccggtaaatggggtaaccttggtgccngccatgcagagctgtgtccctggcaccctgtaggttcctggagtatcaggaggaaaacaacaggttggaagagggatctgtgcctagggtgggccagggacactgactctggggccctgcctcccccgggctctttgtgcagttggtccaggccaacacccctgcatcccttgtggggctgcgctttggggaccagctcctgcagattgacgggcgtgactgtgctgggtggagctcgcacaaagcccatcaggtggtgaagaaggcatcaggcgataagattgtcatggtggttcgggacaggtgagtagccaggcccgggcagcctctccgtctcaccccagccatgtccccaggacagctcactgtccctcctgccaggccgttccagcggactgtcaccatgcacaaggacagcatgggccacgtcggcttcgtgatcaagaaggggaagattgtctctctggtcaaagggagttctgcggcccgcaacgggctcctcaccaaccactacgtgtgtgaggtggacgggcagaatgttatcgggctgaaggtaggctggtggccgcgccagggagggactgccgggtggtgggagggctcaggtctttgggcagcttgcttaccccacctgagcctcagcatcctcttcctaaggttgctgtgagggttcagtaagacggtgttcatagggctgggtgcggtgactcacgtctgtaatcccagtgctttgagaggccaaagcaggaggatcacttaagtccaggagcacgagaccagcctgggcaatgtgaaaccctctttccacaaaaaaactaaaaaattagccaagcgtggtggtgcacacctgtagtcctagctactcaggaggctgaggtgggaggactaattgagcctgggaggtcaaggatgcagtgagctatgatcgtgccactgcactccagcctgggcaacagagagagaccctgtctcc

SEQ ID NO: 428934 - DNA, 1438 bp, Homo sapiens
agcggatctccccaggagacgggcgcaccttccccaagcgcggccagacctgcgtggtgcactacaccgggtgttctgagaatcagccatgtcatccctgtacccatctctagaggacctaaaagtggaccaagccattcaggcccaggtcagagcctcacccaagatgccagccctgccagtccaggcaacagccatttccccaccaccagttttgtacccaaacttggcagaactggaaaattatatgggtctttccctctccagccaagaagtccaggagagcctgcttcagattccagagggtgacagtacagcggtctcgggccccgggcccggccagatggtggcaccggtaaccgggtacagcctgggcgtgcggcgagctgagatcaagcccggggtgcgcgagatccacctgtgcaaggacgagcgcggcaagaccgggctgaggctgcggaaggtcgaccaggggctctttgtgcagttggtccaggccaacacccctgcatcccttgtggggctgcgctttggggaccagctcctgcagattgacgggcgtgactgtgctgggtggagctcgcacaaagcccatcaggtggtgaagaaggcatcaggcgataagattgtcatggtggttcgggacaggccgttccagcggactgtcaccatgcacaaggacagcatgggccacgtcggcttcgtgatcaagaaggggaagattgtctctctggtcaaagggagttctgcggcccgcaacgggctcctcaccaaccactacgtgtgtgaggtggacgggcagaatgttatcgggctgaaggacaaaaagatcatggagattctggccacggctgggaacgttgtcaccctgaccatcatccccagtgtgatctacgagcacatggtcaaaaagttgcctccagtcctgctccaccacaccatggaccactccatcccagatgcctgaagccactggagggcagggcaggcagggggggcttcccgccctcctgcagcaaagggcaaccacccttggatgatgggttgcagccggcctgctgcttaaggtgggggctgccatgaggggggcgtgtccaggagggtgaccatgggatggcttatacacacaggcctccttggagcctcagactccaagctaggctgaggctcaggcagggcccacaggcagccgattctcttgtgctgatttaaatgctggacacggaggcaggctgtttaaacgctgcttaaagtcgcaactgggcccctttcaagaaattttgctctaccaggaaaacagttacacattttaagagaacagagctacgttctttgtgagagctttttccttggcttgacttgctctttgtcacagactgcataagttgtcagccttgactatcttttgaataaagatttgattttaaacaaaaaaaag

SEQ ID NO: 428935 - DNA, 1489 bp, Homo sapiens
cccttcccacggctgccttagtacagaatcttataagtcctcctccttcagaggctacaaatggtgttccgaggccaggggagtttaaagctcgatttcacccgcgcagcctccaatccgggtgttctgagaatcagccatgtcatccctgtacccatctctagaggacctaaaagtggaccaagccattcaggcccaggtcagagcctcacccaagatgccagccctgccagtccaggcaacagccatttccccaccaccagttttgtacccaaacttggcagaactggaaaattatatgggtctttccctctccagccaagaagtccaggagagcctgcttcagattccagagggtgacagtacagcggtctcgggccccgggcccggccagatggtggcaccggtaaccgggtacagcctgggcgtgcggcgagctgagatcaagcccggggtgcgcgagatccacctgtgcaaggacgagcgcggcaagaccgggctgaggctgcggaaggtcgaccaggggctctttgtgcagttggtccaggccaacacccctgcatcccttgtggggctgcgctttggggaccagctcctgcagattgacgggcgtgactgtgctgggtggagctcgcacaaagcccatcaggtggtgaagaaggcatcaggcgataagattgtcatggtggttcgggacaggccgttccagcggactgtcaccatgcacaaggacagcatgggccacgtcggcttcgtgatcaagaaggggaagattgtctctctggtcaaagggagttctgcggcccgcaacgggctcctcaccaaccactacgtgtgtgaggtggacgggcagaatgttatcgggctgaaggacaaaaagatcatggagattctggccacggctgggaacgttgtcaccctgaccatcatccccagtgtgatctacgagcacatggtcaaaaagttgcctccagtcctgctccaccacaccatggaccactccatcccagatgcctgaagccactggagggcagggcaggcagggggggcttcccgccctcctgcagcaaagggcaaccacccttggatgatgggttgcagccggcctgctgcttaaggtgggggctgccatgaggggggcgtgtccaggagggtgaccatgggatggcttatacacacaggcctccttggagcctcagactccaagctaggctgaggctcaggcagggcccacaggcagccgattctcttgtgctgatttaaatgctggacacggaggcaggctgtttaaacgctgcttaaagtcgcaactgggcccctttcaagaaattttgctctaccaggaaaacagttacacattttaagagaacagagctacgttctttgtgagagctttttccttggcttgacttgctctttgtcacagactgcataagttgtcagccttgactatcttttgaataaagatttgattttaaacaaaaaaaag

SEQ ID NO: 428936 - DNA, 758 bp, Homo sapiens
aatatagcaagttacaagcaagggttccccgttgggatttggtaaacccaggaaagctcaaggagtgttaacagtggcacgaatcatagttaatacgggacagcaacggggctactcatccataccagaacgtgtgtaaggacaaaaagatcatggagattctggccacggctgggaacgttgtcaccctgaccatcatccccagtgtgatctacgagcacatggtcaaaaagttgcctccagtcctgctccaccacaccatggaccactccatcccagatgcctgaagccactggagggcagggcaggcagggggggcttcccgccctcctgcagcaaagggcaaccacccttggatgatgggttgcagccggcctgctgcttaaggtgggggctgccatgaggggggcgtgtccaggagggtgaccatgggatggcttatacacacaggcctccttggagcctcagactccaagctaggctgaggctcaggcagggcccacaggcagccgattctcttgtgctgatttaaatgctggacacggaggcaggctgtttaaacgctgcttaaagtcgcaactgggcccctttcaagaaattttgctctaccaggaaaacagttacacattttaagagaacagagctacgttctttgtgagagctttttccttggcttgacttgctctttgtcacagactgcataagttgtcagccttgactatcttttgaataaagatttgattttaaacaaaaaaaag

SEQ ID NO: 428937 - DNA, 1467 bp, Homo sapiens
  misc_feature (4)..(4): n is a, c, g, or t
  misc_feature (6)..(8): n is a, c, g, or t
ggangnnngctgagagacagggctacgtttcagggagggaaacagattcagcagcggcagcagctggagaaggtcgtggagcagcaccttgcctgcagggtgttctgagaatcagccatgtcatccctgtacccatctctagaggacctaaaagtggaccaagccattcaggcccaggtcagagcctcacccaagatgccagccctgccagtccaggcaacagccatttccccaccaccagttttgtacccaaacttggcagaactggaaaattatatgggtctttccctctccagccaagaagtccaggagagcctgcttcagattccagagggtgacagtacagcggtctcgggccccgggcccggccagatggtggcaccggtaaccgggtacagcctgggcgtgcggcgagctgagatcaagcccggggtgcgcgagatccacctgtgcaaggacgagcgcggcaagaccgggctgaggctgcggaaggtcgaccaggggctctttgtgcagttggtccaggccaacacccctgcatcccttgtggggctgcgctttggggaccagctcctgcagattgacgggcgtgactgtgctgggtggagctcgcacaaagcccatcaggtggtgaagaaggcatcaggcgataagattgtcatggtggttcgggacaggccgttccagcggactgtcaccatgcacaaggacagcatgggccacgtcggcttcgtgatcaagaaggggaagattgtctctctggtcaaagggagttctgcggcccgcaacgggctcctcaccaaccactacgtgtgtgaggtggacgggcagaatgttatcgggctgaaggacaaaaagatcatggagattctggccacggctgggaacgttgtcaccctgaccatcatccccagtgtgatctacgagcacatggtcaaaaagttgcctccagtcctgctccaccacaccatggaccactccatcccagatgcctgaagccactggagggcagggcaggcagggggggcttcccgccctcctgcagcaaagggcaaccacccttggatgatgggttgcagccggcctgctgcttaaggtgggggctgccatgaggggggcgtgtccaggagggtgaccatgggatggcttatacacacaggcctccttggagcctcagactccaagctaggctgaggctcaggcagggcccacaggcagccgattctcttgtgctgatttaaatgctggacacggaggcaggctgtttaaacgctgcttaaagtcgcaactgggcccctttcaagaaattttgctctaccaggaaaacagttacacattttaagagaacagagctacgttctttgtgagagctttttccttggcttgacttgctctttgtcacagactgcataagttgtcagccttgactatcttttgaataaagatttgattttaaacaaaaaaaag

SEQ ID NO: 428938 - DNA, 1409 bp, Homo sapiens
ctcaacactgggtcagaagtcacggccagacaagaaacggggtgttctgagaatcagccatgtcatccctgtacccatctctagaggacctaaaagtggaccaagccattcaggcccaggtcagagcctcacccaagatgccagccctgccagtccaggcaacagccatttccccaccaccagttttgtacccaaacttggcagaactggaaaattatatgggtctttccctctccagccaagaagtccaggagagcctgcttcagattccagagggtgacagtacagcggtctcgggccccgggcccggccagatggtggcaccggtaaccgggtacagcctgggcgtgcggcgagctgagatcaagcccggggtgcgcgagatccacctgtgcaaggacgagcgcggcaagaccgggctgaggctgcggaaggtcgaccaggggctctttgtgcagttggtccaggccaacacccctgcatcccttgtggggctgcgctttggggaccagctcctgcagattgacgggcgtgactgtgctgggtggagctcgcacaaagcccatcaggtggtgaagaaggcatcaggcgataagattgtcatggtggttcgggacaggccgttccagcggactgtcaccatgcacaaggacagcatgggccacgtcggcttcgtgatcaagaaggggaagattgtctctctggtcaaagggagttctgcggcccgcaacgggctcctcaccaaccactacgtgtgtgaggtggacgggcagaatgttatcgggctgaaggacaaaaagatcatggagattctggccacggctgggaacgttgtcaccctgaccatcatccccagtgtgatctacgagcacatggtcaaaaagttgcctccagtcctgctccaccacaccatggaccactccatcccagatgcctgaagccactggagggcagggcaggcagggggggcttcccgccctcctgcagcaaagggcaaccacccttggatgatgggttgcagccggcctgctgcttaaggtgggggctgccatgaggggggcgtgtccaggagggtgaccatgggatggcttatacacacaggcctccttggagcctcagactccaagctaggctgaggctcaggcagggcccacaggcagccgattctcttgtgctgatttaaatgctggacacggaggcaggctgtttaaacgctgcttaaagtcgcaactgggcccctttcaagaaattttgctctaccaggaaaacagttacacattttaagagaacagagctacgttctttgtgagagctttttccttggcttgacttgctctttgtcacagactgcataagttgtcagccttgactatcttttgaataaagatttgattttaaacaaaaaaaag

SEQ ID NO: 428939 - DNA, 1392 bp, Homo sapiens
  misc_feature (4)..(4): n is a, c, g, or t
  misc_feature (6)..(8): n is a, c, g, or t
ggangnnngctgagagacagggctacgtttcagggagggaaacagattcagcagcggcagcagctggagaaggtcgtggagcagcaccttgcctgcagggtgttctgagaatcagccatgtcatccctgtacccatctctagaggacctaaaagtggaccaagccattcaggcccaggtcagagcctcacccaagatgccagccctgccagtccaggcaacagccatttccccaccaccagttttgtacccaaacttggcagaactggaaaattatatgggtctttccctctccagccaagaagtccaggagagcctgcttcagattccagagggtgacagtacagcggtctcgggccccgggcccggccagatggtggcaccggtaaccgggtacagcctgggcgtgcggcgagctgagatcaaggggctctttgtgcagttggtccaggccaacacccctgcatcccttgtggggctgcgctttggggaccagctcctgcagattgacgggcgtgactgtgctgggtggagctcgcacaaagcccatcaggtggtgaagaaggcatcaggcgataagattgtcatggtggttcgggacaggccgttccagcggactgtcaccatgcacaaggacagcatgggccacgtcggcttcgtgatcaagaaggggaagattgtctctctggtcaaagggagttctgcggcccgcaacgggctcctcaccaaccactacgtgtgtgaggtggacgggcagaatgttatcgggctgaaggacaaaaagatcatggagattctggccacggctgggaacgttgtcaccctgaccatcatccccagtgtgatctacgagcacatggtcaaaaagttgcctccagtcctgctccaccacaccatggaccactccatcccagatgcctgaagccactggagggcagggcaggcagggggggcttcccgccctcctgcagcaaagggcaaccacccttggatgatgggttgcagccggcctgctgcttaaggtgggggctgccatgaggggggcgtgtccaggagggtgaccatgggatggcttatacacacaggcctccttggagcctcagactccaagctaggctgaggctcaggcagggcccacaggcagccgattctcttgtgctgatttaaatgctggacacggaggcaggctgtttaaacgctgcttaaagtcgcaactgggcccctttcaagaaattttgctctaccaggaaaacagttacacattttaagagaacagagctacgttctttgtgagagctttttccttggcttgacttgctctttgtcacagactgcataagttgtcagccttgactatcttttgaataaagatttgattttaaacaaaaaaaag

SEQ ID NO: 428940 - DNA, 1123 bp, Homo sapiens
ttacagccaatcagggacagagtcggtggcttcttcccggaggagaccggaagttggtttcggctgcagaggggaaggcggctaccagtgtaaagccagagctgaggttcttgatagtccacaatgggtgaaccacagcaagtgagtgcacttccaccacctccaatgcaatatatcaaggaatatacggatgaaaatattcaagaaggcttagctcccaagcctccccctccaataaaagacagttacatgatgtttggcaatcagttccaatgtgatgatcttatcatccgccctttggaaagtcagggcatcgaacggcttcatcctatgcagtttgatcacaagaaagaactgagaaaacttaatatgtctatccttattaatttcttggaccttttagatattttaataaggagccctgggagtataaaacgagaagagaaactagaagatcttaagctgctttttgtacacgtgcatcatcttataaatgaataccgaccccaccaagcaagagagaccttgagagtcatgatggaggtccagaaacgtcaacggcttgaaacagctgagagatttcaaaagcacctggaacgagtaattgaaatgattcagaattgcttggcttctttgcctgatgatttgcctcattcagaagcaggaatgagagtaaaaactgaaccaatggatgctgatgatagcaacaattgtactggacagaatgaacatcaaagagaaaattcaggtcataggagagatcagattatagagaaagatgctgccttgtgtgtcctaattgatgagatgaatgaaagaccatgaaagatgtttctttttctttttttccttttgataatagcatcatatattagttcattttcttttggacagtcttaagagaagtttcactaaaaatgtaaacagctttaatcttgactccaaatttttcaattatgagatgtcataggcagtaatttcgctgtataacaagcatagacaaatgagtgtccctgcactaagaagaatcactttaaaaagcaaagtgttagctgctgttgtatgggacattcctatgttttagagttgcagtaaaactttgatgataacctcaaaaaaaaaa

SEQ ID NO: 428941 - DNA, 1264 bp, Homo sapiens
ttacagccaatcagggacagagtcggtggcttcttcccggaggagaccggaagttggtttcggctgcagaggggaaggcggctaccagtgtaaagccagagctgaggttcttgatagtccacaatgggtgaaccacagcaagtgagtgcacttccaccacctccaatgcaatatatcaaggaatatacggatgaaaatattcaagaaggcttagctcccaagcctccccctccaataaaagacagttacatgatgtttggcaatcagttccaatgtgatgatcttatcatccgccctttggaaagtcagggcatcgaacggcttcatcctatgcagtttgatcacaagaaagaactgagaaaacttaatatgtctatccttattaatttcttggaccttttagatattttaataaggagccctgggagtataaaacgagaagagaaactagaagatcttaagctgctttttgtacacgtgcatcatcttataaatgaataccgaccccaccaagcaagagagaccttgagagtcatgatggaggtccagaaacgtcaacggcttgaaacagctgagagatttcaaaagcacctggaacgagtaattgaaatgattcagaattgcttggcttctttgcctgatgatttgcctcattcagaagcaggaatgagagtaaaaactgaaccaatggatgctgatgatagcaacaattgtactggacagaatgaacatcaaagagaaaattcaggtcataggagagatcagattatagagaaagatgctgccttgtgtgtcctaattgatgagatgaatgaaagaccatgaaagatgtttctttttctttttttccttttgataatagcatcatatattagttcattttcttttggacagtcttaagagaagtttcactaaaaatgtaaacagctttaatcttgactccaaatttttcaattatgagatgtcataggcagtaatttcgctgtataacaagcatagacaaatgagtgtccctgcactaagaagaatcactttaaaaagcaaagtgttagctgctgttgtatgggacattcctatgttttagagttgcagtaaaactttgatgataacctcaaaaaaaaaagtggggtatgggctgggtacggtggctcacacttataatcctagtgctttgggaggttgatgtgagaggatcacttgagctcaggaatttgagaccaatgggggcaacatagtgagaccttctctctcttacaatttaatt

SEQ ID NO: 428942 - DNA, 831 bp, Homo sapiens
ttacagccaatcagggacagagtcggtggcttcttcccggaggagaccggaagttggtttcggctgcagaggggaaggcggctaccagtgtaaagccagagctgaggttcttgatagtccacaatgggtgaaccacagcaagtgagtgcacttccaccacctccaatgcaatatatcaaggaatatacggatgaaaatattcaagaaggcttagctcccaagcctccccctccaataaaagacagttacatgatgtttggcaatcagttccaatgtgatgatcttatcatccgccctttggaaagtcagggcatcgaacggcttcatcctatgcagtttgatcacaagaaagaactgagaaaacttaatatgtctatccttattaatttcttggaccttttagatattttaataaggagccctgggagtataaaacgagaagagaaactagaagatcttaagctgctttttgtacacgtgcatcatcttataaatgaataccgaccccaccaagcaagagagaccttgagagtcatgatggaggtccagaaacgtcaacggcttgaaacagctgagagatttcaaaagcacctggaacgagtaattgaaatgattcagaattgcttggcttctttgcctgatgatttgcctcattcagaagcaggaatgagagtaaaaactgaaccaatggatgctgatgatagcaacaattgtactggacagaatgaacatcaaagagaaaattcaggtcataggagagatcagattatagagaaagatgctgccttgtgtgtcctaattgatgagatgaatgaaagaccatgaaagatg

SEQ ID NO: 428943 - DNA, 475 bp, Homo sapiens
tggccttatataaggtctttttaatcttgtgttaaaatatatctctgcacacctacttataatgaatattcttgaaagattgattcattgaagtgaaatatctggaaggatcacctttttaagcagcttttgaaatgactaatgcccaggtcccacactgcggagattctgatttcattttttggactggggtactagcattggttttaagaaatcagaagatgattctcttgtgcagtggttacagaatgttgcattaatcagtgctctgttactgctgacaaaaaccctacttgaactaatttaagcaaaaagatgaatttatataaaggatgtggggtatgggctgggtacggtggctcacacttataatcctagtgctttgggaggttgatgtgagaggatcacttgagctcaggaatttgagaccaatgggggcaacatagtgagaccttctctctcttacaatttaatt

SEQ ID NO: 428944 - DNA, 1993 bp, Homo sapiens
ttacagccaatcagggacagagtcggtggcttcttcccggaggagaccggaagttggtttcggctgcagaggggaaggcggctaccagtgtaaagccagagctgaggttcttgatagtccacaatgggtgaaccacagcaagtgagtgcacttccaccacctccaatgcaatatatcaaggaatatacggatgaaaatattcaagaaggcttagctcccaagcctccccctccaataaaagacagttacatgatgtttggcaatcagttccaatgtgatgatcttatcatccgccctttggaaagtcagggcatcgaacggcttcatcctatgcagtttgatcacaagaaagaactgagaaaacttaatatgtctatccttattaatttcttggaccttttagatattttaataaggagccctgggagtataaaacgagaagagaaactagaagatcttaagctgctttttgtacacgtgcatcatcttataaatgaataccgaccccaccaagcaagagagaccttgagagtcatgatggaggtccagaaacgtcaacggcttgaaacagctgagagatttcaaaagcacctggaacgagtaattgaaatgattcagaattgcttggcttctttgcctgatgatttgcctcattcagaagcaggaatgagagtaaaaactgaaccaatggatgctgatgatagcaacaattgtactggacagaatgaacatcaaagagaaaattcaggtcataggagagatcagattatagagaaagatgctgccttgtgtgtcctaattgatgagatgaatgaaagaccatgaaagatgtttctttttctttttttccttttgataatagcatcatatattagttcattttcttttggacagtcttaagagaagtttcactaaaaatgtaaacagctttaatcttgactccaaatttttcaattatgagatgtcataggcagtaatttcgctgtataacaagcatagacaaatgagtgtccctgcactaagaagaatcactttaaaaagcaaagtgttagctgctgttgtatgggacattcctatgttttagagttgcagtaaaactttgatgataacctcaaaaaaaaaacaaaaaaaaaaaacaaaaaacaaaaaaaaaaaacaaaaaaaaaaaaaaaaaaaaacaacaaaaaccaacaaacaaaacaaaaaagaaaaaaaaaacaaaacaacaaaaaacacaaaagcagaggggggggggcggcggccgcaaacacaacaaccagcggaggggcgcgcgacacaccactccgaacaccaaatgtcagcggatgaggacggagcgcccacacttaataagagagattatcaataaaactcaggtggcgcaacgcaaccgagcctaacaatacaagaaagtataggaagagaggaaaaagaatacatgtagcggtgaggattctatacatagacaaccacatgttgtttgggtgagcgacacgacagggaggaccaaccgaaccagaacaacacaagatggaacgaccggccagaagaacgtaccgcagtgatagtggtgatcgagtaatataaccgcagatggtacgaccgatagacagaaaagagcaataatcgaggtaataatacacaaaaattaaaagaagacagaaaaaatataacagaggacacgagcgcagagagcaccacacaggaaagagcgacagagagaaaaccgaggagggggagacggaaggacagaggcggcacgaaaggaacaacaaagacccacacgcaccagagagccccgacacaagcagacggaacgcacaccacagacagaagtaagcaagcgacagacaaaaggagaagcaacgaaacgcacaccacgagcagaacgaaggacaaaaacgaagagaaacggagacacgacacacacgagcgtagcgaagcagcaagcacaaaacacgccgacaaaatacgaggccatcagtaaaacgct

SEQ ID NO: 428945 - DNA, 1359 bp, Homo sapiens
gggctgggaactggggaggcatggctgagttcggcctccaaaggcggtctttcgtctttctctcccgagtctctccgagagtgcggtctctccgagagcgcggaggcctcggggtggacagcctggaggagggggctctaagcgtggcagtctcggggcttcctccgtgttgggacgccgagccggagtggaggttgggagacctggcgtctagtccccgcgccgctgtttttctaagctgtgtggccttgggcgagtcatttgccctctccggctctttgtaacatgagagtagccctccctgcccttccttcttctgggagcagttatgaaacagctgaggttcttgatagtccacaatgggtgaaccacagcaagtgagtgcacttccaccacctccaatgcaatatatcaaggaatatacggatgaaaatattcaagaaggcttagctcccaagcctccccctccaataaaagacagttacatgatgtttggcaatcagttccaatgtgatgatcttatcatccgccctttggaaagtcagggcatcgaacggcttcatcctatgcagtttgatcacaagaaagaactgagaaaacttaatatgtctatccttattaatttcttggaccttttagatattttaataaggagccctgggagtataaaacgagaagagaaactagaagatcttaagctgctttttgtacacgtgcatcatcttataaatgaataccgaccccaccaagcaagagagaccttgagagtcatgatggaggtccagaaacgtcaacggcttgaaacagctgagagatttcaaaagcacctggaacgagtaattgaaatgattcagaattgcttggcttctttgcctgatgatttgcctcattcagaagcaggaatgagagtaaaaactgaaccaatggatgctgatgatagcaacaattgtactggacagaatgaacatcaaagagaaaattcaggtcataggagagatcagattatagagaaagatgctgccttgtgtgtcctaattgatgagatgaatgaaagaccatgaaagatgtttctttttctttttttccttttgataatagcatcatatattagttcattttcttttggacagtcttaagagaagtttcactaaaaatgtaaacagctttaatcttgactccaaatttttcaattatgagatgtcataggcagtaatttcgctgtataacaagcatagacaaatgagtgtccctgcactaagaagaatcactttaaaaagcaaagtgttagctgctgttgtatgggacattcctatgttttagagttgcagtaaaactttgatgataacctcaaaaaaaaaa

SEQ ID NO: 428946 - DNA, 1067 bp, Homo sapiens
gggctgggaactggggaggcatggctgagttcggcctccaaaggcggtctttcgtctttctctcccgagtctctccgagagtgcggtctctccgagagcgcggaggcctcggggtggacagcctggaggagggggctctaagcgtggcagtctcggggcttcctccgtgttgggacgccgagccggagtggaggttgggagacctggcgtctagtccccgcgccgctgtttttctaagctgtgtggccttgggcgagtcatttgccctctccggctctttgtaacatgagagtagccctccctgcccttccttcttctgggagcagttatgaaacagctgaggttcttgatagtccacaatgggtgaaccacagcaagtgagtgcacttccaccacctccaatgcaatatatcaaggaatatacggatgaaaatattcaagaaggcttagctcccaagcctccccctccaataaaagacagttacatgatgtttggcaatcagttccaatgtgatgatcttatcatccgccctttggaaagtcagggcatcgaacggcttcatcctatgcagtttgatcacaagaaagaactgagaaaacttaatatgtctatccttattaatttcttggaccttttagatattttaataaggagccctgggagtataaaacgagaagagaaactagaagatcttaagctgctttttgtacacgtgcatcatcttataaatgaataccgaccccaccaagcaagagagaccttgagagtcatgatggaggtccagaaacgtcaacggcttgaaacagctgagagatttcaaaagcacctggaacgagtaattgaaatgattcagaattgcttggcttctttgcctgatgatttgcctcattcagaagcaggaatgagagtaaaaactgaaccaatggatgctgatgatagcaacaattgtactggacagaatgaacatcaaagagaaaattcaggtcataggagagatcagattatagagaaagatgctgccttgtgtgtcctaattgatgagatgaatgaaagaccatgaaagatg

SEQ ID NO: 428947 - DNA, 1261 bp, Homo sapiens
ttacagccaatcagggacagagtcggtggcttcttcccggaggagaccggaagttggtttcggctgcagaggggaaggcggctaccagtgtaaagccagagctgaggttcttgatagtccacaatgggtgaaccacagcaagtgagtgcacttccaccacctccaatgcaatatatcaaggaatatacggatgaaaatattcaagaaggcttagctcccaagcctccccctccaataaaagacagttacatgatgtttggcaatcagttccaatgtgatgatcttatcatccgccctttggaaagtcagggcatcgaacggcttcatcctatgcagtttgatcacaagaaagaactgagaaaacttaatatgtctatccttattaatttcttggaccttttagatattttaataaggagccctgggagtataaaacgagaagagaaactagaagatcttaagctgctttttgtacacgtgcatcatcttataaatgaataccgaccccaccaagcaagagagaccttgagagtcatgatggaggtccagaaacgtcaacggcttgaaacagctgagagatttcaaaagcacctggaacgagtaattgaaatgattcagaattgcttggcttctttgcctgatgatttgcctcattcagaagcaggaatgagagtaaaaactgaaccaatggatgctgatgatagcaacaattgtactggacagaatgaacatcaaagagaaaattcaggtcataggagagatcagattatagagaaagatgctgccttgtgtgtcctaattgatgagatgaatgaaagaccatgaaagatgtttctttttctttttttccttttgataatagcatcatatattagttcattttcttttggacagtcttaagagaagtttcactaaaaatgtaaacagctttaatcttgactccaaatttttcaattatgagatgtcataggcagtaatttcgctgtataacaagcatagacaaatgagtgtccctgcactaagaagaatcactttaaaaagcaaagtgttagctgctgttgtatgggacattcctatgttttagagttgcagtaaaactttgatgataacctcaaaaaaaaaagttttcgtctttgaaaaggggatttagcatttgctttaagaatgatagataaatggatattaagctctctacatgtaaaactatgaaatctttagacttattccattaaaaattttgcttaagctccaaaaagtagca

SEQ ID NO: 428948 - DNA, 3578 bp, Homo sapiens
cactcctgggaggctcaaaggctcaaacgccattggcagaatccccgacagctcatcctccgccccctgcagggggcggtaatgacagagtcctaatttccggttccggcagtaccggtagcccagtcgagatggaggaagatgcgaccggcagacggcattcgctgggaacgacggatagactgggggctgcggcctagaggtccgggcttggagttcgcctcagacgcggtggagccgccggagtctgagaaggtcttcaggcaccatggaggacaaacgcaacatccagatcatcgagtgggaacacctggacaagaagaagttctacgtgtttggtgtggcaatgacaatgatgatccgtgtcagtgtctacccattcaccctcatccgcacccggttgcaagttcagaaggggaagagcctctaccatgggaccttcgatgccttcatcaagatcctgcgagcagatggtatcactggcctctaccgagggttcctggtcaataccttcaccctcatctctggccagtgttatgtcaccacttatgagctcacccggaagtttgtagctgactacagccagagtaacacagtcaaatcactggtggctggtggctcagcctcccttgtggcccagagcatcacagtgcccattgatgtagtctcccagcacctgatgatgcaacgcaagggtgagaaaatgggccgctttcaggtgcgggggaacccagagggacaaggggtagttgcctttggccaaaccaaggacatcatcaggcagatcctgcaggctgatggacttcgcggcttctatcgaggctatgtggcttcactgcttacctatatcccaaacagtgctgtctggtggcccttctatcacttctatgcagagcagctctcctacctgtgtcctaaggagtgccctcacattgtctttcaagctgtctcggggcccctggctgcagccactgcctccatcctcaccaatcccatggatgtcatacgaacccgtgtgcaggttgagggcaagaactccatcatcctgaccttcagacagctgatggcagaagaagggccttggggcctcatgaagggcctctcggccagaatcatctcagccacaccttccaccattgtcattgtggtgggctatgagagcctcaagaaactcagcctccgacctgagctggtggactcgagacactggtaaccagtggtggggagagaagcctgctgttttccacactaccgtgggtcaggggcagagtggagaggacagcaccctctccaggtgctcccaccacacacccagccctgccctgggccaagtggcctatctgggatagggatagagactttgaactgctcttgctgaagaggctccacgcctggatcccttgcccccactatttaaaattctcttctgagctgggctccctcactcagtccctgtatttgatactggcctaaagaccccaccccccaccctgccagcccttcttctggcttccccttccatctgtgtccctgagaccctgagaagagctgtacatagagcttgcttactaccactggttcttcctcttgggctttcagcccagactccaagcagctgctatcaaccctctctcccttcatctcttagccttgcttatttttattttgggaccgagctgcccactagatgactctgcttttccctgcatttggggctaaggtgccaggtacttatttgcacagggagcaggagcagcaaaaaatctctggttctccagagcactcgtcctctctttggaggggttattaggttgggagaaatgttgatacttttgttttgtgtgtgtgtgtgtgtgtgtgtgtgtgtgtgtgtgtgtgtgtgttttaacatctgtgaaccaggctattagtcctgctaaagcgccaatcctgctgtcagagctcacccccttcctaagacaggtagaaaaatgtaatgtagctttttccacaagccagttccctgtcccttcagtctcaggagccctaggagagtctaagctggggcatcccctggcccagaggactcccgtggtgggcacagttctaagtggatcaggctgtcttgggtgcactggacttggagcactaccttgagaagtcaggttgagaaagtagttgatctagaaggcaacaagtgggcatgtgttccccagcacattacccaggccagcagagccaaacctaggagagggcagtgggtagattctctgccccaggcagccatgacatacacataaataccccaatcactcagacttacggcaacaagtgttgtctcactatggtgatctctaagatccacatcactggatgcgtagtcatcccagtcatggtaccctgtggaggaatgctggaagaacataaagagcagttcagaaagtcacccaataccaggaccactgcatttaccagcctgatactgccaagattatctgatgctctcctcaggagctaggagaggagtgctccttcctccctaccgctactctccccaagcctgtgttgcaggtagagaggtgcagcaaatagagaaggcatgtcaaaccctgcatttctacctgagacgtgtgacctggatgatcctccaaaccctattggtcccaccccctgggaaaggccatggtgccagtttgaaaggtgctagctacctgaagccttgatatttcttcatggctgccgcacattcttccaccttggccagaacaggttctgaaaaccacttctctaccttcaccaccaccactgcccatcttgatctctttgagggttttcccatttcacttgatcttatttttgtttatcccttcctgcactttgtcaagagagtcctccagtttctatccaggaatgttcacatccaaagggttggacccacggatcattctgaatcttcctgcccctcctcactgcttaaccctgagaaccacaaatataatggaagcagttccccccaccctcaccccatctctttaagctcatcctagcaagacctctagagaccctagagactcgactttagtccttccccgccatggcacagtggggaaggtgtcaatggggagtgtcacggacaggaggtaggatcctgccgctcgcgtcttagtgtttctccctcaagactttccttctgttttgttgtcttgtgcagtattttacagcccctcttgtgtttttctttatttctcgtacacacacgcagttttaagggtgatgtgtgtataattaaaaggacccttggcccatactttcctaattctttagggactgggattgggtttgactgaaatatgttttggtggggatgggacggtggacttccattctccctaaactggagttttggtcggtaatcaaaactaaaagaaacctctgggagactggaaacctgattggagcactgaggaacaagggaatgaaaaggcagactctctgaacgtttgatgaaatggactcttgtgaaaattaacagtgaatattcactgttgcactgtacgaagtctctgaaatgtaattaaaagtttttattgagcccccga

SEQ ID NO: 428949 - DNA, 3632 bp, Homo sapiens
cactcctgggaggctcaaaggctcaaacgccattggcagaatccccgacagctcatcctccgccccctgcagggggcggtaatgacagagtcctaatttccggttccggcagtaccggtagcccagtcgagatggaggaagatgcgaccggcagacggcattcgctgggaacgacggatagactgggggctgcggcctagaggtccgggcttggagttcgcctcagacgcggtggagccgccggagtctgagaaggtcttcaggcaccatggaggacaaacgcaacatccagatcatcgagtgggaacacctggacaagaagaagttctacgtgtttggtgtggcaatgacaatgatgatccgtgtcagtgtctacccattcaccctcatccgcacccggttgcaagttcagaaggggaagagcctctaccatgggaccttcgatgccttcatcaagatcctgcgagcagatggtatcactggcctctaccgagggttcctggtcaataccttcaccctcatctctggccagtgttatgtcaccacttatgagctcacccggaagtttgtagctgactacagccagagtaacacagtcaaatcactggtggctggtggctcagcctcccttgtggcccagagcatcacagtgcccattgatgtagtctcccagcacctgatgatgcaacgcaagggtgagaaaatgggccgctttcaggtgcgggggaacccagagggacaaggggtagttgcctttggccaaaccaaggacatcatcaggcagatcctgcaggctgatggacttcgcggcttctatcgaggctatgtggcttcactgcttacctatatcccaaacagtgctgtctggtggcccttctatcacttctatgcagagcagctctcctacctgtgtcctaaggagtgccctcacattgtctttcaagctgtctcggggcccctggctgcagccactgcctccatcctcaccaatcccatggatgtcatacgaacccgtgtgcaggttgagggcaagaactccatcatcctgaccttcagacagctgatggcagaagaagggccttggggcctcatgaagggcctctcggccagaatcatctcagccacaccttccaccattgtcattgtggtgggctatgagagcctcaagaaactcagcctccgacctgagctggtggactcgagacactggtaaccagtggtggggagagaagcctgctgttttccacactaccgtgggtcaggggcagagtggagaggacagcaccctctccaggtgctcccaccacacacccagccctgccctgggccaagtggcctatctgggatagggatagagactttgaactgctcttgctgaagaggctccacgcctggatcccttgcccccactatttaaaattctcttctgagctgggctccctcactcagtccctgtatttgatactggcctaaagaccccaccccccaccctgccagcccttcttctggcttccccttccatctgtgtccctgagaccctgagaagagctgtacatagagcttgcttactaccactggttcttcctcttgggctttcagcccagactccaagcagctgctatcaaccctctctcccttcatctcttagccttgcttatttttattttgggaccgagctgcccactagatgactctgcttttccctgcatttggggctaaggtgccaggtacttatttgcacagggagcaggagcagcaaaaaatctctggttctccagagcactcgtcctctctttggaggggttattaggttgggagaaatgttgatacttttgttttgtgtgtgtgtgtgtgtgtgtgtgtgtgtgtgtgtgtgtgtgtgttttaacatctgtgaaccaggctattagtcctgctaaagcgccaatcctgctgtcagagctcacccccttcctaagacaggtagaaaaatgtaatgtagctttttccacaagccagttccctgtcccttcagtctcaggagccctaggagagtctaagctggggcatcccctggcccagaggactcccgtggtgggcacagttctaagtggatcaggctgtcttgggtgcactggacttggagcactaccttgagaagtcaggttgagaaagtagttgatctagaaggcaacaagtgggcatgtgttccccagcacattacccaggccagcagagccaaacctaggagagggcagtgggtagattctctgccccaggcagccatgacatacacataaataccccaatcactcagacttacggcaacaagtgttgtctcactatggtgatctctaagatccacatcactggatgcgtagtcatcccagtcatggtaccctgtggaggaatgctggaagaacataaagagcagttcagaaagtcacccaataccaggaccactgcatttaccagcctgatactgccaagattatctgatgctctcctcaggagctaggagaggagtgctccttcctccctaccgctactctccccaagcctgtgttgcaggtagagaggtgcagcaaatagagaaggcatgtcaaaccctgcatttctacctgagacgtgtgacctggatgatcctccaaaccctattggtcccaccccctgggaaaggccatggtgccagtttgaaaggtgctagctacctgaagccttgatatttcttcatggctgccgcacattcttccaccttggccagaacaggttctgaaaaccacttctctaccttcaccaccaccactgcccatcttgatctctttgagggttttcccatttcacttgatcttatttttgtttatcccttcctgcactttgtcaagagagtcctccagtttctatccaggaatgttcacatccaaagggttggacccacggatcattctgaatcttcctgcccctcctcactgcttaaccctgagaaccacaaatataatggaagcagttccccccaccctcaccccatctctttaagctcatcctagcaagacctctagagaccctagagactcgactttagtccttccccgccatggcacagtggggaaggtgtcaatggggagtgtcacggacaggaggtaggatcctgccgctcgcgtcttagtgtttctccctcaagactttccttctgttttgttgtcttgtgcagtattttacagcccctcttgtgtttttctttatttctcgtacacacacgcagttttaagggtgatgtgtgtataattaaaaggacccttggcccatactttcctaattctttagggactgggattgggtttgactgaaatatgttttggtggggatgggacggtggacttccattctccctaaactggagttttggtcggtaatcaaaactaaaagaaacctctgggagactggaaacctgattggagcactgaggaacaagggaatgaaaaggcagactctctgaacgtttgatgaaatggactcttgtgaaaattaacagtgaatattcactgttgcactgtacgaagtctctgaaatgtaattaaaagtttttattgagcccccgaaaacgcatcttcatcggaaaacgcatcttcatcgccgaaacgcatctggccgca

SEQ ID NO: 428950 - DNA, 3400 bp, Homo sapiens
caccactccctaatctcaagttcccaggacacaaaacactgcggaaggcggcagggccccctgcctaggaaagccaggtcttcaggcaccatggaggacaaacgcaacatccagatcatcgagtgggaacacctggacaagaagaagttctacgtgtttggtgtggcaatgacaatgatgatccgtgtcagtgtctacccattcaccctcatccgcacccggttgcaagttcagaaggggaagagcctctaccatgggaccttcgatgccttcatcaagatcctgcgagcagatggtatcactggcctctaccgagggttcctggtcaataccttcaccctcatctctggccagtgttatgtcaccacttatgagctcacccggaagtttgtagctgactacagccagagtaacacagtcaaatcactggtggctggtggctcagcctcccttgtggcccagagcatcacagtgcccattgatgtagtctcccagcacctgatgatgcaacgcaagggtgagaaaatgggccgctttcaggtgcgggggaacccagagggacaaggggtagttgcctttggccaaaccaaggacatcatcaggcagatcctgcaggctgatggacttcgcggcttctatcgaggctatgtggcttcactgcttacctatatcccaaacagtgctgtctggtggcccttctatcacttctatgcagagcagctctcctacctgtgtcctaaggagtgccctcacattgtctttcaagctgtctcggggcccctggctgcagccactgcctccatcctcaccaatcccatggatgtcatacgaacccgtgtgcaggttgagggcaagaactccatcatcctgaccttcagacagctgatggcagaagaagggccttggggcctcatgaagggcctctcggccagaatcatctcagccacaccttccaccattgtcattgtggtgggctatgagagcctcaagaaactcagcctccgacctgagctggtggactcgagacactggtaaccagtggtggggagagaagcctgctgttttccacactaccgtgggtcaggggcagagtggagaggacagcaccctctccaggtgctcccaccacacacccagccctgccctgggccaagtggcctatctgggatagggatagagactttgaactgctcttgctgaagaggctccacgcctggatcccttgcccccactatttaaaattctcttctgagctgggctccctcactcagtccctgtatttgatactggcctaaagaccccaccccccaccctgccagcccttcttctggcttccccttccatctgtgtccctgagaccctgagaagagctgtacatagagcttgcttactaccactggttcttcctcttgggctttcagcccagactccaagcagctgctatcaaccctctctcccttcatctcttagccttgcttatttttattttgggaccgagctgcccactagatgactctgcttttccctgcatttggggctaaggtgccaggtacttatttgcacagggagcaggagcagcaaaaaatctctggttctccagagcactcgtcctctctttggaggggttattaggttgggagaaatgttgatacttttgttttgtgtgtgtgtgtgtgtgtgtgtgtgtgtgtgtgtgtgtgtgtgttttaacatctgtgaaccaggctattagtcctgctaaagcgccaatcctgctgtcagagctcacccccttcctaagacaggtagaaaaatgtaatgtagctttttccacaagccagttccctgtcccttcagtctcaggagccctaggagagtctaagctggggcatcccctggcccagaggactcccgtggtgggcacagttctaagtggatcaggctgtcttgggtgcactggacttggagcactaccttgagaagtcaggttgagaaagtagttgatctagaaggcaacaagtgggcatgtgttccccagcacattacccaggccagcagagccaaacctaggagagggcagtgggtagattctctgccccaggcagccatgacatacacataaataccccaatcactcagacttacggcaacaagtgttgtctcactatggtgatctctaagatccacatcactggatgcgtagtcatcccagtcatggtaccctgtggaggaatgctggaagaacataaagagcagttcagaaagtcacccaataccaggaccactgcatttaccagcctgatactgccaagattatctgatgctctcctcaggagctaggagaggagtgctccttcctccctaccgctactctccccaagcctgtgttgcaggtagagaggtgcagcaaatagagaaggcatgtcaaaccctgcatttctacctgagacgtgtgacctggatgatcctccaaaccctattggtcccaccccctgggaaaggccatggtgccagtttgaaaggtgctagctacctgaagccttgatatttcttcatggctgccgcacattcttccaccttggccagaacaggttctgaaaaccacttctctaccttcaccaccaccactgcccatcttgatctctttgagggttttcccatttcacttgatcttatttttgtttatcccttcctgcactttgtcaagagagtcctccagtttctatccaggaatgttcacatccaaagggttggacccacggatcattctgaatcttcctgcccctcctcactgcttaaccctgagaaccacaaatataatggaagcagttccccccaccctcaccccatctctttaagctcatcctagcaagacctctagagaccctagagactcgactttagtccttccccgccatggcacagtggggaaggtgtcaatggggagtgtcacggacaggaggtaggatcctgccgctcgcgtcttagtgtttctccctcaagactttccttctgttttgttgtcttgtgcagtattttacagcccctcttgtgtttttctttatttctcgtacacacacgcagttttaagggtgatgtgtgtataattaaaaggacccttggcccatactttcctaattctttagggactgggattgggtttgactgaaatatgttttggtggggatgggacggtggacttccattctccctaaactggagttttggtcggtaatcaaaactaaaagaaacctctgggagactggaaacctgattggagcactgaggaacaagggaatgaaaaggcagactctctgaacgtttgatgaaatggactcttgtgaaaattaacagtgaatattcactgttgcactgtacgaagtctctgaaatgtaattaaaagtttttattgagcccccga

SEQ ID NO: 428951 - DNA, 2503 bp, Homo sapiens
cactcctgggaggctcaaaggctcaaacgccattggcagaatccccgacagctcatcctccgccccctgcagggggcggtaatgacagagtcctaatttccggttccggcagtaccggtagcccagtcgagatggaggaagatgcgaccggcagacggcattcgctgggaacgacggatagactgggggctgcggcctagaggtccgggcttggagttcgcctcagacgcggcttctatcgaggctatgtggcttcactgcttacctatatcccaaacagtgctgtctggtggcccttctatcacttctatgcaggttgagggcaagaactccatcatcctgaccttcagacagctgatggcagaagaagggccttggggcctcatgaagggcctctcggccagaatcatctcagccacaccttccaccattgtcattgtggtgggctatgagagcctcaagaaactcagcctccgacctgagctggtggactcgagacatggttcttcctcttgggctttcagcccagactccaagcagctgctatcaaccctctctcccttcatctcttagccttgcttatttttattttgggaccgagctgcccactagatgactctgcttttccctgcatttggggctaaggtgccaggtacttatttgcacagggagcaggagcagcaaaaaatctctggttctccagagcactcgtcctctctttggaggggttattaggttgggagaaatgttgatacttttgttttgtgtgtgtgtgtgtgtgtgtgtgtgtgtgtgtgtgtgtgtgtgttttaacatctgtgaaccaggctattagtcctgctaaagcgccaatcctgctgtcagagctcacccccttcctaagacaggtagaaaaatgtaatgtagctttttccacaagccagttccctgtcccttcagtctcaggagccctaggagagtctaagctggggcatcccctggcccagaggactcccgtggtgggcacagttctaagtggatcaggctgtcttgggtgcactggacttggagcactaccttgagaagtcaggttgagaaagtagttgatctagaaggcaacaagtgggcatgtgttccccagcacattacccaggccagcagagccaaacctaggagagggcagtgggtagattctctgccccaggcagccatgacatacacataaataccccaatcactcagacttacggcaacaagtgttgtctcactatggtgatctctaagatccacatcactggatgcgtagtcatcccagtcatggtaccctgtggaggaatgctggaagaacataaagagcagttcagaaagtcacccaataccaggaccactgcatttaccagcctgatactgccaagattatctgatgctctcctcaggagctaggagaggagtgctccttcctccctaccgctactctccccaagcctgtgttgcaggtagagaggtgcagcaaatagagaaggcatgtcaaaccctgcatttctacctgagacgtgtgacctggatgatcctccaaaccctattggtcccaccccctgggaaaggccatggtgccagtttgaaaggtgctagctacctgaagccttgatatttcttcatggctgccgcacattcttccaccttggccagaacaggttctgaaaaccacttctctaccttcaccaccaccactgcccatcttgatctctttgagggttttcccatttcacttgatcttatttttgtttatcccttcctgcactttgtcaagagagtcctccagtttctatccaggaatgttcacatccaaagggttggacccacggatcattctgaatcttcctgcccctcctcactgcttaaccctgagaaccacaaatataatggaagcagttccccccaccctcaccccatctctttaagctcatcctagcaagacctctagagaccctagagactcgactttagtccttccccgccatggcacagtggggaaggtgtcaatggggagtgtcacggacaggaggtaggatcctgccgctcgcgtcttagtgtttctccctcaagactttccttctgttttgttgtcttgtgcagtattttacagcccctcttgtgtttttctttatttctcgtacacacacgcagttttaagggtgatgtgtgtataattaaaaggacccttggcccatactttcctaattctttagggactgggattgggtttgactgaaatatgttttggtggggatgggacggtggacttccattctccctaaactggagttttggtcggtaatcaaaactaaaagaaacctctgggagactggaaacctgattggagcactgaggaacaagggaatgaaaaggcagactctctgaacgtttgatgaaatggactcttgtgaaaattaacagtgaatattcactgttgcactgtacgaagtctctgaaatgtaattaaaagtttttattgagcccccga

SEQ ID NO: 428952 - DNA, 340 bp, Homo sapiens
ttcttacgagaggccttcatgaggcccaaggccctcttctgccatcagctgtctgaaggtcaggatgatggagtcttgccctcaactgcacacgggttcgtatgacaatcccatggcacttccattctccctaaactggagttttggtcggtaatcaaaactaaaagaaacctctgggagactggaaacctgattggagcactgaggaacaagggaatgaaaaggcagactctctgaacgtttgatgaaatggactcttgtgaaaattaacagtgaatattcactgttgcactgtacgaagtctctgaaatgtaattaaaagtttttattgagcccccga

SEQ ID NO: 428953 - DNA, 7299 bp, Homo sapiens
  misc_feature (1082)..(1082): n is a, c, g, or t
  misc_feature (1621)..(1621): n is a, c, g, or t
  misc_feature (1645)..(1645): n is a, c, g, or t
  misc_feature (1662)..(1662): n is a, c, g, or t
  misc_feature (1777)..(1777): n is a, c, g, or t
  misc_feature (1783)..(1783): n is a, c, g, or t
  misc_feature (1804)..(1804): n is a, c, g, or t
  misc_feature (2702)..(2702): n is a, c, g, or t
  misc_feature (2719)..(2719): n is a, c, g, or t
  misc_feature (2729)..(2729): n is a, c, g, or t
  misc_feature (2839)..(2839): n is a, c, g, or t
gtacaaggagagtagaggtggagaggaggaggcatatgcccctgggcctatttgtccctttccattggtagggtcaatagtgagagctctgcctctaacatttcacttgattacttcaggacaaagtgctcactaattctgcgtcacctgttaggtcccttgaggaagcacgtcaacatttgtgcctgagcagtgttaaaaagtggaagaaaatccggaattggagccatgcacatgagggtctgagaaagagccctaaagaagttgggctgactaagttgggagaagggaaggctggaggaactttgcatacaggtatctgcaaagaggattttttcagagggtaaaacaagaagaatgggattgatatttccgcagaagtttggaagttatgtaacagagcaggttgagatcctaccttttaggagcagcctgccccttttgaaggggtaaagggagtgggtgcagtgccctctcttctgttgtagtggcttatccctctaaggcatgacccttggataggggttacctgcctcggaaagtccccacttccttgtgggagtttaaaatagattggcatatgtgagagatggagacaaggtgggaaatcggatcctgtcttaggatttctcatcaggagatgctgatacttggtgtttcagcttgataaattgagaaggtgccatgaaaccaggtcctggaacagaatccctggttgctctgtcttttagctgctctgaccctctgccctgcagagcatgcattttgcatgtgcctggcaggaggccctcctgcttgagccctgctgtatttgtctgtgttgacaacgtgactgccagccattaagcttggtcagtccacagacacactaggaaagcagaggcagctcttggtttctctggaacagagctgcaagaagtctctgggcatctgcatggccaggagcttatgcttaactgttgagtgacctgcagccataagggcattaattctgccttccagaggtgggaatgacttggctttaaacagtgatttgtgtgagaattcttcaaatcccataaggtagaaggcatggtggagtngaggagaaatcttggctcatatctgcctcttccattgaccagctgtgtgaccttgggcctgttacttttaacctacctgaccctccatttcctcatttatcagaagtgtctaactgtacacaagttaaactgtaaggattacatgaggtagtagtcaatcctggtgtttctctgtatcttctcacttctcactggtgttggaaatatgatcttgcgaccctagatggcagccactctggggcagaagagacagtgaccaccttttgaagagctcaaaggagaatattgccccacagggcttagtgggtcccccaggctgaggctggggaggagggccacctttgcctacagcaagtggcatatcattgttctaggggttctcttgacggcagaactttgcctctagctcattttccacagcctagattttccaatcttgccaatccagttgacttctgtcttctcatttccaagccattgttctctctctttcactatctacatggattatccttcattcaaactgctttgtcccggcngggtgcggtggctcatgcctgtantcctagcactttgggangccgaggcgggtggatcacgaggtcaggagatcgagaccatcctggctaacatggtgaaaccccgtctctactaaaattaaaaaaattagccgggcgtggtggcaggcgcctgtngtcccngctacttgggaggctgaggcnggagaatggcatgaacccgggaggtggagcttgcagtgggtggagatcgcgccactgcactccagcctgggcgacagagcgagactccgtctgaaaaaaaaaacaaaaaaactgctttgtcctgtaggaatcctgtgcgggttatgtgcacctccctcaatccttaccttgaagctaaggtttcccctcagctctcaagtactcagtttgcactgcaggtagtccctattttaacgaaagttatacggtccagctcagggaatcctgaaaagctgcccttgcttccatggtaatcaaaaggcagttctcatggaataaaagctacctgaagcctgagttgggacctttggctggggaaggtggttgaggacgttctctgattagatgcttggcatgaggtttgctactggaactgctagtgtagaatgtttcagccccctagagttgtccctgtgatgtggctacctcctttctctgggatttctcttaaagtctggggagcccctgcttctcatttcctggaatttatcttcccagtctccctttctggctgaaaatttctagtatcttacagaacagcggtgggatacactggagcacatcatattaccactaagtatgtctaataaatgatgtcctctgatttgacatttcctaaatgtgaagctcctgattttatacaattttgaaattagtaagcttgttagttttgtttgaaattctaggcattggatacacttaacatgagggctacatgtgcatcaacatactctggtttccttccctctgtatcttttttttttttgagatggagtctcactgtctcctaggctggagtgcagtggtgtgatcatggctcactgcagccccaaccttcagggctcaggtgatcctcccncctcagccacccaagtngctgggaccncaggtgcatgccaccatgcctggctaacttatttttatatattgtagagacggagtctccctatgttgcctaggctgaccttgagctcttgggctcaggtgatcctcccnccttggcctcccaaagtgttgggattataggcgtgagccactgtgtccagccttttcctctgtatcttgtatccattccccagagcgatactgtgtatccttgaacagacggtttcttgaagtcagagtctatctcctctgtcacttctcccccttcattatctaagactgaggttgtggtttatatgcttagagttgaaagcatggggtccaacgtgttctgtactctgtagttccccagactcttccagggaaactacttagctctcaggtggttcttttctgtttttctcagagcaagttatctaataactgaagaggactctgccctttggcctgttcctgactttctaactccttttgctggaggaaggggaggttgaggggggtgccctgtggtgtgaaagccccacttgccctctcctctatactttcttccaatgcagacgggagaaagtatcataaatgtagtgactgtgggtcaggggagctctgagaggccagcacaggaaaccagaaacaaaatgagtcagttcgtaggtggcgatcagaggcaccctgctgagggtgcaaggccacaggtgatgcctcctcagtaggcccaggagcatcaaaacgggaacagtccctttcagccttcaggagcctcccaaatgtcacttagtgatgtcccattcacctgcttaaaggccctgcatcctgccaggtagttggtttgtccatagcatcctgagctctgcttgggtgagccagacaaaaagaatgattcctggccagagtagtgataccagggcccagacagaggcagagagtccggatagaagatcctgtaagctggggtagggagccgaggaggccatggagccaggggaatcattgaagtgagggacaatttctggaggagggaaactgagtaaggaaggcctggccaaggaccaagaaggggacagtatcctgatctatgaaagaagactcaagtggggattgacagagccagattgggtggagtccaagctttgggcaggtgagtgtccaggagatgagggctgagaatgggccttcagagcccagccagaaggggaaagcacaaagctccaccctccttcttcacatccctccatactgctcaaatcccaggtcttcaggcaccatggaggacaaacgcaacatccagatcatcgagtgggaacacctggacaagaagaagttctacgtgtttggtgtggcaatgacaatgatgatccgtgtcagtgtctacccattcaccctcatccgcacccggttgcaagttcagaaggggaagagcctctaccatgggaccttcgatgccttcatcaagatcctgcgagcagatggtatcactggcctctaccgagggttcctggtcaataccttcaccctcatctctggccagtgttatgtcaccacttatgagctcacccggaagtttgtagctgactacagccagagtaacacagtcaaatcactggtggctggtggctcagcctcccttgtggcccagagcatcacagtgcccattgatgtagtctcccagcacctgatgatgcaacgcaagggtgagaaaatgggccgctttcaggtgcgggggaacccagagggacaaggggtagttgcctttggccaaaccaaggacatcatcaggcagatcctgcaggctgatggacttcgcggcttctatcgaggctatgtggcttcactgcttacctatatcccaaacagtgctgtctggtggcccttctatcacttctatgcagagcagctctcctacctgtgtcctaaggagtgccctcacattgtctttcaagctgtctcggggcccctggctgcagccactgcctccatcctcaccaatcccatggatgtcatacgaacccgtgtgcaggttgagggcaagaactccatcatcctgaccttcagacagctgatggcagaagaagggccttggggcctcatgaagggcctctcggccagaatcatctcagccacaccttccaccattgtcattgtggtgggctatgagagcctcaagaaactcagcctccgacctgagctggtggactcgagacactggtaaccagtggtggggagagaagcctgctgttttccacactaccgtgggtcaggggcagagtggagaggacagcaccctctccaggtgctcccaccacacacccagccctgccctgggccaagtggcctatctgggatagggatagagactttgaactgctcttgctgaagaggctccacgcctggatcccttgcccccactatttaaaattctcttctgagctgggctccctcactcagtccctgtatttgatactggcctaaagaccccaccccccaccctgccagcccttcttctggcttccccttccatctgtgtccctgagaccctgagaagagctgtacatagagcttgcttactaccactggttcttcctcttgggctttcagcccagactccaagcagctgctatcaaccctctctcccttcatctcttagccttgcttatttttattttgggaccgagctgcccactagatgactctgcttttccctgcatttggggctaaggtgccaggtacttatttgcacagggagcaggagcagcaaaaaatctctggttctccagagcactcgtcctctctttggaggggttattaggttgggagaaatgttgatacttttgttttgtgtgtgtgtgtgtgtgtgtgtgtgtgtgtgtgtgtgtgtgtgttttaacatctgtgaaccaggctattagtcctgctaaagcgccaatcctgctgtcagagctcacccccttcctaagacaggtagaaaaatgtaatgtagctttttccacaagccagttccctgtcccttcagtctcaggagccctaggagagtctaagctggggcatcccctggcccagaggactcccgtggtgggcacagttctaagtggatcaggctgtcttgggtgcactggacttggagcactaccttgagaagtcaggttgagaaagtagttgatctagaaggcaacaagtgggcatgtgttccccagcacattacccaggccagcagagccaaacctaggagagggcagtgggtagattctctgccccaggcagccatgacatacacataaataccccaatcactcagacttacggcaacaagtgttgtctcactatggtgatctctaagatccacatcactggatgcgtagtcatcccagtcatggtaccctgtggaggaatgctggaagaacataaagagcagttcagaaagtcacccaataccaggaccactgcatttaccagcctgatactgccaagattatctgatgctctcctcaggagctaggagaggagtgctccttcctccctaccgctactctccccaagcctgtgttgcaggtagagaggtgcagcaaatagagaaggcatgtcaaaccctgcatttctacctgagacgtgtgacctggatgatcctccaaaccctattggtcccaccccctgggaaaggccatggtgccagtttgaaaggtgctagctacctgaagccttgatatttcttcatggctgccgcacattcttccaccttggccagaacaggttctgaaaaccacttctctaccttcaccaccaccactgcccatcttgatctctttgagggttttcccatttcacttgatcttatttttgtttatcccttcctgcactttgtcaagagagtcctccagtttctatccaggaatgttcacatccaaagggttggacccacggatcattctgaatcttcctgcccctcctcactgcttaaccctgagaaccacaaatataatggaagcagttccccccaccctcaccccatctctttaagctcatcctagcaagacctctagagaccctagagactcgactttagtccttccccgccatggcacagtggggaaggtgtcaatggggagtgtcacggacaggaggtaggatcctgccgctcgcgtcttagtgtttctccctcaagactttccttctgttttgttgtcttgtgcagtattttacagcccctcttgtgtttttctttatttctcgtacacacacgcagttttaagggtgatgtgtgtataattaaaaggacccttggcccatactttcctaattctttagggactgggattgggtttgactgaaatatgttttggtggggatgggacggtggacttccattctccctaaactggagttttggtcggtaatcaaaactaaaagaaacctctgggagactggaaacctgattggagcactgaggaacaagggaatgaaaaggcagactctctgaacgtttgatgaaatggactcttgtgaaaattaacagtgaatattcactgttgcactgtacgaagtctctgaaatgtaattaaaagtttttattgagcccccga

SEQ ID NO: 428954 - DNA, 3450 bp, Homo sapiens
cactcctgggaggctcaaaggctcaaacgccattggcagaatccccgacagctcatcctccgccccctgcagggggcggtaatgacagagtcctaatttccggttccggcagtaccggtagcccagtcgagatggaggaagatgcgaccggcagacggcattcgctgggaacgacggatagactgggggctgcggcctagaggtccgggcttggagttcgcctcagacgcggtggagccgccggagtctgagaaggtcttcaggcaccatggaggacaaacgcaacatccagatcatcgagtgggaacacctggacaagaagaagttctacgtgtttggtgtggcaatgacaatgatgatccgtgtcagtgtctacccattcaccctcatccgcacccggttgcaagttcagaaggggaagagcctctaccatgggaccttcgatgccttcatcaagatcctgcgagcagatggtatcactggcctctaccgagggttcctggtcaataccttcaccctcatctctggccagtgttatgtcaccacttatgagctcacccggaagtttgtagctgactacagccagagtaacacagtcaaatcactggtggctggtggctcagcctcccttgtggcccagagcatcacagtgcccattgatgtagtctcccagcacctgatgatgcaacgcaagggtgagaaaatgggccgctttcaggtgcgggggaacccagagggacaaggggtagttgcctttggccaaaccaaggacatcatcaggcagatcctgcaggctgatggacttcgcggcttctatcgaggctatgtggcttcactgcttacctatatcccaaacagtgctgtctggtggcccttctatcacttctatgcaggttgagggcaagaactccatcatcctgaccttcagacagctgatggcagaagaagggccttggggcctcatgaagggcctctcggccagaatcatctcagccacaccttccaccattgtcattgtggtgggctatgagagcctcaagaaactcagcctccgacctgagctggtggactcgagacactggtaaccagtggtggggagagaagcctgctgttttccacactaccgtgggtcaggggcagagtggagaggacagcaccctctccaggtgctcccaccacacacccagccctgccctgggccaagtggcctatctgggatagggatagagactttgaactgctcttgctgaagaggctccacgcctggatcccttgcccccactatttaaaattctcttctgagctgggctccctcactcagtccctgtatttgatactggcctaaagaccccaccccccaccctgccagcccttcttctggcttccccttccatctgtgtccctgagaccctgagaagagctgtacatagagcttgcttactaccactggttcttcctcttgggctttcagcccagactccaagcagctgctatcaaccctctctcccttcatctcttagccttgcttatttttattttgggaccgagctgcccactagatgactctgcttttccctgcatttggggctaaggtgccaggtacttatttgcacagggagcaggagcagcaaaaaatctctggttctccagagcactcgtcctctctttggaggggttattaggttgggagaaatgttgatacttttgttttgtgtgtgtgtgtgtgtgtgtgtgtgtgtgtgtgtgtgtgtgtgttttaacatctgtgaaccaggctattagtcctgctaaagcgccaatcctgctgtcagagctcacccccttcctaagacaggtagaaaaatgtaatgtagctttttccacaagccagttccctgtcccttcagtctcaggagccctaggagagtctaagctggggcatcccctggcccagaggactcccgtggtgggcacagttctaagtggatcaggctgtcttgggtgcactggacttggagcactaccttgagaagtcaggttgagaaagtagttgatctagaaggcaacaagtgggcatgtgttccccagcacattacccaggccagcagagccaaacctaggagagggcagtgggtagattctctgccccaggcagccatgacatacacataaataccccaatcactcagacttacggcaacaagtgttgtctcactatggtgatctctaagatccacatcactggatgcgtagtcatcccagtcatggtaccctgtggaggaatgctggaagaacataaagagcagttcagaaagtcacccaataccaggaccactgcatttaccagcctgatactgccaagattatctgatgctctcctcaggagctaggagaggagtgctccttcctccctaccgctactctccccaagcctgtgttgcaggtagagaggtgcagcaaatagagaaggcatgtcaaaccctgcatttctacctgagacgtgtgacctggatgatcctccaaaccctattggtcccaccccctgggaaaggccatggtgccagtttgaaaggtgctagctacctgaagccttgatatttcttcatggctgccgcacattcttccaccttggccagaacaggttctgaaaaccacttctctaccttcaccaccaccactgcccatcttgatctctttgagggttttcccatttcacttgatcttatttttgtttatcccttcctgcactttgtcaagagagtcctccagtttctatccaggaatgttcacatccaaagggttggacccacggatcattctgaatcttcctgcccctcctcactgcttaaccctgagaaccacaaatataatggaagcagttccccccaccctcaccccatctctttaagctcatcctagcaagacctctagagaccctagagactcgactttagtccttccccgccatggcacagtggggaaggtgtcaatggggagtgtcacggacaggaggtaggatcctgccgctcgcgtcttagtgtttctccctcaagactttccttctgttttgttgtcttgtgcagtattttacagcccctcttgtgtttttctttatttctcgtacacacacgcagttttaagggtgatgtgtgtataattaaaaggacccttggcccatactttcctaattctttagggactgggattgggtttgactgaaatatgttttggtggggatgggacggtggacttccattctccctaaactggagttttggtcggtaatcaaaactaaaagaaacctctgggagactggaaacctgattggagcactgaggaacaagggaatgaaaaggcagactctctgaacgtttgatgaaatggactcttgtgaaaattaacagtgaatattcactgttgcactgtacgaagtctctgaaatgtaattaaaagtttttattgagcccccga

SEQ ID NO: 428955 - DNA, 2777 bp, Homo sapiens
ttgggaaagccacctggtagaagcagcaagcacagtgagggcagaccggtggtgctttgtgtctttagccattgtctttccctggattccagagcagctctcctacctgtgtcctaaggagtgccctcacattgtctttcaagctgtctcggggcccctggctgcagccactgcctccatcctcaccaatcccatggatgtcatacgaacccgtgtgcaggttgagggcaagaactccatcatcctgaccttcagacagctgatggcagaagaagggccttggggcctcatgaagggcctctcggccagaatcatctcagccacaccttccaccattgtcattgtggtgggctatgagagcctcaagaaactcagcctccgacctgagctggtggactcgagacactggtaaccagtggtggggagagaagcctgctgttttccacactaccgtgggtcaggggcagagtggagaggacagcaccctctccaggtgctcccaccacacacccagccctgccctgggccaagtggcctatctgggatagggatagagactttgaactgctcttgctgaagaggctccacgcctggatcccttgcccccactatttaaaattctcttctgagctgggctccctcactcagtccctgtatttgatactggcctaaagaccccaccccccaccctgccagcccttcttctggcttccccttccatctgtgtccctgagaccctgagaagagctgtacatagagcttgcttactaccactggttcttcctcttgggctttcagcccagactccaagcagctgctatcaaccctctctcccttcatctcttagccttgcttatttttattttgggaccgagctgcccactagatgactctgcttttccctgcatttggggctaaggtgccaggtacttatttgcacagggagcaggagcagcaaaaaatctctggttctccagagcactcgtcctctctttggaggggttattaggttgggagaaatgttgatacttttgttttgtgtgtgtgtgtgtgtgtgtgtgtgtgtgtgtgtgtgtgtgtgttttaacatctgtgaaccaggctattagtcctgctaaagcgccaatcctgctgtcagagctcacccccttcctaagacaggtagaaaaatgtaatgtagctttttccacaagccagttccctgtcccttcagtctcaggagccctaggagagtctaagctggggcatcccctggcccagaggactcccgtggtgggcacagttctaagtggatcaggctgtcttgggtgcactggacttggagcactaccttgagaagtcaggttgagaaagtagttgatctagaaggcaacaagtgggcatgtgttccccagcacattacccaggccagcagagccaaacctaggagagggcagtgggtagattctctgccccaggcagccatgacatacacataaataccccaatcactcagacttacggcaacaagtgttgtctcactatggtgatctctaagatccacatcactggatgcgtagtcatcccagtcatggtaccctgtggaggaatgctggaagaacataaagagcagttcagaaagtcacccaataccaggaccactgcatttaccagcctgatactgccaagattatctgatgctctcctcaggagctaggagaggagtgctccttcctccctaccgctactctccccaagcctgtgttgcaggtagagaggtgcagcaaatagagaaggcatgtcaaaccctgcatttctacctgagacgtgtgacctggatgatcctccaaaccctattggtcccaccccctgggaaaggccatggtgccagtttgaaaggtgctagctacctgaagccttgatatttcttcatggctgccgcacattcttccaccttggccagaacaggttctgaaaaccacttctctaccttcaccaccaccactgcccatcttgatctctttgagggttttcccatttcacttgatcttatttttgtttatcccttcctgcactttgtcaagagagtcctccagtttctatccaggaatgttcacatccaaagggttggacccacggatcattctgaatcttcctgcccctcctcactgcttaaccctgagaaccacaaatataatggaagcagttccccccaccctcaccccatctctttaagctcatcctagcaagacctctagagaccctagagactcgactttagtccttccccgccatggcacagtggggaaggtgtcaatggggagtgtcacggacaggaggtaggatcctgccgctcgcgtcttagtgtttctccctcaagactttccttctgttttgttgtcttgtgcagtattttacagcccctcttgtgtttttctttatttctcgtacacacacgcagttttaagggtgatgtgtgtataattaaaaggacccttggcccatactttcctaattctttagggactgggattgggtttgactgaaatatgttttggtggggatgggacggtggacttccattctccctaaactggagttttggtcggtaatcaaaactaaaagaaacctctgggagactggaaacctgattggagcactgaggaacaagggaatgaaaaggcagactctctgaacgtttgatgaaatggactcttgtgaaaattaacagtgaatattcactgttgcactgtacgaagtctctgaaatgtaattaaaagtttttattgagcccccga

SEQ ID NO: 428956 - DNA, 981 bp, Homo sapiens
cactcctgggaggctcaaaggctcaaacgccattggcagaatccccgacagctcatcctccgccccctgcagggggcggtaatgacagagtcctaatttccggttccggcagtaccggtagcccagtcgagatggaggaagatgcgaccggcagacggcattcgctgggaacgacggatagactgggggctgcggcctagaggtccgggcttggagttcgcctcagacgcggtggagccgccggagtctgagaaggtcttcaggcaccatggaggacaaacgcaacatccagatcatcgagtgggaacacctggacaagaagaagttctacgtgtttggtgtggcaatgacaatgatgatccgtgtcagtgtctacccattcaccctcatccgcacccggttgcaagttcagaaggggaagagcctctaccatgggaccttcgatgccttcatcaagatcctgcgagcagatggtatcactggcctctaccgagggttcctggtcaataccttcaccctcatctctggccagtgttatgtcaccacttatgagctcacccggaagtttgtagctgactacagccagagtaacacagtcaaatcactggtggctggtggctcagcctcccttgtggcccagagcatcacagtgcccattgatgtagtctcccagcacctgatgatgcaacgcaagggtgagaaaatgggccgctttcaggtgcgggggaacccagagggacaaggggtagttgcctttggccaaaccaaggacatcatcaggcagatcctgcaggctgatggacttcgcggcttctatcgaggctatgtggcttcactgcttacctatatcccaaacagtgctgtctggtggcccttctatcacttctatgcaggtaagcaggggccaggacagtgggggaggaaggtgggatttctaatggggctgagatactgttgctttgtgcatgttagagtggaggt

SEQ ID NO: 428957 - DNA, 722 bp, Homo sapiens
  misc_feature (7)..(8): n is a, c, g, or t
gtagtcnnggaggagggacctacaaagactggaaactattcttagctccgtcactgactccaagttcatcccctctgtctttcagtttgggtaaacaatcatggggcctggaaaatgaggctttaattgtaagatgtcctagacaaggaaaacctagttacaccgtggattggtattactcacaaacaaacaaaagtattcccactcaggaaagaaatcgtgtgtttgcctcaggccaacttctgaagtttctaccagctgcagttgctgattctggtatttatacctgtattgtcagaaggtattatgcagaaggctcccatcttctttcaccctgctcccctttcttcagtggttgattgcctgagctgcccttgctttcattccttccctagtcctttctggaacagttaaatttataaaatgatttgaataaaagtgatttggataaacttctaggaatactatcaggttgaggtctagctcattctgagctatttggatttacagttgcagggattgatttgtagctgacttagagaaaaacctagctttcctagtgaccaagataactgagagcaattgcttacttttggctggaattaagaacaaactagcacagaaaatagtaatctggatgttttccatctcagggggcctctagtaggtgaaaaggggcttctaaccttcaagttaagccacagaaggctgatgagattgtg

SEQ ID NO: 428958 - DNA, 3896 bp, Homo sapiens
  misc_feature (7)..(8): n is a, c, g, or t
gtagtcnnggaggagggacctacaaagactggaaactattcttagctccgtcactgactccaagttcatcccctctgtctttcagtttggttgagatataggctactcttcccaactcagtcttgaagagtatcaccaactgcctcatgtgtggtgaccttcactgtcgtatgccagtgactcatctggagtaatctcaacaacgagttaccaatacttgctcttgattgataaacagaatggggttttggatcttagcaattctcacaattctcatgtattccacagcagcaaagtttagtaaacaatcatggggcctggaaaatgaggctttaattgtaagatgtcctagacaaggaaaacctagttacaccgtggattggtattactcacaaacaaacaaaagtattcccactcaggaaagaaatcgtgtgtttgcctcaggccaacttctgaagtttctaccagctgcagttgctgattctggtatttatacctgtattgtcagaagtcccacattcaataggactggatatgcgaatgtcaccatatataaaaaacaatcagattgcaatgttccagattatttgatgtattcaacagtatctggatcagaaaaaaattccaaaatttattgtcctaccattgacctctacaactggacagcacctcttgagtggtttaagaattgtcaggctcttcaaggatcaaggtacagggcgcacaagtcatttttggtcattgataatgtgatgactgaggacgcaggtgattacacctgtaaatttatacacaatgaaaatggagccaattatagtgtgacggcgaccaggtccttcacggtcaaggatgagcaaggcttttctctgtttccagtaatcggagcccctgcacaaaatgaaataaaggaagtggaaattggaaaaaacgcaaacctaacttgctctgcttgttttggaaaaggcactcagttcttggctgccgtcctgtggcagcttaatggaacaaaaattacagactttggtgaaccaagaattcaacaagaggaagggcaaaatcaaagtttcagcaatgggctggcttgtctagacatggttttaagaatagctgacgtgaaggaagaggatttattgctgcagtacgactgtctggccctgaatttgcatggcttgagaaggcacaccgtaagactaagtaggaaaaatccaagtaaggagtgtttctgagactttgatcacctgaactttctctagcaagtgtaagcagaatggagtgtggttccaagagatccatcaagacaatgggaatggcctgtgccataaaatgtgcttctcttcttcgggatgttgtttgctgtctgatctttgtagactgttcctgtttgctgggagcttctctgctgcttaaattgttcgtcctcccccactccctcctatcgttggtttgtctagaacactcagctgcttctttggtcatccttgttttctaactttatgaactccctctgtgtcactgtatgtgaaaggaaatgcaccaacaaccgtaaactgaacgtgttcttttgtgctcttttataacttgcattacatgttgtaagcatggtccgttctatacctttttctggtcataatgaacactcattttgttagcgagggtggtaaagtgaacaaaaaggggaagtatcaaactactgccatttcagtgagaaaatcctaggtgctactttataataagacatttgttaggccattcttgcattgatataaagaaatacctgagactgggtgatttatatgaaaagaggtttaattggctcacagttctgcaggctgtatgggaagcatggcggcatctgcttctggggacacctcaggagctttactcatggcagaaggcaaagcaaaggcaggcacttcacacagtaaaagcaggagcgagagagaggtgccacactgaaacagccagatctcatgagaagtcactcactattgcaaggacagcatcaaagagatggtgctaaaccattcatgatgaactcacccccatgatccaatcacctcccaccaggctccacctcgaatactggggattaccattcagcatgagatttgggcaggaacacagacccaaaccataccacacacattatcatcgttaaactttgtaaagtatttaaggtacatggaacacacgggaagtctggtagctcagcccatttctttattgcatctgttattcaccatgtaattcaggtaccacgtattccagggagcctttcttggccctcagtttgcagtatacacactttccaagtactcttgtagcatcctgtttgtatcatagcactggtcacattgccttacctaaatctgtttgacagtctgctcaacacgactgcaagctccatgagggcagggacatcatctcttccatctttgggtccttagtgcaatacctggcagctagccagtgctcagctaaatatttgttgactgaataaatgaatgcacaaccaaattattgataccaaatgttttttttgtgtacatttctacttctctagctataagtcttaattatacaacaaaatactatttttatatttatgtttggtaaattcaataactttcctcatcatttggaaagtcaaattgtttattgcttccctacagttttttctgaatctagcaggattttaatgatatcattataatttgacacaataaaaggacaacatgaaactgatgaatctttattgggttaatttcagacactatataatcttttaaaaatgtaacattcttttttatatataaataattggtggcatcacaaatagccaaagcagggtggagagagtgatccttcctgggtgcaggcaagaaggggatatgttttctacagagttttcaaaacagtgataaagctgtctacaagtcattgtgctttttatcatcactatgcccagacaatgtgaaacatcagagatgaagtgctcttcccacagaggtggactgatccttctccccactcccttggtgtgtctctgaatgcaatgttgtcttggaaaacagctttccaagcatttcactcctgagcacttgccagtttcctcacttgttcttcacatatccaggcaaagacatcctgtttgctatatgaagcattgtatcccgtataaaaggaaggaaagagagaaatatatttttacactcatcactcctcaggggctgtacaatcatgtagaaattgtttaatgtgcctgtcaaatagccaaagagtgttaaaccctgagttcccacccatgtgtgtggtatggttaggattcatccagatacacagagagaggcacaacaggaggagaaaggataggggtgtggggacagcgggcccccaatatggtgtaatcgtggcaggtctctgcctgaagtgctatgtggggtttttcttgttttaattttgactttaacccctgatttgtaagtttttcataaaataaacagaatcataactcatgtagatggctataagtgccgtagtgttctgtgggtctctggtgtctgccagtgataagtgtggcaccccaggaaggctgtggaccccatcaaggtgctatgtgagggccatgcttggggtggtggtgggcccagtagaccctgcagccatccatccagcctgcccactcacactgcccttgtgtactcctgctttgctacgttatcattgatcaatgtccctggttacctatgtgtttgaattatcttcgtgttacaggtgtttaatgattttgctccttctagcttatttgtatttcacctgtttttctttaaatcaacatggttacactctgtttcagcaactgtataaattaaacacaaattattactactgctatt

SEQ ID NO: 428959 - DNA, 3684 bp, Homo sapiens
  misc_feature (7)..(8): n is a, c, g, or t
gtagtcnnggaggagggacctacaaagactggaaactattcttagctccgtcactgactccaagttcatcccctctgtctttcagtttggttgagatataggctactcttcccaactcagtcttgaagagtatcaccaactgcctcatgtgtggtgaccttcactgtcgtatgccagtgactcatctggagtaatctcaacaacgagttaccaatacttgctcttgattgataaacagaatggggttttggatcttagcaattctcacaattctcatgtattccacagcagcaaagtttagtaaacaatcatggggcctggaaaatgaggctttaattgtaagatgtcctagacaaggaaaacctagttacaccgtggattggtattactcacaaacaaacaaaagtattcccactcaggaaagaaatcgtgtgtttgcctcaggccaacttctgaagtttctaccagctgcagttgctgattctggtatttatacctgtattgtcagaagtcccacattcaataggactggatatgcgaatgtcaccatatataaaaaacaatcagattgcaatgttccagattatttgatgtattcaacagtatctggatcagaaaaaaattccaaaatttattgtcctaccattgacctctacaactggacagcacctcttgagtggtttaagaattgtcaggctcttcaaggatcaaggtacagggcgcacaagtcatttttggtcattgataatgtgatgactgaggacgcaggtgattacacctgtaaatttatacacaatgaaaatggagccaattatagtgtgacggcgaccaggtccttcacggtcaaggtttggtgtcagagtttctgcaaattaaaaaagagcttaatctttagtaatactcattggattcaaagtctaatgagaggctttgtgatggtatactatggtgtacataaatgttgtcgagtggtttttaatctttgtttgcaatactttcaacatcatcaatggccttgaatgagcaaggcttttctctgtttccagtaatcggagcccctgcacaaaatgaaataaaggaagtggaaattggaaaaaacgcaaacctaacttgctctgcttgttttggaaaaggcactcagttcttggctgccgtcctgtggcagcttaatggaacaaaaattacagactttggtgaaccaagaattcaacaagaggaagggcaaaatcaaagtttcagcaatgggctggcttgtctagacatggttttaagaatagctgacgtgaaggaagaggatttattgctgcagtacgactgtctggccctgaatttgcatggcttgagaaggcacaccgtaagactaagtaggaaaaatccaagtaaggagtgtttctgagactttgatcacctgaactttctctagcaagtgtaagcagaatggagtgtggttccaagagatccatcaagacaatgggaatggcctgtgccataaaatgtgcttctcttcttcgggatgttgtttgctgtctgatctttgtagactgttcctgtttgctgggagcttctctgctgcttaaattgttcgtcctcccccactccctcctatcgttggtttgtctagaacactcagctgcttctttggtcatccttgttttctaactttatgaactccctctgtgtcactgtatgtgaaaggaaatgcaccaacaaccgtaaactgaacgtgttcttttgtgctcttttataacttgcattacatgttgtaagcatggtccgttctatacctttttctggtcataatgaacactcattttgttagcgagggtggtaaagtgaacaaaaaggggaagtatcaaactactgccatttcagtgagaaaatcctaggtgctactttataataagacatttgttaggccattcttgcattgatataaagaaatacctgagactgggtgatttatatgaaaagaggtttaattggctcacagttctgcaggctgtatgggaagcatggcggcatctgcttctggggacacctcaggagctttactcatggcagaaggcaaagcaaaggcaggcacttcacacagtaaaagcaggagcgagagagaggtgccacactgaaacagccagatctcatgagaagtcactcactattgcaaggacagcatcaaagagatggtgctaaaccattcatgatgaactcacccccatgatccaatcacctcccaccaggctccacctcgaatactggggattaccattcagcatgagatttgggcaggaacacagacccaaaccataccacacacattatcatcgttaaactttgtaaagtatttaaggtacatggaacacacgggaagtctggtagctcagcccatttctttattgcatctgttattcaccatgtaattcaggtaccacgtattccagggagcctttcttggccctcagtttgcagtatacacactttccaagtactcttgtagcatcctgtttgtatcatagcactggtcacattgccttacctaaatctgtttgacagtctgctcaacacgactgcaagctccatgagggcagggacatcatctcttccatctttgggtccttagtgcaatacctggcagctagccagtgctcagctaaatatttgttgactgaataaatgaatgcacaaccaaattattgataccaaatgttttttttgtgtacatttctacttctctagctataagtcttaattatacaacaaaatactatttttatatttatgtttggtaaattcaataactttcctcatcatttggaaagtcaaattgtttattgcttccctacagttttttctgaatctagcaggattttaatgatatcattataatttgacacaataaaaggacaacatgaaactgatgaatctttattgggttaatttcagacactatataatcttttaaaaatgtaacattcttttttatatataaataattggtggcatcacaaatagccaaagcagggtggagagagtgatccttcctgggtgcaggcaagaaggggatatgttttctacagagttttcaaaacagtgataaagctgtctacaagtcattgtgctttttatcatcactatgcccagacaatgtgaaacatcagagatgaagtgctcttcccacagaggtggactgatccttctccccactcccttggtgtgtctctgaatgcaatgttgtcttggaaaacagctttccaagcatttcactcctgagcacttgccagtttcctcacttgttcttcacatatccaggcaaagacatcctgtttgctatatgaagcattgtatcccgtataaaaggaaggaaagagagaaatatatttttacactcatcactcctcaggggctgtacaatcatgtagaaattgtttaatgtgcctgtcaaatagccaaagagtgttaaaccctgagttcccacccatgtgtgtggtatggttaggattcatccagatacacagagagaggcacaacaggaggagaaaggataggggtgtggggacagcgggcccccaatatggtgtaatcgtggcaggtctctgcctgaagtgctatgtggggtttttcttgttttaattttgactttaacccctgatttgtaagtttttcataaaataaacagaatcataactc

SEQ ID NO: 428960 - DNA, 2361 bp, Homo sapiens
ttagaaggtcaatgacctcgcgatcacctgcctcggacccccataatctgtccagcgtttctctcaagtcccctcttttgatcacctgaactttctctagcaagtgtaagcagaatggagtgtggttccaagagatccatcaagacaatgggaatggcctgtgccataaaatgtgcttctcttcttcgggatgttgtttgctgtctgatctttgtagactgttcctgtttgctgggagcttctctgctgcttaaattgttcgtcctcccccactccctcctatcgttggtttgtctagaacactcagctgcttctttggtcatccttgttttctaactttatgaactccctctgtgtcactgtatgtgaaaggaaatgcaccaacaaccgtaaactgaacgtgttcttttgtgctcttttataacttgcattacatgttgtaagcatggtccgttctatacctttttctggtcataatgaacactcattttgttagcgagggtggtaaagtgaacaaaaaggggaagtatcaaactactgccatttcagtgagaaaatcctaggtgctactttataataagacatttgttaggccattcttgcattgatataaagaaatacctgagactgggtgatttatatgaaaagaggtttaattggctcacagttctgcaggctgtatgggaagcatggcggcatctgcttctggggacacctcaggagctttactcatggcagaaggcaaagcaaaggcaggcacttcacacagtaaaagcaggagcgagagagaggtgccacactgaaacagccagatctcatgagaagtcactcactattgcaaggacagcatcaaagagatggtgctaaaccattcatgatgaactcacccccatgatccaatcacctcccaccaggctccacctcgaatactggggattaccattcagcatgagatttgggcaggaacacagacccaaaccataccacacacattatcatcgttaaactttgtaaagtatttaaggtacatggaacacacgggaagtctggtagctcagcccatttctttattgcatctgttattcaccatgtaattcaggtaccacgtattccagggagcctttcttggccctcagtttgcagtatacacactttccaagtactcttgtagcatcctgtttgtatcatagcactggtcacattgccttacctaaatctgtttgacagtctgctcaacacgactgcaagctccatgagggcagggacatcatctcttccatctttgggtccttagtgcaatacctggcagctagccagtgctcagctaaatatttgttgactgaataaatgaatgcacaaccaaattattgataccaaatgttttttttgtgtacatttctacttctctagctataagtcttaattatacaacaaaatactatttttatatttatgtttggtaaattcaataactttcctcatcatttggaaagtcaaattgtttattgcttccctacagttttttctgaatctagcaggattttaatgatatcattataatttgacacaataaaaggacaacatgaaactgatgaatctttattgggttaatttcagacactatataatcttttaaaaatgtaacattcttttttatatataaataattggtggcatcacaaatagccaaagcagggtggagagagtgatccttcctgggtgcaggcaagaaggggatatgttttctacagagttttcaaaacagtgataaagctgtctacaagtcattgtgctttttatcatcactatgcccagacaatgtgaaacatcagagatgaagtgctcttcccacagaggtggactgatccttctccccactcccttggtgtgtctctgaatgcaatgttgtcttggaaaacagctttccaagcatttcactcctgagcacttgccagtttcctcacttgttcttcacatatccaggcaaagacatcctgtttgctatatgaagcattgtatcccgtataaaaggaaggaaagagagaaatatatttttacactcatcactcctcaggggctgtacaatcatgtagaaattgtttaatgtgcctgtcaaatagccaaagagtgttaaaccctgagttcccacccatgtgtgtggtatggttaggattcatccagatacacagagagaggcacaacaggaggagaaaggataggggtgtggggacagcgggcccccaatatggtgtaatcgtggcaggtctctgcctgaagtgctatgtggggtttttcttgttttaattttgactttaacccctgatttgtaagtttttcataaaataaacagaatcataactc

SEQ ID NO: 428961 - DNA, 1010 bp, Homo sapiens
  misc_feature (7)..(8): n is a, c, g, or t
gtagtcnnggaggagggacctacaaagactggaaactattcttagctccgtcactgactccaagttcatcccctctgtctttcagtttggttgagatataggctactcttcccaactcagtcttgaagagtatcaccaactgcctcatgtgtggtgaccttcactgtcgtatgccagtgactcatctggagtaatctcaacaacgagttaccaatacttgctcttgattgataaacagaatggggttttggatcttagcaattctcacaattctcatgtattccacagcagcaaagtttagtaaacaatcatggggcctggaaaatgaggctttaattgtaagatgtcctagacaaggaaaacctagttacaccgtggattggtattactcacaaacaaacaaaagtattcccactcaggaaagaaatcgtgtgtttgcctcaggccaacttctgaagtttctaccagctgcagttgctgattctggtatttatacctgtattgtcagaagtcccacattcaataggactggatatgcgaatgtcaccatatataaaaaacaatcagattgcaatgttccagattatttgatgtattcaacagtatctggatcagaaaaaaattccaaaatttattgtcctaccattgacctctacaactggacagcacctcttgagtggtttaagaattgtcaggctcttcaaggatcaaggtacagggcgcacaagtcatttttggtcattgataatgtgatgactgaggacgcaggtgattacacctgtaaatttatacacaatgaaaatggagccaattatagtgtgacggcgaccaggtccttcacggtcaaggatgagcaaggtaaattttaaaggttagtttttaatgtaatattgtagctgaaatctttgaaataaagagttttttttttctttttaaaaaatataattcaataggaatgggcaaaatattgcagaagtgagtgtgcttaaatagttcaggaatttttgttc

SEQ ID NO: 428962 - DNA, 501 bp, Homo sapiens
attgtctgacttattttaacagtcccacattcaataggactggatatgcgaatgtcaccatatataaaaaacaatcagattgcaatgttccagattatttgatgtattcaacagtatctggatcagaaaaaaattccaaaatttattgtcctaccattgacctctacaactggacagcacctcttgagtggtttaaggtaagaagaaatttggaaggaaatagatgaaaattacacaattaaaatagacacaagtggccgggcacagtggctcatgcctgtaatcctagcactttgggaggccaaggcaggcagatcacttgaggccaggagtttgagaccagcctggccaacatgaggaaaccccatctctactaaaaatataaaaatcagctgggtgtggtggcacacacctgtaatcccagcagcttgggaggctgaggtatgaaaatcacttgaacctagaaggcagaggttacagcgagcccagattgcaccactc

SEQ ID NO: 428963 - DNA, 2058 bp, Homo sapiens
  misc_feature (1965)..(1965): n is a, c, g, or t
  misc_feature (1971)..(1971): n is a, c, g, or t
  misc_feature (2033)..(2033): n is a, c, g, or t
  misc_feature (2057)..(2057): n is a, c, g, or t
aaagagaggctggctgttgtatttagtaaagctataaagctgtaagagaaattggctttctgagttgtgaaactgtgggcagaaagttgaggaagaaagaactcaagtacaacccaatgaggttgagatataggctactcttcccaactcagtcttgaagagtatcaccaactgcctcatgtgtggtgaccttcactgtcgtatgccagtgactcatctggagtaatctcaacaacgagttaccaatacttgctcttgattgataaacagaatggggttttggatcttagcaattctcacaattctcatgtattccacagcagcaaagtttagtaaacaatcatggggcctggaaaatgaggctttaattgtaagatgtcctagacaaggaaaacctagttacaccgtggattggtattactcacaaacaaacaaaagtattcccactcaggaaagaaatcgtgtgtttgcctcaggccaacttctgaagtttctaccagctgcagttgctgattctggtatttatacctgtattgtcagaagtcccacattcaataggactggatatgcgaatgtcaccatatataaaaaacaatcagattgcaatgttccagattatttgatgtattcaacagtatctggatcagaaaaaaattccaaaatttattgtcctaccattgacctctacaactggacagcacctcttgagtggtttaagaattgtcaggctcttcaaggatcaaggtacagggcgcacaagtcatttttggtcattgataatgtgatgactgaggacgcaggtgattacacctgtaaatttatacacaatgaaaatggagccaattatagtgtgacggcgaccaggtccttcacggtcaaggatgagcaaggcttttctctgtttccagtaatcggagcccctgcacaaaatgaaataaaggaagtggaaattggaaaaaacgcaaacctaacttgctctgcttgttttggaaaaggcactcagttcttggctgccgtcctgtggcagcttaatggaacaaaaattacagactttggtgaaccaagaattcaacaagaggaagggcaaaatcaaagtttcagcaatgggctggcttgtctagacatggttttaagaatagctgacgtgaaggaagaggatttattgctgcagtacgactgtctggccctgaatttgcatggcttgagaaggcacaccgtaagactaagtaggaaaaatccaattgatcatcatagcatctactgcataattgcagtatgtagtgtatttttaatgctaatcaatgtcctggttatcatcctaaaaatgttctggattgaggccactctgctctggagagacatagctaaaccttacaagactaggaatgatggaaagctctatgatgcttatgttgtctacccacggaactacaaatccagtacagatggggccagtcgtgtagagcactttgttcaccagattctgcctgatgttcttgaaaataaatgtggctataccttatgcatttatgggagagatatgctacctggagaagatgtagtcactgcagtggaaaccaacatacgaaagagcaggcggcacattttcatcctgacccctcagatcactcacaataaggagtttgcctacgagcaggaggttgccctgcactgtgccctcatccagaacgacgccaaggtgatacttattgagatggaggctctgagcgagctggacatgctgcaggctgaggcgcttcaggactccctccagcatcttatgaaagtacaggggaccatcaagtggagggaggaccacattgccaataaaaggtccctgaattccaaattctggaagcacgtgaggtaccaaatgcctgtgccaagcaaaattcccagaaaggcctctagtttgactcccttggctgcccagaagcaatagtgcctgctgtgatgtgcaaaggnatctgngtttgaagctttcctgacttctcctagctggcttatgcccctgcactgaagtgtgaggagcnggaatattaaagggattcaggccnc

SEQ ID NO: 428964 - DNA, 3514 bp, Homo sapiens
  misc_feature (7)..(8): n is a, c, g, or t
gtagtcnnggaggagggacctacaaagactggaaactattcttagctccgtcactgactccaagttcatcccctctgtctttcagtttggttgagatataggctactcttcccaactcagtcttgaagagtatcaccaactgcctcatgtgtggtgaccttcactgtcgtatgccagtgactcatctggagtaatctcaacaacgagttaccaatacttgctcttgattgataaacagaatggggttttggatcttagcaattctcacaattctcatgtattccacagcagcaaagtttagtaaacaatcatggggcctggaaaatgaggctttaattgtaagatgtcctagacaaggaaaacctagttacaccgtggattggtattactcacaaacaaacaaaagtattcccactcaggaaagaaatcgtgtgtttgcctcaggccaacttctgaagtttctaccagctgcagttgctgattctggtatttatacctgtattgtcagaagtcccacattcaataggactggatatgcgaatgtcaccatatataaaaaacaatcagattgcaatgttccagattatttgatgtattcaacagtatctggatcagaaaaaaattccaaaatttattgtcctaccattgacctctacaactggacagcacctcttgagtggtttaagaattgtcaggctcttcaaggatcaaggtacagggcgcacaagtcatttttggtcattgataatgtgatgactgaggacgcaggtgattacacctgtaaatttatacacaatgaaaatggagccaattatagtgtgacggcgaccaggtccttcacggtcaaggatgagcaaggcttttctctgtttccagtaatcggagcccctgcacaaaatgaaataaaggaagtggaaattggaaaaaacgcaaacctaacttgctctgcttgttttggaaaaggcactcagttcttggctgccgtcctgtggcagcttaatggaacaaaaattacagactttggtgaaccaagaattcaacaagaggaagggcaaaatcaaagtttcagcaatgggctggcttgtctagacatggttttaagaatagctgacgtgaaggaagaggatttattgctgcagtacgactgtctggccctgaatttgcatggcttgagaaggcacaccgtaagactaagtaggaaaaatccaagtaaggagtgtttctgagactttgatcacctgaactttctctagcaagtgtaagcagaatggagtgtggttccaagagatccatcaagacaatgggaatggcctgtgccataaaatgtgcttctcttcttcgggatgttgtttgctgtctgatctttgtagactgttcctgtttgctgggagcttctctgctgcttaaattgttcgtcctcccccactccctcctatcgttggtttgtctagaacactcagctgcttctttggtcatccttgttttctaactttatgaactccctctgtgtcactgtatgtgaaaggaaatgcaccaacaaccgtaaactgaacgtgttcttttgtgctcttttataacttgcattacatgttgtaagcatggtccgttctatacctttttctggtcataatgaacactcattttgttagcgagggtggtaaagtgaacaaaaaggggaagtatcaaactactgccatttcagtgagaaaatcctaggtgctactttataataagacatttgttaggccattcttgcattgatataaagaaatacctgagactgggtgatttatatgaaaagaggtttaattggctcacagttctgcaggctgtatgggaagcatggcggcatctgcttctggggacacctcaggagctttactcatggcagaaggcaaagcaaaggcaggcacttcacacagtaaaagcaggagcgagagagaggtgccacactgaaacagccagatctcatgagaagtcactcactattgcaaggacagcatcaaagagatggtgctaaaccattcatgatgaactcacccccatgatccaatcacctcccaccaggctccacctcgaatactggggattaccattcagcatgagatttgggcaggaacacagacccaaaccataccacacacattatcatcgttaaactttgtaaagtatttaaggtacatggaacacacgggaagtctggtagctcagcccatttctttattgcatctgttattcaccatgtaattcaggtaccacgtattccagggagcctttcttggccctcagtttgcagtatacacactttccaagtactcttgtagcatcctgtttgtatcatagcactggtcacattgccttacctaaatctgtttgacagtctgctcaacacgactgcaagctccatgagggcagggacatcatctcttccatctttgggtccttagtgcaatacctggcagctagccagtgctcagctaaatatttgttgactgaataaatgaatgcacaaccaaattattgataccaaatgttttttttgtgtacatttctacttctctagctataagtcttaattatacaacaaaatactatttttatatttatgtttggtaaattcaataactttcctcatcatttggaaagtcaaattgtttattgcttccctacagttttttctgaatctagcaggattttaatgatatcattataatttgacacaataaaaggacaacatgaaactgatgaatctttattgggttaatttcagacactatataatcttttaaaaatgtaacattcttttttatatataaataattggtggcatcacaaatagccaaagcagggtggagagagtgatccttcctgggtgcaggcaagaaggggatatgttttctacagagttttcaaaacagtgataaagctgtctacaagtcattgtgctttttatcatcactatgcccagacaatgtgaaacatcagagatgaagtgctcttcccacagaggtggactgatccttctccccactcccttggtgtgtctctgaatgcaatgttgtcttggaaaacagctttccaagcatttcactcctgagcacttgccagtttcctcacttgttcttcacatatccaggcaaagacatcctgtttgctatatgaagcattgtatcccgtataaaaggaaggaaagagagaaatatatttttacactcatcactcctcaggggctgtacaatcatgtagaaattgtttaatgtgcctgtcaaatagccaaagagtgttaaaccctgagttcccacccatgtgtgtggtatggttaggattcatccagatacacagagagaggcacaacaggaggagaaaggataggggtgtggggacagcgggcccccaatatggtgtaatcgtggcaggtctctgcctgaagtgctatgtggggtttttcttgttttaattttgactttaacccctgatttgtaagtttttcataaaataaacagaatcataactc

SEQ ID NO: 428965 - DNA, 2026 bp, Homo sapiens
  misc_feature (7)..(8): n is a, c, g, or t
  misc_feature (1933)..(1933): n is a, c, g, or t
  misc_feature (1939)..(1939): n is a, c, g, or t
  misc_feature (2001)..(2001): n is a, c, g, or t
  misc_feature (2025)..(2025): n is a, c, g, or t
gtagtcnnggaggagggacctacaaagactggaaactattcttagctccgtcactgactccaagttcatcccctctgtctttcagtttggttgagatataggctactcttcccaactcagtcttgaagagtatcaccaactgcctcatgtgtggtgaccttcactgtcgtatgccagtgactcatctggagtaatctcaacaacgagttaccaatacttgctcttgattgataaacagaatggggttttggatcttagcaattctcacaattctcatgtattccacagcagcaaagtttagtaaacaatcatggggcctggaaaatgaggctttaattgtaagatgtcctagacaaggaaaacctagttacaccgtggattggtattactcacaaacaaacaaaagtattcccactcaggaaagaaatcgtgtgtttgcctcaggccaacttctgaagtttctaccagctgcagttgctgattctggtatttatacctgtattgtcagaagtcccacattcaataggactggatatgcgaatgtcaccatatataaaaaacaatcagattgcaatgttccagattatttgatgtattcaacagtatctggatcagaaaaaaattccaaaatttattgtcctaccattgacctctacaactggacagcacctcttgagtggtttaagaattgtcaggctcttcaaggatcaaggtacagggcgcacaagtcatttttggtcattgataatgtgatgactgaggacgcaggtgattacacctgtaaatttatacacaatgaaaatggagccaattatagtgtgacggcgaccaggtccttcacggtcaaggatgagcaaggcttttctctgtttccagtaatcggagcccctgcacaaaatgaaataaaggaagtggaaattggaaaaaacgcaaacctaacttgctctgcttgttttggaaaaggcactcagttcttggctgccgtcctgtggcagcttaatggaacaaaaattacagactttggtgaaccaagaattcaacaagaggaagggcaaaatcaaagtttcagcaatgggctggcttgtctagacatggttttaagaatagctgacgtgaaggaagaggatttattgctgcagtacgactgtctggccctgaatttgcatggcttgagaaggcacaccgtaagactaagtaggaaaaatccaattgatcatcatagcatctactgcataattgcagtatgtagtgtatttttaatgctaatcaatgtcctggttatcatcctaaaaatgttctggattgaggccactctgctctggagagacatagctaaaccttacaagactaggaatgatggaaagctctatgatgcttatgttgtctacccacggaactacaaatccagtacagatggggccagtcgtgtagagcactttgttcaccagattctgcctgatgttcttgaaaataaatgtggctataccttatgcatttatgggagagatatgctacctggagaagatgtagtcactgcagtggaaaccaacatacgaaagagcaggcggcacattttcatcctgacccctcagatcactcacaataaggagtttgcctacgagcaggaggttgccctgcactgtgccctcatccagaacgacgccaaggtgatacttattgagatggaggctctgagcgagctggacatgctgcaggctgaggcgcttcaggactccctccagcatcttatgaaagtacaggggaccatcaagtggagggaggaccacattgccaataaaaggtccctgaattccaaattctggaagcacgtgaggtaccaaatgcctgtgccaagcaaaattcccagaaaggcctctagtttgactcccttggctgcccagaagcaatagtgcctgctgtgatgtgcaaaggnatctgngtttgaagctttcctgacttctcctagctggcttatgcccctgcactgaagtgtgaggagcnggaatattaaagggattcaggccnc

SEQ ID NO: 428966 - DNA, 166 bp, Homo sapiens
cagggcgcacaagtcatttttggtcattgataatgtgatgactgaggacgcaggtgattacacctgtaaatttatacacaatgaaaatggagccaattatagtgtgacggcgaccaggtccttcacggtcaagggtaagctactgacattaatgagatagaatact

SEQ ID NO: 428967 - DNA, 987 bp, Homo sapiens
  misc_feature (881)..(881): n is a, c, g, or t
  misc_feature (896)..(896): n is a, c, g, or t
taggctagtacgaggctggtgtgaatcggccgagggaaatgctggggtgcagcttcaagcttaggaccacccaccatgcctatccaggtgctgaagggcctgaccatcactcattaagaacagaggaggctgcctgttactcctggtgttgcatccctccagacactctgctgtttcctgcctaggcgtggctgcagccatggctaggaaagcgctgccacccacccacctgggccagagctggttctgctcctgctgcagggacactgagctggctatctcggcgcttcgggcaagaactgcaacaggctctcctgggtcctgcaggtgtacagccgggcccctgccttgtgcctcagctctcgagagctgctgctgccgggtgacctgatccaacctgataaggtgccatcttcagctaccactgcaaggccctgagggcaacagcagcacggcactgcccacccggctgctgatggcctggtgccagctgggagtcctcccggcacttcgaggccactgagccacccttccagccccagcccaccatggacaggggtatccagcttcctcctcaacctcgtcctctgcccctgagccagtgacgcccaaggacatgcctgttacccaggtcctgtaccagcactagctggtcaagggcatgacagtgctggaggccgtcttggagatccaggccatcactggcagcaggctgctctccatggtgccagggcccgccaggccaccaggctcatgctgggacccaacccagtgcacaaggacttggctgctgagccacacacccaggagaaggtggataagtgggctaccaagggcttcctgcaggctaggggaggagcgggccccccgttccttgggcnggtctgggggggggnctccccggaacggcggctaggaaaaccgggcggccgggaaggcaaccggggcccgggcgccgcgggggggggcacgcccccgtgggggcca

SEQ ID NO: 428968 - DNA, 2292 bp, Homo sapiens
ctctcgtgtcgggccgccctcggggtcctttctcttcacggcccatctttgatgctgtcttcagaattgccggacgcaggggacaagacaatcgtttccatcatatccttgcccctttttgtcagccccagagacagcgtctcctcgcttgttcaggaagattctagcggaagcaggcagtattcctttccctaagcatgaaatggggtttcccaaacaggcgtgtgtattggacgcctcgggcggagcgcgggctggcgccgaggaccggccttgcgagcggcgcgcactataaaatggcgcgtgctgcaacccgcgcccgcttcggagagagaaatgctggggtgcagcttcaagcttaggaccacccaccatgcctatccaggtgctgaagggcctgaccatcactcattaagaacagaggaggctgcctgttactcctggtgttgcatccctccagacactctgctgtttcctgcctaggcgtggctgcagccatggctaggaaagcgctgccacccacccacctgggccagagctggttctgctcctgctgcagggacactgagctggctatctcggcgcttcgggcaagaactgcaacaggctctcctgggtcctgcaggtgtacagccgggcccctgccttgtgcctcagctctcgagagctgctgctgccgggtgacctgatccaacctgataaggtgccatcttcagctaccactgcaaggccctgagggcaacagcagcacggcactgcccacccggctgctgatggcctggtgccagctgggagtcctcccggcacttcgaggccactgagccacccttccagccccagcccaccatggacaggggtatccagcttcctcctcaacctcgtcctctgcccctgagccagtgacgcccaaggacatgcctgttacccaggtcctgtaccagcactagctggtcaagggcatgacagtgctggaggccgtcttggagatccaggccatcactggcagcaggctgctctccatggtgccagggcccgccaggccaccaggctcatgctgggacccaacccagtgcacaaggacttggctgctgagccacacacccaggagaaggtggataagtgggctaccaagggcttcctgcaggctaggggaggagccacccccgcttccctattgtgaccaggcctatggggaggagctgtccatacgccaccgtgagacctgggcctggctctcaaggacagacaccgcctggcctggtgctccaggggtgaagcaggccagaatcctgggggagctgctcctggtttgagctgcattcaggaagtgcgggacatggtaggggaggcaaaaagccttgggcactaccctccctgtggagctgttcggtgtccgtcgagctagccacaccctgacaccatgttcaagggtaccggaagagaagggtgtctgcccccaacctcccctgtgggtgtcactggccagatgtcatgagggaagcaggccttgtgagtggacactgaccatgagtccctggggggagtgatcccccaggcatcgtgtgccatgttgcacttctgcccaggcagcagggtgggtgggtaccatgggtgcccacccctccaccacatggggccccaaagcactgcaggccaagcagggcaaccccacacccttgacataaaagcatcttgaagcttttactccgtttttaaaaaaaaaaaaaaaaaaaaaaaaaaaaaaaaaaaaaaaaaaaaaaaaaaaaaaaaaaaaaaaataaaaaaagaaacaaaaacacagcaaaaagagaaatgaacaatagacaacagaccacagcacaaccacacaaacactagactaaaacaaaggaagggcgggcgggggccgtaacacgaacaccgaccgccggggggaggccagaaagcaacgacacccacccgaacatgtggtagaaagcagagccaccaccccaagtgggaaccaacataaaacacaccgcacgagcacgaacgcgccaccaccacaacaacaaccagaccggcgcacagagagacaaaaacacgcatgaaaactagagagacgaacgttgcgagagacacagacaccccacacgaggggggggagcagacagaactaacgagaacacccgcacacccggaagaagaagaagccgagcgcgcggagacaaaacgagacaaaacatacagagaggaacgcagagaaccacacaaaacagaaacagacgaacggcacgaaagcagactcgccgcggagaaacaaaacacaaaccg

SEQ ID NO: 428969 - DNA, 1781 bp, Homo sapiens
ctctcgtgtcgggccgccctcggggtcctttctcttcacggcccatctttgatgctgtcttcagaattgccggacgcaggggacaagacaatcgtttccatcatatccttgcccctttttgtcagccccagagacagcgtctcctcgcttgttcaggaagattctagcggaagcaggcagtattcctttccctaagcatgaaatggggtttcccaaacaggcgtgtgtattggacgcctcgggcggagcgcgggctggcgccgaggaccggccttgcgagcggcgcgcactataaaatggcgcgtgctgcaacccgcgcccgcttcggagagagaaatgctggggtgcagcttcaagcttaggaccacccaccatgcctatccaggtgctgaagggcctgaccatcactcattaagaacagaggaggctgcctgttactcctggtgttgcatccctccagacactctgctgtttcctgcctaggcgtggctgcagccatggctaggaaagcgctgccacccacccacctgggccagagctggttctgctcctgctgcagggacactgagctggctatctcggcgcttcgggcaagaactgcaacaggctctcctgggtcctgcaggtgtacagccgggcccctgccttgtgcctcagctctcgagagctgctgctgccgggtgacctgatccaacctgataaggtgccatcttcagctaccactgcaaggccctgagggcaacagcagcacggcactgcccacccggctgctgatggcctggtgccagctgggagtcctcccggcacttcgaggccactgagccacccttccagccccagcccaccatggacaggggtatccagcttcctcctcaacctcgtcctctgcccctgagccagtgacgcccaaggacatgcctgttacccaggtcctgtaccagcactagctggtcaagggcatgacagtgctggaggccgtcttggagatccaggccatcactggcagcaggctgctctccatggtgccagggcccgccaggccaccaggctcatgctgggacccaacccagtgcacaaggacttggctgctgagccacacacccaggagaaggtggataagtgggctaccaagggcttcctgcaggctaggggaggagccacccccgcttccctattgtgaccaggcctatggggaggagctgtccatacgccaccgtgagacctgggcctggctctcaaggacagacaccgcctggcctggtgctccaggggtgaagcaggccagaatcctgggggagctgctcctggtttgagctgcattcaggaagtgcgggacatggtaggggaggcaaaaagccttgggcactaccctccctgtggagctgttcggtgtccgtcgagctagccacaccctgacaccatgttcaagggtaccggaagagaagggtgtctgcccccaacctcccctgtgggtgtcactggccagatgtcatgagggaagcaggccttgtgagtggacactgaccatgagtccctggggggagtgatcccccaggcatcgtgtgccatgttgcacttctgcccaggcagcagggtgggtgggtaccatgggtgcccacccctccaccacatggggccccaaagcactgcaggccaagcagggcaaccccacacccttgacataaaagcatcttgaagcttttactccgtttttaaaaacacaccatcgccacgccacacaacaacaacaaaaacaacaaggggcgccccaaaaaaccccc

SEQ ID NO: 428970 - DNA, 1958 bp, Homo sapiens
ggatatagaaggaagcaaacgaggcctttgcttacctgcgggagtcgttctgaccgttcatgccacgtgagagggttttgttaacgttagtttttggcttaggtcctttaaggtcttgaacatcggtttcctgacttgagcggggcccatgcccctgccgaggaggctcagcctggaagcagctagcccatttcctatctcccccaccacgaccccagcaaggatctctacttgacttacctccttcaggcaaccacctagaaaatcgttgagtttgttcatgtcacaagtgaaagtattttttcatgcattcatcgttggcacgtcgtcctttggcaatattaaaatctaccaacaaatgggaaaagttaacatttgcaccatcttgccatattcaaaaaccttgtgcttaagtgttttgaaaagacagggtttcaccatattggccaggctggtctcgaactcctgacttcgtgatctgcccacctcggcttcccaaagtgctgaggttgcaggcgtgagccaccgtgcccggccgcgtttcctactctttaagctctgttagcttggcctctgtccctgaaggtgcagcttcaagcttaggaccacccaccatgcctatccaggtgctgaagggcctgaccatcactcattaagaacagaggaggctgcctgttactcctggtgttgcatccctccagacactctgctgtttcctgcctaggcgtggctgcagccatggctaggaaagcgctgccacccacccacctgggccagagctggttctgctcctgctgcagggacactgagctggctatctcggcgcttcgggcaagaactgcaacaggctctcctgggtcctgcaggtgtacagccgggcccctgccttgtgcctcagctctcgagagctgctgctgccgggtgacctgatccaacctgataaggtgccatcttcagctaccactgcaaggccctgagggcaacagcagcacggcactgcccacccggctgctgatggcctggtgccagctgggagtcctcccggcacttcgaggccactgagccacccttccagccccagcccaccatggacaggggtatccagcttcctcctcaacctcgtcctctgcccctgagccagtgacgcccaaggacatgcctgttacccaggtcctgtaccagcactagctggtcaagggcatgacagtgctggaggccgtcttggagatccaggccatcactggcagcaggctgctctccatggtgccagggcccgccaggccaccaggctcatgctgggacccaacccagtgcacaaggacttggctgctgagccacacacccaggagaaggtggataagtgggctaccaagggcttcctgcaggctaggggaggagccacccccgcttccctattgtgaccaggcctatggggaggagctgtccatacgccaccgtgagacctgggcctggctctcaaggacagacaccgcctggcctggtgctccaggggtgaagcaggccagaatcctgggggagctgctcctggtttgagctgcattcaggaagtgcgggacatggtaggggaggcaaaaagccttgggcactaccctccctgtggagctgttcggtgtccgtcgagctagccacaccctgacaccatgttcaagggtaccggaagagaagggtgtctgcccccaacctcccctgtgggtgtcactggccagatgtcatgagggaagcaggccttgtgagtggacactgaccatgagtccctggggggagtgatcccccaggcatcgtgtgccatgttgcacttctgcccaggcagcagggtgggtgggtaccatgggtgcccacccctccaccacatggggccccaaagcactgcaggccaagcagggcaaccccacacccttgacataaaagcatcttgaagcttttactccgtttttaaa

SEQ ID NO: 428971 - DNA, 1423 bp, Homo sapiens
  misc_feature (13)..(13): n is a, c, g, or t
  misc_feature (16)..(16): n is a, c, g, or t
  misc_feature (23)..(24): n is a, c, g, or t
ccagctggtacgnccnggggtanngatatcgtcgacccacgcgtcgctgggtgcagcttcaagcttaggaccacccaccatgcctatccaggtgctgaagggcctgaccatcactcattaagaacagaggaggctgcctgttactcctggtgttgcatccctccagacactctgctgtttcctgcctaggcgtggctgcagccatggctaggaaagcgctgccacccacccacctgggccagagctggttctgctcctgctgcagggacactgagctggctatctcggcgcttcgggcaagaactgcaacaggctctcctgggtcctgcaggtgtacagccgggcccctgccttgtgcctcagctctcgagagctgctgctgccgggtgacctgatccaacctgataaggtgccatcttcagctaccactgcaaggccctgagggcaacagcagcacggcactgcccacccggctgctgatggcctggtgccagctgggagtcctcccggcacttcgaggccactgagccacccttccagccccagcccaccatggacaggggtatccagcttcctcctcaacctcgtcctctgcccctgagccagtgacgcccaaggacatgcctgttacccaggtcctgtaccagcactagctggtcaagggcatgacagtgctggaggccgtcttggagatccaggccatcactggcagcaggctgctctccatggtgccagggcccgccaggccaccaggctcatgctgggacccaacccagtgcacaaggacttggctgctgagccacacacccaggagaaggtggataagtgggctaccaagggcttcctgcaggctaggggaggagccacccccgcttccctattgtgaccaggcctatggggaggagctgtccatacgccaccgtgagacctgggcctggctctcaaggacagacaccgcctggcctggtgctccaggggtgaagcaggccagaatcctgggggagctgctcctggtttgagctgcattcaggaagtgcgggacatggtaggggaggcaaaaagccttgggcactaccctccctgtggagctgttcggtgtccgtcgagctagccacaccctgacaccatgttcaagggtaccggaagagaagggtgtctgcccccaacctcccctgtgggtgtcactggccagatgtcatgagggaagcaggccttgtgagtggacactgaccatgagtccctggggggagtgatcccccaggcatcgtgtgccatgttgcacttctgcccaggcagcagggtgggtgggtaccatgggtgcccacccctccaccacatggggccccaaagcactgcaggccaagcagggcaaccccacacccttgacataaaagcatcttgaagcttttactccgtttttaaa

SEQ ID NO: 428972 - DNA, 1812 bp, Homo sapiens
ctatgaacgagcgaggagtgaggtggcccagaggatctaaagaaagcaaccaggtacaggccaggcgcggtggctcaggcctgtaattccagtacttagggaggccaggctggtctcgaactcctgacttcgtgatctgcccacctcggcttcccaaagtgctgaggttgcaggcgtgagccaccgtgcccggccgcgtttcctactctttaagctctgttagcttggcctctgtccctgaaggtaagtggcctcaggacctggttgcagaggggctggggctcccatgatgtccagcactgggctctgatcacccctgaggacacagtgcaccccaggacctttgacacctgggggtctgaggggccccagttttaatggcttgtggacttgcagactgtttcctcccccactctcactgtgtctttctgtgttacaggtgcagcttcaagcttaggaccacccaccatgcctatccaggtgctgaagggcctgaccatcactcattaagaacagaggaggctgcctgttactcctggtgttgcatccctccagacactctgctgtttcctgcctaggcgtggctgcagccatggctaggaaagcgctgccacccacccacctgggccagagctggttctgctcctgctgcagggacactgagctggctatctcggcgcttcgggcaagaactgcaacaggctctcctgggtcctgcaggtgtacagccgggcccctgccttgtgcctcagctctcgagagctgctgctgccgggtgacctgatccaacctgataaggtgccatcttcagctaccactgcaaggccctgagggcaacagcagcacggcactgcccacccggctgctgatggcctggtgccagctgggagtcctcccggcacttcgaggccactgagccacccttccagccccagcccaccatggacaggggtatccagcttcctcctcaacctcgtcctctgcccctgagccagtgacgcccaaggacatgcctgttacccaggtcctgtaccagcactagctggtcaagggcatgacagtgctggaggccgtcttggagatccaggccatcactggcagcaggctgctctccatggtgccagggcccgccaggccaccaggctcatgctgggacccaacccagtgcacaaggacttggctgctgagccacacacccaggagaaggtggataagtgggctaccaagggcttcctgcaggctaggggaggagccacccccgcttccctattgtgaccaggcctatggggaggagctgtccatacgccaccgtgagacctgggcctggctctcaaggacagacaccgcctggcctggtgctccaggggtgaagcaggccagaatcctgggggagctgctcctggtttgagctgcattcaggaagtgcgggacatggtaggggaggcaaaaagccttgggcactaccctccctgtggagctgttcggtgtccgtcgagctagccacaccctgacaccatgttcaagggtaccggaagagaagggtgtctgcccccaacctcccctgtgggtgtcactggccagatgtcatgagggaagcaggccttgtgagtggacactgaccatgagtccctggggggagtgatcccccaggcatcgtgtgccatgttgcacttctgcccaggcagcagggtgggtgggtaccatgggtgcccacccctccaccacatggggccccaaagcactgcaggccaagcagggcaaccccacacccttgacataaaagcatcttgaagcttttactccgtttttaaa

SEQ ID NO: 428973 - DNA, 1285 bp, Homo sapiens
  misc_feature (1179)..(1179): n is a, c, g, or t
  misc_feature (1194)..(1194): n is a, c, g, or t
ctctcgtgtcgggccgccctcggggtcctttctcttcacggcccatctttgatgctgtcttcagaattgccggacgcaggggacaagacaatcgtttccatcatatccttgcccctttttgtcagccccagagacagcgtctcctcgcttgttcaggaagattctagcggaagcaggcagtattcctttccctaagcatgaaatggggtttcccaaacaggcgtgtgtattggacgcctcgggcggagcgcgggctggcgccgaggaccggccttgcgagcggcgcgcactataaaatggcgcgtgctgcaacccgcgcccgcttcggagagagaaatgctggggtgcagcttcaagcttaggaccacccaccatgcctatccaggtgctgaagggcctgaccatcactcattaagaacagaggaggctgcctgttactcctggtgttgcatccctccagacactctgctgtttcctgcctaggcgtggctgcagccatggctaggaaagcgctgccacccacccacctgggccagagctggttctgctcctgctgcagggacactgagctggctatctcggcgcttcgggcaagaactgcaacaggctctcctgggtcctgcaggtgtacagccgggcccctgccttgtgcctcagctctcgagagctgctgctgccgggtgacctgatccaacctgataaggtgccatcttcagctaccactgcaaggccctgagggcaacagcagcacggcactgcccacccggctgctgatggcctggtgccagctgggagtcctcccggcacttcgaggccactgagccacccttccagccccagcccaccatggacaggggtatccagcttcctcctcaacctcgtcctctgcccctgagccagtgacgcccaaggacatgcctgttacccaggtcctgtaccagcactagctggtcaagggcatgacagtgctggaggccgtcttggagatccaggccatcactggcagcaggctgctctccatggtgccagggcccgccaggccaccaggctcatgctgggacccaacccagtgcacaaggacttggctgctgagccacacacccaggagaaggtggataagtgggctaccaagggcttcctgcaggctaggggaggagcgggccccccgttccttgggcnggtctgggggggggnctccccggaacggcggctaggaaaaccgggcggccgggaaggcaaccggggcccgggcgccgcgggggggggcacgcccccgtgggggcca

SEQ ID NO: 428974 - DNA, 1404 bp, Homo sapiens
  misc_feature (1309)..(1309): n is a, c, g, or t
  misc_feature (1320)..(1320): n is a, c, g, or t
  misc_feature (1326)..(1327): n is a, c, g, or t
  misc_feature (1345)..(1345): n is a, c, g, or t
  misc_feature (1364)..(1364): n is a, c, g, or t
  misc_feature (1373)..(1373): n is a, c, g, or t
  misc_feature (1380)..(1380): n is a, c, g, or t
ctatgaacgagcgaggagtgaggtggcccagaggatctaaagaaagcaaccaggtacaggccaggcgcggtggctcaggcctgtaattccagtacttagggaggccaggctggtctcgaactcctgacttcgtgatctgcccacctcggcttcccaaagtgctgaggttgcaggcgtgagccaccgtgcccggccgcgtttcctactctttaagctctgttagcttggcctctgtccctgaaggtaagtggcctcaggacctggttgcagaggggctggggctcccatgatgtccagcactgggctctgatcacccctgaggacacagtgcaccccaggacctttgacacctgggggtctgaggggccccagttttaatggcttgtggacttgcagactgtttcctcccccactctcactgtgtctttctgtgttacaggtgcagcttcaagcttaggaccacccaccatgcctatccaggtgctgaagggcctgaccatcactcattaagaacagaggaggctgcctgttactcctggtgttgcatccctccagacactctgctgtttcctgcctaggcgtggctgcagccatggctaggaaagcgctgccacccacccacctgggccagagctggttctgctcctgctgcagggacactgagctggctatctcggcgcttcgggcaagaactgcaacaggctctcctgggtcctgcaggtgtacagccgggcccctgccttgtgcctcagctctcgagagctgctgctgccgggtgacctgatccaacctgataaggtgccatcttcagctaccactgcaaggccctgagggcaacagcagcacggcactgcccacccggctgctgatggcctggtgccagctgggagtcctcccggcacttcgaggccactgagccacccttccagccccagcccaccatggacaggggtatccagcttcctcctcaacctcgtcctctgcccctgagccagtgacgcccaaggacatgcctgttacccaggtcctgtaccagcactagctggtcaagggcatgacagtgctggaggccgtcttggagatccaggccatcactggcagcaggctgctctccatggtgccagggcccgccaggccaccaggctcatgctgggacccaacccagtgcacaaggacttggctgctgagccacacacccaggagaaggtggataagtgggctaccaagggcttcctgcaggctaggggaggagcgtcctattggacagctatggggggtgtgcacgcccggggacctggcggtctcaganaacgggctggnccggtnngagcaacgggggccggtngtcagaggggggggggacngcccctggntgggggncccattggaatggcccgtggtagg

SEQ ID NO: 428975 - DNA, 1844 bp, Homo sapiens
ctctcgtgtcgggccgccctcggggtcctttctcttcacggcccatctttgatgctgtcttcagaattgccggacgcaggggacaagacaatcgtttccatcatatccttgcccctttttgtcagccccagagacagcgtctcctcgcttgttcaggaagattctagcggaagcaggcagtattcctttccctaagcatgaaatggggtttcccaaacaggcgtgtgtattggacgcctcgggcggagcgcgggctggcgccgaggaccggccttgcgagcggcgcgcactataaaatggcgcgtgctgcaacccgcgcccgcttcggagagagaaatgctgggagacagggtttcaccatattggccaggctggtctcgaactcctgacttcgtgatctgcccacctcggcttcccaaagtgctgaggttgcaggcgtgagccaccgtgcccggccgcgtttcctactctttaagctctgttagcttggcctctgtccctgaaggtgcagcttcaagcttaggaccacccaccatgcctatccaggtgctgaagggcctgaccatcactcattaagaacagaggaggctgcctgttactcctggtgttggcgtggctgcagccatggctaggaaagcgctgccacccacccacctgggccagagctggttctgctcctgctgcagggacactgagctggctatctcggcgcttcgggcaagaactgcaacaggctctcctgggtcctgcaggtgtacagccgggcccctgccttgtgcctcagctctcgagagctgctgctgccgggtgacctgatccaacctgataaggtgccatcttcagctaccactgcaaggccctgagggcaacagcagcacggcactgcccacccggctgctgatggcctggtgccagctgggagtcctcccggcacttcgaggccactgagccacccttccagccccagcccaccatggacaggggtatccagcttcctcctcaacctcgtcctctgcccctgagccagtgacgcccaaggacatgcctgttacccaggtcctgtaccagcactagctggtcaagggcatgacagtgctggaggccgtcttggagatccaggccatcactggcagcaggctgctctccatggtgccagggcccgccaggccaccaggctcatgctgggacccaacccagtgcacaaggacttggctgctgagccacacacccaggagaaggtggataagtgggctaccaagggcttcctgcaggctaggggaggagccacccccgcttccctattgtgaccaggcctatggggaggagctgtccatacgccaccgtgagacctgggcctggctctcaaggacagacaccgcctggcctggtgctccaggggtgaagcaggccagaatcctgggggagctgctcctggtttgagctgcattcaggaagtgcgggacatggtaggggaggcaaaaagccttgggcactaccctccctgtggagctgttcggtgtccgtcgagctagccacaccctgacaccatgttcaagggtaccggaagagaagggtgtctgcccccaacctcccctgtgggtgtcactggccagatgtcatgagggaagcaggccttgtgagtggacactgaccatgagtccctggggggagtgatcccccaggcatcgtgtgccatgttgcacttctgcccaggcagcagggtgggtgggtaccatgggtgcccacccctccaccacatggggccccaaagcactgcaggccaagcagggcaaccccacacccttgacataaaagcatcttgaagcttttactccgtttttaaa

SEQ ID NO: 428976 - DNA, 1748 bp, Homo sapiens
ctatgaacgagcgaggagtgaggtggcccagaggatctaaagaaagcaaccaggtacaggccaggcgcggtggctcaggcctgtaattccagtacttagggaggccaggctggtctcgaactcctgacttcgtgatctgcccacctcggcttcccaaagtgctgaggttgcaggcgtgagccaccgtgcccggccgcgtttcctactctttaagctctgttagcttggcctctgtccctgaaggtaagtggcctcaggacctggttgcagaggggctggggctcccatgatgtccagcactgggctctgatcacccctgaggacacagtgcaccccaggacctttgacacctgggggtctgaggggccccagttttaatggcttgtggacttgcagactgtttcctcccccactctcactgtgtctttctgtgttacaggtgcagcttcaagcttaggaccacccaccatgcctatccagcatccctccagacactctgctgtttcctgcctaggcgtggctgcagccatggctaggaaagcgctgccacccacccacctgggccagagctggttctgctcctgctgcagggacactgagctggctatctcggcgcttcgggcaagaactgcaacaggctctcctgggtcctgcaggtgtacagccgggcccctgccttgtgcctcagctctcgagagctgctgctgccgggtgacctgatccaacctgataaggtgccatcttcagctaccactgcaaggccctgagggcaacagcagcacggcactgcccacccggctgctgatggcctggtgccagctgggagtcctcccggcacttcgaggccactgagccacccttccagccccagcccaccatggacaggggtatccagcttcctcctcaacctcgtcctctgcccctgagccagtgacgcccaaggacatgcctgttacccaggtcctgtaccagcactagctggtcaagggcatgacagtgctggaggccgtcttggagatccaggccatcactggcagcaggctgctctccatggtgccagggcccgccaggccaccaggctcatgctgggacccaacccagtgcacaaggacttggctgctgagccacacacccaggagaaggtggataagtgggctaccaagggcttcctgcaggctaggggaggagccacccccgcttccctattgtgaccaggcctatggggaggagctgtccatacgccaccgtgagacctgggcctggctctcaaggacagacaccgcctggcctggtgctccaggggtgaagcaggccagaatcctgggggagctgctcctggtttgagctgcattcaggaagtgcgggacatggtaggggaggcaaaaagccttgggcactaccctccctgtggagctgttcggtgtccgtcgagctagccacaccctgacaccatgttcaagggtaccggaagagaagggtgtctgcccccaacctcccctgtgggtgtcactggccagatgtcatgagggaagcaggccttgtgagtggacactgaccatgagtccctggggggagtgatcccccaggcatcgtgtgccatgttgcacttctgcccaggcagcagggtgggtgggtaccatgggtgcccacccctccaccacatggggccccaaagcactgcaggccaagcagggcaaccccacacccttgacataaaagcatcttgaagcttttactccgtttttaaa

SEQ ID NO: 428977 - DNA, 1647 bp, Homo sapiens
ctctcgtgtcgggccgccctcggggtcctttctcttcacggcccatctttgatgctgtcttcagaattgccggacgcaggggacaagacaatcgtttccatcatatccttgcccctttttgtcagccccagagacagcgtctcctcgcttgttcaggaagattctagcggaagcaggcagtattcctttccctaagcatgaaatggggtttcccaaacaggcgtgtgtattggacgcctcgggcggagcgcgggctggcgccgaggaccggccttgcgagcggcgcgcactataaaatggcgcgtgctgcaacccgcgcccgcttcggagagagaaatgctggggtgcagcttcaagcttaggaccacccaccatgcctatccaggtgctgaagggcctgaccatcactcattaagaacagaggaggctgcctgttactcctggtgttggtgagaaggcagatgtagacagcatccctccagacactctgctgtttcctgcctaggcgtggctgcagccatggctaggaaagcgctgccacccacccacctgggccagagctggttctgctcctgcttgtgcctcagctctcgagagctgctgctgccgggtgacctgatccaacctgataaggtgccatcttcagctaccactgcaaggccctgagggcaacagcagcacggcactgcccacccggctgctgatggcctggtgccagctgggagtcctcccggcacttcgaggccactgagccacccttccagccccagcccaccatggacaggggtatccagcttcctcctcaacctcgtcctctgcccctgagccagtgacgcccaaggacatgcctgttacccaggtcctgtaccagcactagctggtcaagggcatgacagtgctggaggccgtcttggagatccaggccatcactggcagcaggctgctctccatggtgccagggcccgccaggccaccaggctcatgctgggacccaacccagtgcacaaggacttggctgctgagccacacacccaggagaaggtggataagtgggctaccaagggcttcctgcaggctaggggaggagccacccccgcttccctattgtgaccaggcctatggggaggagctgtccatacgccaccgtgagacctgggcctggctctcaaggacagacaccgcctggcctggtgctccaggggtgaagcaggccagaatcctgggggagctgctcctggtttgagctgcattcaggaagtgcgggacatggtaggggaggcaaaaagccttgggcactaccctccctgtggagctgttcggtgtccgtcgagctagccacaccctgacaccatgttcaagggtaccggaagagaagggtgtctgcccccaacctcccctgtgggtgtcactggccagatgtcatgagggaagcaggccttgtgagtggacactgaccatgagtccctggggggagtgatcccccaggcatcgtgtgccatgttgcacttctgcccaggcagcagggtgggtgggtaccatgggtgcccacccctccaccacatggggccccaaagcactgcaggccaagcagggcaaccccacacccttgacataaaagcatcttgaagcttttactccgtttttaaa

SEQ ID NO: 428978 - DNA, 1569 bp, Homo sapiens
ctatgaacgagcgaggagtgaggtggcccagaggatctaaagaaagcaaccaggtacaggccaggcgcggtggctcaggcctgtaattccagtacttagggaggccaggctggtctcgaactcctgacttcgtgatctgcccacctcggcttcccaaagtgctgaggttgcaggcgtgagccaccgtgcccggccgcgtttcctactctttaagctctgttagcttggcctctgtccctgaaggtaagtggcctcaggacctggttgcagaggggctggggctcccatgatgtccagcactgggctctgatcacccctgaggacacagtgcaccccaggacctttgacacctgggggtctgaggggccccagttttaatggcttgtggacttgcagactgtttcctcccccactctcactgtgtctttctgtgttacaggtgcagcttcaagcttaggaccacccaccatgcctatccaggtgctgaagggcctgaccatcactcattaagaacagaggaggctgcctgttactcctggtgttgcatccctccagacactctgctgtttcctgcctaggcgtggctgcagccatggctaggaaagcgctgccacccacccacctgggccagagctggttctgctcctgctgcagggacactgagctggctatctcggcgcttcgggcaagaactgcaacaggctctcctgggtcctgcaggtgtacagccgggcccctgccttgtgcctcagctctcgagagctgctgctgccgggtgacctgatccaacctgataaggtgccatcttcagctaccactgcaaggccctgagggcaacagcagcacggcactgcccacccggctgctctccatggtgccagggcccgccaggccaccaggctcatgctgggacccaacccagtgcacaaggacttggctgctgagccacacacccaggagaaggtggataagtgggctaccaagggcttcctgcaggctaggggaggagccacccccgcttccctattgtgaccaggcctatggggaggagctgtccatacgccaccgtgagacctgggcctggctctcaaggacagacaccgcctggcctggtgctccaggggtgaagcaggccagaatcctgggggagctgctcctggtttgagctgcattcaggaagtgcgggacatggtaggggaggcaaaaagccttgggcactaccctccctgtggagctgttcggtgtccgtcgagctagccacaccctgacaccatgttcaagggtaccggaagagaagggtgtctgcccccaacctcccctgtgggtgtcactggccagatgtcatgagggaagcaggccttgtgagtggacactgaccatgagtccctggggggagtgatcccccaggcatcgtgtgccatgttgcacttctgcccaggcagcagggtgggtgggtaccatgggtgcccacccctccaccacatggggccccaaagcactgcaggccaagcagggcaaccccacacccttgacataaaagcatcttgaagcttttactccgtttttaaa

SEQ ID NO: 428979 - DNA, 1717 bp, Homo sapiens
ctctcgtgtcgggccgccctcggggtcctttctcttcacggcccatctttgatgctgtcttcagaattgccggacgcaggggacaagacaatcgtttccatcatatccttgcccctttttgtcagccccagagacagcgtctcctcgcttgttcaggaagattctagcggaagcaggcagtattcctttccctaagcatgaaatggggtttcccaaacaggcgtgtgtattggacgcctcgggcggagcgcgggctggcgccgaggaccggccttgcgagcggcgcgcactataaaatggcgcgtgctgcaacccgcgcccgcttcggagagagaaatgctggggtgcagcttcaagcttaggaccacccaccatgcctatccaggtgctgaagggcctgaccatcactcattaagaacagaggaggctgcctgttactcctggtgttgcatccctccagacactctgctgtttcctgcctaggcgtggctgcagccatggctaggaaagcgctgccacccacccacctgggccagagctggttctgctcctgctgcagggacactgagctggctatctcggcgcttcgggcaagaactgcaacaggctctcctgggtcctgcaggtgtacagccgggcccctgccttgtgcctcagctctcgagagctgctgctgccgggtgacctgatccaacctgataaggtgccatcttcagctaccactgcaaggccctgagggcaacagcagcacggcactgcccacccggctgctgatggcctggtgccagctgggagtcctcccggcacttcgaggccactgagccacccttccagccccagcccaccatggacaggggtatccagcttcctcctcaacctcgtcctctgcccctgagccagtgacgcccaaggacatgcctgttacccaggtcctgtaccagcactagctggtcaagggcatgacagtgctggaggccgtcttggagatccaggccatcactggcagcaggctgctctccatggtgccagggcccgccaggccaccaggctcatgctgggacccaacccagtgcacaaggacttggctgctgagccacacacccaggagaaggtggataagtgggctaccaagggcttcctgcaggctaggggaggagccacccccgcttccctattgtgaccaggcctatggggaggagctgtccatacgccaccgtgagacctgggcctggctctcaaggacagacaccgcctggcctggtgctccaggggtgaagcaggccagaatcctgggggagctgctcctggtttgagctgcattcaggaagtgcgggacatggtaggggaggcaaaaagccttgggcactaccctccctgtggagctgttcggtgtccgtcgagctagccacaccctgacaccatgttcaagggtaccggaagagaagggtgtctgcccccaacctcccctgtgggtgtcactggccagatgtcatgagggaagcaggccttgtgagtggacactgaccatgagtccctggggggagtgatcccccaggcatcgtgtgccatgttgcacttctgcccaggcagcagggtgggtgggtaccatgggtgcccacccctccaccacatggggccccaaagcactgcaggccaagcagggcaaccccacacccttgacataaaagcatcttgaagcttttactccgtttttaaa

SEQ ID NO: 428980 - DNA, 1878 bp, Homo sapiens
ctctcgtgtcgggccgccctcggggtcctttctcttcacggcccatctttgatgctgtcttcagaattgccggacgcaggggacaagacaatcgtttccatcatatccttgcccctttttgtcagccccagagacagcgtctcctcgcttgttcaggaagattctagcggaagcaggcagtattcctttccctaagcatgaaatggggtttcccaaacaggcgtgtgtattggacgcctcgggcggagcgcgggctggcgccgaggaccggccttgcgagcggcgcgcactataaaatggcgcgtgctgcaacccgcgcccgcttcggagagagaaatgctgggagacagggtttcaccatattggccaggctggtctcgaactcctgacttcgtgatctgcccacctcggcttcccaaagtgctgaggttgcaggcgtgagccaccgtgcccggccgcgtttcctactctttaagctctgttagcttggcctctgtccctgaaggtgcagcttcaagcttaggaccacccaccatgcctatccaggtgctgaagggcctgaccatcactcattaagaacagaggaggctgcctgttactcctggtgttgcatccctccagacactctgctgtttcctgcctaggcgtggctgcagccatggctaggaaagcgctgccacccacccacctgggccagagctggttctgctcctgctgcagggacactgagctggctatctcggcgcttcgggcaagaactgcaacaggctctcctgggtcctgcaggtgtacagccgggcccctgccttgtgcctcagctctcgagagctgctgctgccgggtgacctgatccaacctgataaggtgccatcttcagctaccactgcaaggccctgagggcaacagcagcacggcactgcccacccggctgctgatggcctggtgccagctgggagtcctcccggcacttcgaggccactgagccacccttccagccccagcccaccatggacaggggtatccagcttcctcctcaacctcgtcctctgcccctgagccagtgacgcccaaggacatgcctgttacccaggtcctgtaccagcactagctggtcaagggcatgacagtgctggaggccgtcttggagatccaggccatcactggcagcaggctgctctccatggtgccagggcccgccaggccaccaggctcatgctgggacccaacccagtgcacaaggacttggctgctgagccacacacccaggagaaggtggataagtgggctaccaagggcttcctgcaggctaggggaggagccacccccgcttccctattgtgaccaggcctatggggaggagctgtccatacgccaccgtgagacctgggcctggctctcaaggacagacaccgcctggcctggtgctccaggggtgaagcaggccagaatcctgggggagctgctcctggtttgagctgcattcaggaagtgcgggacatggtaggggaggcaaaaagccttgggcactaccctccctgtggagctgttcggtgtccgtcgagctagccacaccctgacaccatgttcaagggtaccggaagagaagggtgtctgcccccaacctcccctgtgggtgtcactggccagatgtcatgagggaagcaggccttgtgagtggacactgaccatgagtccctggggggagtgatcccccaggcatcgtgtgccatgttgcacttctgcccaggcagcagggtgggtgggtaccatgggtgcccacccctccaccacatggggccccaaagcactgcaggccaagcagggcaaccccacacccttgacataaaagcatcttgaagcttttactccgtttttaaa

SEQ ID NO: 428981 - DNA, 1419 bp, Homo sapiens
taggctagtacgaggctggtgtgaatcggccgagggaaatgctggggtgcagcttcaagcttaggaccacccaccatgcctatccaggtgctgaagggcctgaccatcactcattaagaacagaggaggctgcctgttactcctggtgttgcatccctccagacactctgctgtttcctgcctaggcgtggctgcagccatggctaggaaagcgctgccacccacccacctgggccagagctggttctgctcctgctgcagggacactgagctggctatctcggcgcttcgggcaagaactgcaacaggctctcctgggtcctgcaggtgtacagccgggcccctgccttgtgcctcagctctcgagagctgctgctgccgggtgacctgatccaacctgataaggtgccatcttcagctaccactgcaaggccctgagggcaacagcagcacggcactgcccacccggctgctgatggcctggtgccagctgggagtcctcccggcacttcgaggccactgagccacccttccagccccagcccaccatggacaggggtatccagcttcctcctcaacctcgtcctctgcccctgagccagtgacgcccaaggacatgcctgttacccaggtcctgtaccagcactagctggtcaagggcatgacagtgctggaggccgtcttggagatccaggccatcactggcagcaggctgctctccatggtgccagggcccgccaggccaccaggctcatgctgggacccaacccagtgcacaaggacttggctgctgagccacacacccaggagaaggtggataagtgggctaccaagggcttcctgcaggctaggggaggagccacccccgcttccctattgtgaccaggcctatggggaggagctgtccatacgccaccgtgagacctgggcctggctctcaaggacagacaccgcctggcctggtgctccaggggtgaagcaggccagaatcctgggggagctgctcctggtttgagctgcattcaggaagtgcgggacatggtaggggaggcaaaaagccttgggcactaccctccctgtggagctgttcggtgtccgtcgagctagccacaccctgacaccatgttcaagggtaccggaagagaagggtgtctgcccccaacctcccctgtgggtgtcactggccagatgtcatgagggaagcaggccttgtgagtggacactgaccatgagtccctggggggagtgatcccccaggcatcgtgtgccatgttgcacttctgcccaggcagcagggtgggtgggtaccatgggtgcccacccctccaccacatggggccccaaagcactgcaggccaagcagggcaaccccacacccttgacataaaagcatcttgaagcttttactccgtttttaaa

SEQ ID NO: 428982 - DNA, 1309 bp, Homo sapiens
  misc_feature (1214)..(1214): n is a, c, g, or t
  misc_feature (1225)..(1225): n is a, c, g, or t
  misc_feature (1231)..(1232): n is a, c, g, or t
  misc_feature (1250)..(1250): n is a, c, g, or t
  misc_feature (1269)..(1269): n is a, c, g, or t
  misc_feature (1278)..(1278): n is a, c, g, or t
  misc_feature (1285)..(1285): n is a, c, g, or t
ctctcgtgtcgggccgccctcggggtcctttctcttcacggcccatctttgatgctgtcttcagaattgccggacgcaggggacaagacaatcgtttccatcatatccttgcccctttttgtcagccccagagacagcgtctcctcgcttgttcaggaagattctagcggaagcaggcagtattcctttccctaagcatgaaatggggtttcccaaacaggcgtgtgtattggacgcctcgggcggagcgcgggctggcgccgaggaccggccttgcgagcggcgcgcactataaaatggcgcgtgctgcaacccgcgcccgcttcggagagagaaatgctggggtgcagcttcaagcttaggaccacccaccatgcctatccaggtgctgaagggcctgaccatcactcattaagaacagaggaggctgcctgttactcctggtgttgcatccctccagacactctgctgtttcctgcctaggcgtggctgcagccatggctaggaaagcgctgccacccacccacctgggccagagctggttctgctcctgctgcagggacactgagctggctatctcggcgcttcgggcaagaactgcaacaggctctcctgggtcctgcaggtgtacagccgggcccctgccttgtgcctcagctctcgagagctgctgctgccgggtgacctgatccaacctgataaggtgccatcttcagctaccactgcaaggccctgagggcaacagcagcacggcactgcccacccggctgctgatggcctggtgccagctgggagtcctcccggcacttcgaggccactgagccacccttccagccccagcccaccatggacaggggtatccagcttcctcctcaacctcgtcctctgcccctgagccagtgacgcccaaggacatgcctgttacccaggtcctgtaccagcactagctggtcaagggcatgacagtgctggaggccgtcttggagatccaggccatcactggcagcaggctgctctccatggtgccagggcccgccaggccaccaggctcatgctgggacccaacccagtgcacaaggacttggctgctgagccacacacccaggagaaggtggataagtgggctaccaagggcttcctgcaggctaggggaggagcgtcctattggacagctatggggggtgtgcacgcccggggacctggcggtctcaganaacgggctggnccggtnngagcaacgggggccggtngtcagaggggggggggacngcccctggntgggggncccattggaatggcccgtggtagg

SEQ ID NO: 428983 - DNA, 1980 bp, Homo sapiens
ggatatagaaggaagcaaacgaggcctttgcttacctgcgggagtcgttctgaccgttcatgccacgtgagagggttttgttaacgttagtttttggcttaggtcctttaaggtcttgaacatcggtttcctgacttgagcggggcccatgcccctgccgaggaggctcagcctggaagcagctagcccatttcctatctcccccaccacgaccccagcaaggatctctacttgacttacctccttcaggcaaccacctagaaaatcgttgagtttgttcatgtcacaagtgaaagtattttttcatgcattcatcgttggcacgtcgtcctttggcaatattaaaatctaccaacaaatgggaaaagttaacatttgcaccatcttgccatattcaaaaaccttgtgcttaagtgttttgaaaagacagggtttcaccatattggccaggctggtctcgaactcctgacttcgtgatctgcccacctcggcttcccaaagtgctgaggttgcaggcgtgagccaccgtgcccggccgcgtttcctactctttaagctctgttagcttggcctctgtccctgaaggtgcagcttcaagcttaggaccacccaccatgcctatccaggtgctgaagggcctgaccatcactcattaagaacagaggaggctgcctgttactcctggtgttggtgagaaggcagatgtagacagcatccctccagacactctgctgtttcctgcctaggcgtggctgcagccatggctaggaaagcgctgccacccacccacctgggccagagctggttctgctcctgctgcagggacactgagctggctatctcggcgcttcgggcaagaactgcaacaggctctcctgggtcctgcaggtgtacagccgggcccctgccttgtgcctcagctctcgagagctgctgctgccgggtgacctgatccaacctgataaggtgccatcttcagctaccactgcaaggccctgagggcaacagcagcacggcactgcccacccggctgctgatggcctggtgccagctgggagtcctcccggcacttcgaggccactgagccacccttccagccccagcccaccatggacaggggtatccagcttcctcctcaacctcgtcctctgcccctgagccagtgacgcccaaggacatgcctgttacccaggtcctgtaccagcactagctggtcaagggcatgacagtgctggaggccgtcttggagatccaggccatcactggcagcaggctgctctccatggtgccagggcccgccaggccaccaggctcatgctgggacccaacccagtgcacaaggacttggctgctgagccacacacccaggagaaggtggataagtgggctaccaagggcttcctgcaggctaggggaggagccacccccgcttccctattgtgaccaggcctatggggaggagctgtccatacgccaccgtgagacctgggcctggctctcaaggacagacaccgcctggcctggtgctccaggggtgaagcaggccagaatcctgggggagctgctcctggtttgagctgcattcaggaagtgcgggacatggtaggggaggcaaaaagccttgggcactaccctccctgtggagctgttcggtgtccgtcgagctagccacaccctgacaccatgttcaagggtaccggaagagaagggtgtctgcccccaacctcccctgtgggtgtcactggccagatgtcatgagggaagcaggccttgtgagtggacactgaccatgagtccctggggggagtgatcccccaggcatcgtgtgccatgttgcacttctgcccaggcagcagggtgggtgggtaccatgggtgcccacccctccaccacatggggccccaaagcactgcaggccaagcagggcaaccccacacccttgacataaaagcatcttgaagcttttactccgtttttaaa

SEQ ID NO: 428984 - DNA, 2052 bp, Homo sapiens
ctctcgtgtcgggccgccctcggggtcctttctcttcacggcccatctttgatgctgtcttcagaattgccggacgcaggggacaagacaatcgtttccatcatatccttgcccctttttgtcagccccagagacagcgtctcctcgcttgttcaggaagattctagcggaagcaggcagtattcctttccctaagcatgaaatggggtttcccaaacaggcgtgtgtattggacgcctcgggcggagcgcgggctggcgccgaggaccggccttgcgagcggcgcgcactataaaatggcgcgtgctgcaacccgcgcccgcttcggagagagaaatgctggggtgcagcttcaagcttaggaccacccaccatgcctatccaggtgctgaagggcctgaccatcactcattaagaacagaggaggctgcctgttactcctggtgttggtgagaaggcagatgtagacaggtgcccagcaagtgctgagccaggcgctgccctaagcactgggctcattaaccttagtaaccctgttggggggcggaggtgggatgggggctggggctgggttgcagtgagatgtccagtgtccagggttcttgaaagggctgcacttggggaccccgtgatgtccagcactgggctctgactgcccctgaggacacggtgcaccccgggacctttgacatccggggttctgaggggccccactccgggaggtgatggtgggggtgtggctgtttcccccattcgtgccttttctgtgtccttcccctgacagcatccctccagacactctgctgtttcctgcctaggcgtggctgcagccatggctaggaaagcgctgccacccacccacctgggccagagctggttctgctcctgctgcagggacactgagctggctatctcggcgcttcgggcaagaactgcaacaggctctcctgggtcctgcaggtgtacagccgggcccctgccttgtgcctcagctctcgagagctgctgctgccgggtgacctgatccaacctgataaggtgccatcttcagctaccactgcaaggccctgagggcaacagcagcacggcactgcccacccggctgctgatggcctggtgccagctgggagtcctcccggcacttcgaggccactgagccacccttccagccccagcccaccatggacaggggtatccagcttcctcctcaacctcgtcctctgcccctgagccagtgacgcccaaggacatgcctgttacccaggtcctgtaccagcactagctggtcaagggcatgacagtgctggaggccgtcttggagatccaggccatcactggcagcaggctgctctccatggtgccagggcccgccaggccaccaggctcatgctgggacccaacccagtgcacaaggacttggctgctgagccacacacccaggagaaggtggataagtgggctaccaagggcttcctgcaggctaggggaggagccacccccgcttccctattgtgaccaggcctatggggaggagctgtccatacgccaccgtgagacctgggcctggctctcaaggacagacaccgcctggcctggtgctccaggggtgaagcaggccagaatcctgggggagctgctcctggtttgagctgcattcaggaagtgcgggacatggtaggggaggcaaaaagccttgggcactaccctccctgtggagctgttcggtgtccgtcgagctagccacaccctgacaccatgttcaagggtaccggaagagaagggtgtctgcccccaacctcccctgtgggtgtcactggccagatgtcatgagggaagcaggccttgtgagtggacactgaccatgagtccctggggggagtgatcccccaggcatcgtgtgccatgttgcacttctgcccaggcagcagggtgggtgggtaccatgggtgcccacccctccaccacatggggccccaaagcactgcaggccaagcagggcaaccccacacccttgacataaaagcatcttgaagcttttactccgtttttaaa

SEQ ID NO: 428985 - DNA, 2011 bp, Homo sapiens
ctctcgtgtcgggccgccctcggggtcctttctcttcacggcccatctttgatgctgtcttcagaattgccggacgcaggggacaagacaatcgtttccatcatatccttgcccctttttgtcagccccagagacagcgtctcctcgcttgttcaggaagattctagcggaagcaggcagtattcctttccctaagcatgaaatggggtttcccaaacaggcgtgtgtattggacgcctcgggcggagcgcgggctggcgccgaggaccggccttgcgagcggcgcgcactataaaatggcgcgtgctgcaacccgcgcccgcttcggagagagaaatgctggggtgcagcttcaagcttaggaccacccaccatgcctatccaggtgctgaagggcctgaccatcactcattaagaacagaggaggctgcctgttactcctggtgttggtgagaaggcagatgtagacaggtgcccagcaagtgctgagccaggcgctgccctaagcactgggctcattaaccttagtaaccctgttggggggcggaggtgggatgggggctggggctgggttgcagtgagatgtccagtgtccaggcactgggctctgactgcccctgaggacacggtgcaccccgggacctttgacatccggggttctgaggggccccactccgggaggtgatggtgggggtgtggctgtttcccccattcgtgccttttctgtgtccttcccctgacagcatccctccagacactctgctgtttcctgcctaggcgtggctgcagccatggctaggaaagcgctgccacccacccacctgggccagagctggttctgctcctgctgcagggacactgagctggctatctcggcgcttcgggcaagaactgcaacaggctctcctgggtcctgcaggtgtacagccgggcccctgccttgtgcctcagctctcgagagctgctgctgccgggtgacctgatccaacctgataaggtgccatcttcagctaccactgcaaggccctgagggcaacagcagcacggcactgcccacccggctgctgatggcctggtgccagctgggagtcctcccggcacttcgaggccactgagccacccttccagccccagcccaccatggacaggggtatccagcttcctcctcaacctcgtcctctgcccctgagccagtgacgcccaaggacatgcctgttacccaggtcctgtaccagcactagctggtcaagggcatgacagtgctggaggccgtcttggagatccaggccatcactggcagcaggctgctctccatggtgccagggcccgccaggccaccaggctcatgctgggacccaacccagtgcacaaggacttggctgctgagccacacacccaggagaaggtggataagtgggctaccaagggcttcctgcaggctaggggaggagccacccccgcttccctattgtgaccaggcctatggggaggagctgtccatacgccaccgtgagacctgggcctggctctcaaggacagacaccgcctggcctggtgctccaggggtgaagcaggccagaatcctgggggagctgctcctggtttgagctgcattcaggaagtgcgggacatggtaggggaggcaaaaagccttgggcactaccctccctgtggagctgttcggtgtccgtcgagctagccacaccctgacaccatgttcaagggtaccggaagagaagggtgtctgcccccaacctcccctgtgggtgtcactggccagatgtcatgagggaagcaggccttgtgagtggacactgaccatgagtccctggggggagtgatcccccaggcatcgtgtgccatgttgcacttctgcccaggcagcagggtgggtgggtaccatgggtgcccacccctccaccacatggggccccaaagcactgcaggccaagcagggcaaccccacacccttgacataaaagcatcttgaagcttttactccgtttttaaa

SEQ ID NO: 428986 - DNA, 1409 bp, Homo sapiens
ctctcgtgtcgggccgccctcggggtcctttctcttcacggcccatctttgatgctgtcttcagaattgccggacgcaggggacaagacaatcgtttccatcatatccttgcccctttttgtcagccccagagacagcgtctcctcgcttgttcaggaagattctagcggaagcaggcagtattcctttccctaagcatgaaatggggtttcccaaacaggcgtgtgtattggacgcctcgggcggagcgcgggctggcgccgaggaccggccttgcgagcggcgcgcactataaaatggcgcgtgctgcaacccgcgcccgcttcggagagagaaatgctggggtgcagcttcaagcttaggaccacccaccatgcctatccaggtgctgaagggcctgaccatcactcattaagaacagaggaggctgcctgttactcctggtgttgcatccctccagacactctgctgtttcctgcctaggcgtggctgcagccatggctaggaaagcgctccacccttccagccccagcccaccatggacaggggtatccagcttcctcctcaacctcgtcctctgcccctgagccagtgacgcccaaggacatgcctgttacccaggtcctgtaccagcactagctggtcaagggcatgacagtgctggaggccgtcttggagatccaggccatcactggcagcaggctgctctccatggtgccagggcccgccaggccaccaggctcatgctgggacccaacccagtgcacaaggacttggctgctgagccacacacccaggagaaggtggataagtgggctaccaagggcttcctgcaggctaggggaggagccacccccgcttccctattgtgaccaggcctatggggaggagctgtccatacgccaccgtgagacctgggcctggctctcaaggacagacaccgcctggcctggtgctccaggggtgaagcaggccagaatcctgggggagctgctcctggtttgagctgcattcaggaagtgcgggacatggtaggggaggcaaaaagccttgggcactaccctccctgtggagctgttcggtgtccgtcgagctagccacaccctgacaccatgttcaagggtaccggaagagaagggtgtctgcccccaacctcccctgtgggtgtcactggccagatgtcatgagggaagcaggccttgtgagtggacactgaccatgagtccctggggggagtgatcccccaggcatcgtgtgccatgttgcacttctgcccaggcagcagggtgggtgggtaccatgggtgcccacccctccaccacatggggccccaaagcactgcaggccaagcagggcaaccccacacccttgacataaaagcatcttgaagcttttactccgtttttaaa

SEQ ID NO: 428987 - DNA, 600 bp, Homo sapiens
aaatgaactcaggatgtgaggtagggttcagttgttagggtgttaaattatccagtggcttggcagcctacttgttttacccgtataatataaacatgcataaaggatctctctcttcattgaggctctgcatgcaccttgaatattttacaatgcttgcctaaaagcaatcaacatgaaagcccatccttggtctttgcctaggaatacagtccctccctactcaagtgaatacatgaagcacataaacacatgcagtcagtactgggattactggcctcatctgtatgtgtagactctgctcagtgaggcagcctcacaaatcatttggcatgtccaggtgaaagactctagaaatgcaagattccaaactgtaatatacatgaaaagcaaaaaggatgctttttatccaagttctgccttgttcagatgtacaagcgacaagtctctccaggatacaagaaagtaggaggttcattgttaatgttacccggctacagacttcctgccgaacatatggctgtcatggataacgctgacctcaaggaagttctcctactgaggctgtagccttttcaaaatctattgttcttttttaaa

SEQ ID NO: 428988 - DNA, 802 bp, Homo sapiens
ttttatctgttccttaactcctctgtgtctgtttccttatgtgtgaaacaggaatgataacaatatctacttcacaggctattctgaggttgacataaaatcagtatatatgaataataagttatagtttatctctgagcaatatactattttagctgaggatgaaagttgactattttttgtaaatgtgtggccaagtttactgtgtaacttgaaagtaaataatggagtctttcactgactgtatgctgaagaaatgaactcaggatgtgaggtagggttcagttgttagggtgttaaattatccagtggcttggcagcctacttgttttacccgtataatataaacatgcataaaggatctctctcttcattgaggctctgcatgcaccttgaatattttacaatgcttgcctaaaagcaatcaacatgaaagcccatccttggtctttgcctaggaatacagtccctccctactcaagtgaatacatgaagcacataaacacatgcagtcagtactgggattactggcctcatctgtatgtgtagactctgctcagtgaggcagcctcacaaatcatttggcatgtccaggtgaaagactctagaaatgcaagattccaaactgtaatatacatgaaaagcaaaaaggatgctttttatccaagttctgccttgttcagatgtacaagcgacaagtctctccaggatacaagaaagtaggaggttcattgttaatgttacccggctacagacttcctgccgaacatatggctgtcatggataacgctgacctcaagga

SEQ ID NO: 428989 - DNA, 1837 bp, Homo sapiens
agattacctcatttcctgtgtcctctctttctttggcaatccaaagaaagtcatctttcagattgtctgctcagagttcatctcaaagcctggcaaggattggagaggtcaataagagtcagcgcctttaaaaagaaatctactcactcttctgtgtgcataaggccgagcagaggttcttcgtctcaagaggaactgacttctgttgagcactcaacacgccacagagaccagccatcttgcaacctcacctcacagcatggagagaggagaccaacctaagagaaccaggaatgaaaacattttcaactgcttatacaaaaaccctgaggcaacttttaagctgatttgctttccctggatgggaggtggctccactcattttgccaaatggggccaagatactcatgatttgctggaagagacagcatctcaccatgttgccaaggctggtctcaaactccggcgctcaagtgatcctcctgcttcagcctacccatgtgctggcgtgagccaccgtaggcgtgagccaccgtgcctggccaaaattcttggtctattctggattctaattttttttatgcactccttaaggcttcctggaagagaaagcagagttgaagaacctcttgaaaatgacatctcccagttagttgatgaagttgtttgtgctctgcagccagtcatccaggataaaccatttgcattttttggccacagtatgggatcctacattgcttttaggactgcactaggtctaaaagaaaacaatcaaccagaaccattgcatttatttttgtcaagtgcaactcctgtacattcaaaggcctggcatcgcattcccaaagatgatgaattgtcagaagaacaaataagtcattaccttatggaatttggaggcacccccaagcattttgctgaagccaaggaatttgtgaaacaatgtagtcccatcataagggcagatctgaacattgttagaagttgcacctctaacgtaccatctaaggctgttctttcctgtgacttgacatgttttgttggatctgaagacatagcaaaggacatggaagcctggaaagatgtaaccagtggaaatgctaaaatttaccagcttccagggggtcacttttatcttctggatcctgcgaacgagaaattaatcaagaactacataatcaagtgtctagaagtatcatcgatatccaatttttagatattttccctttcacttttaaaataatcaaagtaatatcatactcttctcagttattcagatatagctcagttttattcagattggaaattacacattttctactgtcagggagattcgttacataaatatatttacgtatctggggacaaaggtcaagccagtaaagaatacttctggcagcactttgggaggccaaggcgggcggatcacgaggtcaggagatcgagaccgtcctggctaacaccgtgaaaccccatctctactaaaaatacacaaaattagctgggcgtggtggtgggcacctgtagtcccagctactcgggaggctgaggcaggagaatggtgtgaacctgggaggtggagcttgcagtgaaccgagatcgctccactgcactccagcctgggtgacagatccagactctgtctcaaaaaaaaaaaaaaaaaatacttctggcagagtcttttatcttcctattaaaatctcacttgattctcctttatgggaagtttgtcgacaaaattcatgattagtaaattatccattttttccttcagttagtttaatggtgaagatgattaacaggggaaatgcttgaagtaaatgattgtttcaatggc

SEQ ID NO: 428990 - DNA, 1678 bp, Homo sapiens
agattacctcatttcctgtgtcctctctttctttggcaatccaaagaaagtcatctttcagattgtctgctcagagttcatctcaaagcctggcaaggattggagaggtcaataagagtcagcgcctttaaaaagaaatctactcactcttctgtgtgcataaggccgagcagaggttcttcgtctcaagaggaactgacttctgttgagcactcaacacgccacagagaccagccatcttgcaacctcacctcacagcatggagagaggagaccaacctaagagaaccaggaatgaaaacattttcaactgcttatacaaaaaccctgaggcaacttttaagctgatttgctttccctggatgggaggtggctccactcattttgccaaatggggccaagatactcatgatttgctggaagtgcactccttaaggcttcctggaagagaaagcagagttgaagaacctcttgaaaatgacatctcccagttagttgatgaagttgtttgtgctctgcagccagtcatccaggataaaccatttgcattttttggccacagtatgggatcctacattgcttttaggactgcactaggtctaaaagaaaacaatcaaccagaaccattgcatttatttttgtcaagtgcaactcctgtacattcaaaggcctggcatcgcattcccaaagatgatgaattgtcagaagaacaaataagtcattaccttatggaatttggaggcacccccaagcattttgctgaagccaaggaatttgtgaaacaatgtagtcccatcataagggcagatctgaacattgttagaagttgcacctctaacgtaccatctaaggctgttctttcctgtgacttgacatgttttgttggatctgaagacatagcaaaggacatggaagcctggaaagatgtaaccagtggaaatgctaaaatttaccagcttccagggggtcacttttatcttctggatcctgcgaacgagaaattaatcaagaactacataatcaagtgtctagaagtatcatcgatatccaatttttagatattttccctttcacttttaaaataatcaaagtaatatcatactcttctcagttattcagatatagctcagttttattcagattggaaattacacattttctactgtcagggagattcgttacataaatatatttacgtatctggggacaaaggtcaagccagtaaagaatacttctggcagcactttgggaggccaaggcgggcggatcacgaggtcaggagatcgagaccgtcctggctaacaccgtgaaaccccatctctactaaaaatacacaaaattagctgggcgtggtggtgggcacctgtagtcccagctactcgggaggctgaggcaggagaatggtgtgaacctgggaggtggagcttgcagtgaaccgagatcgctccactgcactccagcctgggtgacagatccagactctgtctcaaaaaaaaaaaaaaaaaatacttctggcagagtcttttatcttcctattaaaatctcacttgattctcctttatgggaagtttgtcgacaaaattcatgattagtaaattatccattttttccttcagttagtttaatggtgaagatgattaacaggggaaatgcttgaagtaaatgattgtttcaatggc

SEQ ID NO: 428991 - DNA, 980 bp, Homo sapiens
tgtgttatatgaaatatcaggcctgtgttgttgttcatgtttcaagtcaaaggcctggcatcgcattcccaaagatgatgaattgtcagaagaacaaataagtcattaccttatggaatttggaggcacccccaagcattttgctgaagccaaggaatttgtgaaacaatgtagtcccatcataagggcagatctgaacattgttagaagttgcaccctggaaagatgtaaccagtggaaatgctaaaatttaccagcttccagggggtcacttttatcttctggatcctgcgaacgagaaattaatcaagaactacataatcaagtgtctagaagtatcatcgatatccaatttttagatattttccctttcacttttaaaataatcaaagtaatatcatactcttctcagttattcagatatagctcagttttattcagattggaaattacacattttctactgtcagggagattcgttacataaatatatttacgtatctggggacaaaggtcaagccagtaaagaatacttctggcagcactttgggaggccaaggcgggcggatcacgaggtcaggagatcgagaccgtcctggctaacaccgtgaaaccccatctctactaaaaatacacaaaattagctgggcgtggtggtgggcacctgtagtcccagctactcgggaggctgaggcaggagaatggtgtgaacctgggaggtggagcttgcagtgaaccgagatcgctccactgcactccagcctgggtgacagatccagactctgtctcaaaaaaaaaaaaaaaaaatacttctggcagagtcttttatcttcctattaaaatctcacttgattctcctttatgggaagtttgtcgacaaaattcatgattagtaaattatccattttttccttcagttagtttaatggtgaagatgattaacaggggaaatgcttgaagtaaatgattgtttcaatggc

SEQ ID NO: 428992 - DNA, 1691 bp, Homo sapiens
ttcccgcccttgaacatcagactccaatttcttcagttctgggactctgactggcttccttgctcctcagcctgcagatggcctattgtgagacctcacgttgtcatatggattggagaggtcaataagagtcagcgcctttaaaaagaaatctactcactcttctgtgtgcataaggccgagcagaggttcttcgtctcaagaggaactgacttctgttgagcactcaacacgccacagagaccagccatcttgcaacctcacctcacagcatggagagaggagaccaacctaagagaaccaggaatgaaaacattttcaactgcttatacaaaaaccctgaggcaacttttaagctgatttgctttccctggatgggaggtggctccactcattttgccaaatggggccaagatactcatgatttgctggaagtgcactccttaaggcttcctggaagagaaagcagagttgaagaacctcttgaaaatgacatctcccagttagttgatgaagttgtttgtgctctgcagccagtcatccaggataaaccatttgcattttttggccacagtatgggatcctacattgcttttaggactgcactaggtctaaaagaaaacaatcaaccagaaccattgcatttatttttgtcaagtgcaactcctgtacattcaaaggcctggcatcgcattcccaaagatgatgaattgtcagaagaacaaataagtcattaccttatggaatttggaggcacccccaagcattttgctgaagccaaggaatttgtgaaacaatgtagtcccatcataagggcagatctgaacattgttagaagttgcacctctaacgtaccatctaaggctgttctttcctgtgacttgacatgttttgttggatctgaagacatagcaaaggacatggaagcctggaaagatgtaaccagtggaaatgctaaaatttaccagcttccagggggtcacttttatcttctggatcctgcgaacgagaaattaatcaagaactacataatcaagtgtctagaagtatcatcgatatccaatttttagatattttccctttcacttttaaaataatcaaagtaatatcatactcttctcagttattcagatatagctcagttttattcagattggaaattacacattttctactgtcagggagattcgttacataaatatatttacgtatctggggacaaaggtcaagccagtaaagaatacttctggcagcactttgggaggccaaggcgggcggatcacgaggtcaggagatcgagaccgtcctggctaacaccgtgaaaccccatctctactaaaaatacacaaaattagctgggcgtggtggtgggcacctgtagtcccagctactcgggaggctgaggcaggagaatggtgtgaacctgggaggtggagcttgcagtgaaccgagatcgctccactgcactccagcctgggtgacagatccagactctgtctcaaaaaaaaaaaaaaaaaatacttctggcagagtcttttatcttcctattaaaatctcacttgattctcctttatgggaagtttgtcgacaaaattcatgattagtaaattatccattttttccttcagttagtttaatggtgaagatgattaacaggggaaatgcttgaagtaaatgattgtttcaatggc

SEQ ID NO: 428993 - DNA, 1850 bp, Homo sapiens
ttcccgcccttgaacatcagactccaatttcttcagttctgggactctgactggcttccttgctcctcagcctgcagatggcctattgtgagacctcacgttgtcatatggattggagaggtcaataagagtcagcgcctttaaaaagaaatctactcactcttctgtgtgcataaggccgagcagaggttcttcgtctcaagaggaactgacttctgttgagcactcaacacgccacagagaccagccatcttgcaacctcacctcacagcatggagagaggagaccaacctaagagaaccaggaatgaaaacattttcaactgcttatacaaaaaccctgaggcaacttttaagctgatttgctttccctggatgggaggtggctccactcattttgccaaatggggccaagatactcatgatttgctggaagagacagcatctcaccatgttgccaaggctggtctcaaactccggcgctcaagtgatcctcctgcttcagcctacccatgtgctggcgtgagccaccgtaggcgtgagccaccgtgcctggccaaaattcttggtctattctggattctaattttttttatgcactccttaaggcttcctggaagagaaagcagagttgaagaacctcttgaaaatgacatctcccagttagttgatgaagttgtttgtgctctgcagccagtcatccaggataaaccatttgcattttttggccacagtatgggatcctacattgcttttaggactgcactaggtctaaaagaaaacaatcaaccagaaccattgcatttatttttgtcaagtgcaactcctgtacattcaaaggcctggcatcgcattcccaaagatgatgaattgtcagaagaacaaataagtcattaccttatggaatttggaggcacccccaagcattttgctgaagccaaggaatttgtgaaacaatgtagtcccatcataagggcagatctgaacattgttagaagttgcacctctaacgtaccatctaaggctgttctttcctgtgacttgacatgttttgttggatctgaagacatagcaaaggacatggaagcctggaaagatgtaaccagtggaaatgctaaaatttaccagcttccagggggtcacttttatcttctggatcctgcgaacgagaaattaatcaagaactacataatcaagtgtctagaagtatcatcgatatccaatttttagatattttccctttcacttttaaaataatcaaagtaatatcatactcttctcagttattcagatatagctcagttttattcagattggaaattacacattttctactgtcagggagattcgttacataaatatatttacgtatctggggacaaaggtcaagccagtaaagaatacttctggcagcactttgggaggccaaggcgggcggatcacgaggtcaggagatcgagaccgtcctggctaacaccgtgaaaccccatctctactaaaaatacacaaaattagctgggcgtggtggtgggcacctgtagtcccagctactcgggaggctgaggcaggagaatggtgtgaacctgggaggtggagcttgcagtgaaccgagatcgctccactgcactccagcctgggtgacagatccagactctgtctcaaaaaaaaaaaaaaaaaatacttctggcagagtcttttatcttcctattaaaatctcacttgattctcctttatgggaagtttgtcgacaaaattcatgattagtaaattatccattttttccttcagttagtttaatggtgaagatgattaacaggggaaatgcttgaagtaaatgattgtttcaatggc

SEQ ID NO: 428994 - DNA, 1082 bp, Homo sapiens
agattacctcatttcctgtgtcctctctttctttggcaatccaaagaaagtcatctttcagattgtctgctcagagttcatctcaaagcctggcaaggattggagaggtcaataagagtcagcgcctttaaaaagaaatctactcactcttctgtgtgcataaggccgagcagaggttcttcgtctcaagaggaactgacttctgttgagcactcaacacgccacagagaccagccatcttgcaacctcacctcacagcatggagagaggagaccaacctaagagaaccaggaatgaaaacattttcaactgcttatacaaaaaccctgaggcaacttttaagctgatttgctttccctggatgggaggtggctccactcattttgccaaatggggccaagatactcatgatttgctggaagtgcactccttaaggcttcctggaagagaaagcagagttgaagaacctcttgaaaatgacatctcccagttagttgatgaagttgtttgtgctctgcagccagtcatccaggataaaccatttgcattttttggccacagtatgggatcctacattgcttttaggactgcactaggtctaaaagaaaacaatcaaccagaaccattgcatttatttttgtcaagtgcaactcctgtacatgcctgtgttgttgttcatgtttcaagtcaaaggcctggcatcgcattcccaaagatgatgaattgtcagaagaacaaataagtcattaccttatggaatttggaggcacccccaagcattttgctgaagccaaggaatttgtgaaacaatgtagtcccatcataagggcagatctgaacattgttagaagttgcactgtgaataatttcctctgactgtcttcaaggccgctgactttcttcagctgtatcaagtctactgatgagcctgtcaaagaacttcttcatttctgttatttctagaaatcccatttgactctcttctggtttttacctttctaatgaaattccccatgtgttcatgaatgttagccaccttttccactaaatctgttgataaattaatcctatgtattttaaag

SEQ ID NO: 428995 - DNA, 783 bp, Homo sapiens
agattacctcatttcctgtgtcctctctttctttggcaatccaaagaaagtcatctttcagattgtctgctcagagttcatctcaaagcctggcaaggattggagaggtcaataagagtcagcgcctttaaaaagaaatctactcactcttctgtgtgcataaggccgagcagaggttcttcgtctcaagaggaactgacttctgttgagcactcaacacgccacagagaccagccatcttgcaacctcacctcacagcatggagagaggagaccaacctaagagaaccaggaatgaaaacattttcaactgcttatacaaaaaccctgaggcaacttttaagctgatttgctttccctggatgggaggtggctccactcattttgccaaatggggccaagatactcatgatttgctggaagtgcactccttaaggcttcctggaagagaaagcagagttgaagaacctcttgaaaatgacatctcccagttagttgatgaagttgtttgtgctctgcagccagtcatccaggataaaccatttgcattttttggccacaggtatttgatatctgttttaaaagacttcaggggagtttcttctatctgaagtttgaggttaatgttattctttgtgttttgtaagatgcatacctttgtattggttagacagcatgttaggtaattatggccatcacaacttttacaattcaccagtttgtatggtaagtatacctattttttttccttttaggcaaataaagtcaacacttgtaaaaccaa

SEQ ID NO: 428996 - DNA, 1644 bp, Homo sapiens
atgtgacttgcttctccttgccttccaccatgattgtgaggcctccccagctatgtggcactggattggagaggtcaataagagtcagcgcctttaaaaagaaatctactcactcttctgtgtgcataaggccgagcagaggttcttcgtctcaagaggaactgacttctgttgagcactcaacacgccacagagaccagccatcttgcaacctcacctcacagcatggagagaggagaccaacctaagagaaccaggaatgaaaacattttcaactgcttatacaaaaaccctgaggcaacttttaagctgatttgctttccctggatgggaggtggctccactcattttgccaaatggggccaagatactcatgatttgctggaagtgcactccttaaggcttcctggaagagaaagcagagttgaagaacctcttgaaaatgacatctcccagttagttgatgaagttgtttgtgctctgcagccagtcatccaggataaaccatttgcattttttggccacagtatgggatcctacattgcttttaggactgcactaggtctaaaagaaaacaatcaaccagaaccattgcatttatttttgtcaagtgcaactcctgtacattcaaaggcctggcatcgcattcccaaagatgatgaattgtcagaagaacaaataagtcattaccttatggaatttggaggcacccccaagcattttgctgaagccaaggaatttgtgaaacaatgtagtcccatcataagggcagatctgaacattgttagaagttgcacctctaacgtaccatctaaggctgttctttcctgtgacttgacatgttttgttggatctgaagacatagcaaaggacatggaagcctggaaagatgtaaccagtggaaatgctaaaatttaccagcttccagggggtcacttttatcttctggatcctgcgaacgagaaattaatcaagaactacataatcaagtgtctagaagtatcatcgatatccaatttttagatattttccctttcacttttaaaataatcaaagtaatatcatactcttctcagttattcagatatagctcagttttattcagattggaaattacacattttctactgtcagggagattcgttacataaatatatttacgtatctggggacaaaggtcaagccagtaaagaatacttctggcagcactttgggaggccaaggcgggcggatcacgaggtcaggagatcgagaccgtcctggctaacaccgtgaaaccccatctctactaaaaatacacaaaattagctgggcgtggtggtgggcacctgtagtcccagctactcgggaggctgaggcaggagaatggtgtgaacctgggaggtggagcttgcagtgaaccgagatcgctccactgcactccagcctgggtgacagatccagactctgtctcaaaaaaaaaaaaaaaaaatacttctggcagagtcttttatcttcctattaaaatctcacttgattctcctttatgggaagtttgtcgacaaaattcatgattagtaaattatccattttttccttcagttagtttaatggtgaagatgattaacaggggaaatgcttgaagtaaatgattgtttcaatggc

SEQ ID NO: 428997 - DNA, 1741 bp, Homo sapiens
agattacctcatttcctgtgtcctctctttctttggcaatccaaagaaagtcatctttcagattgtctgctcagagttcatctcaaagcctggcaaggattggagaggtcaataagagtcagcgcctttaaaaagaaatctactcactcttctgtgtgcataaggccgagcagaggttcttcgtctcaagaggaactgacttctgttgagcactcaacacgccacagagaccagccatcttgcaacctcacctcacagcatggagagaggagaccaacctaagagaaccaggcaggccaccccttgtgccaccaggctcttcctccatcccaggggctccgataccctgcctttgaatgaaaacattttcaactgcttatacaaaaaccctgaggcaacttttaagctgatttgctttccctggatgggaggtggctccactcattttgccaaatggggccaagatactcatgatttgctggaagtgcactccttaaggcttcctggaagagaaagcagagttgaagaacctcttgaaaatgacatctcccagttagttgatgaagttgtttgtgctctgcagccagtcatccaggataaaccatttgcattttttggccacagtatgggatcctacattgcttttaggactgcactaggtctaaaagaaaacaatcaaccagaaccattgcatttatttttgtcaagtgcaactcctgtacattcaaaggcctggcatcgcattcccaaagatgatgaattgtcagaagaacaaataagtcattaccttatggaatttggaggcacccccaagcattttgctgaagccaaggaatttgtgaaacaatgtagtcccatcataagggcagatctgaacattgttagaagttgcacctctaacgtaccatctaaggctgttctttcctgtgacttgacatgttttgttggatctgaagacatagcaaaggacatggaagcctggaaagatgtaaccagtggaaatgctaaaatttaccagcttccagggggtcacttttatcttctggatcctgcgaacgagaaattaatcaagaactacataatcaagtgtctagaagtatcatcgatatccaatttttagatattttccctttcacttttaaaataatcaaagtaatatcatactcttctcagttattcagatatagctcagttttattcagattggaaattacacattttctactgtcagggagattcgttacataaatatatttacgtatctggggacaaaggtcaagccagtaaagaatacttctggcagcactttgggaggccaaggcgggcggatcacgaggtcaggagatcgagaccgtcctggctaacaccgtgaaaccccatctctactaaaaatacacaaaattagctgggcgtggtggtgggcacctgtagtcccagctactcgggaggctgaggcaggagaatggtgtgaacctgggaggtggagcttgcagtgaaccgagatcgctccactgcactccagcctgggtgacagatccagactctgtctcaaaaaaaaaaaaaaaaaatacttctggcagagtcttttatcttcctattaaaatctcacttgattctcctttatgggaagtttgtcgacaaaattcatgattagtaaattatccattttttccttcagttagtttaatggtgaagatgattaacaggggaaatgcttgaagtaaatgattgtttcaatggc

SEQ ID NO: 428998 - DNA, 1056 bp, Homo sapiens
agattacctcatttcctgtgtcctctctttctttggcaatccaaagaaagtcatctttcagattgtctgctcagagttcatctcaaagcctggcaaggattggagaggtcaataagagtcagcgcctttaaaaagaaatctactcactcttctgtgtgcataaggccgagcagaggttcttcgtctcaagaggaactgacttctgttgagcactcaacacgccacagagaccagccatcttgcaacctcacctcacagcatggagagaggagaccaacctaagagaaccaggaatgaaaacattttcaactgcttatacaaaaaccctgaggcaacttttaagctgatttgctttccctggatgggaggtggctccactcattttgccaaatggggccaagatactcatgatttgctggaagtgcactccttaaggcttcctggaagagaaagcagagttgaagaacctcttgaaaatgacatctcccagttagttgatgaagttgtttgtgctctgcagccagtcatccaggataaaccatttgcattttttggccacagtatgggatcctacattgcttttaggactgcactaggtctaaaagaaaacaatcaaccagaaccattgcatttatttttgtcaagtgcaactcctgtacattcaaaggcctggcatcgcattcccaaagatgatgaattgtcagaagaacaaataagtcattaccttatggaatttggaggcacccccaagcattttgctgaagccaaggaatttgtgaaacaatgtagtcccatcataagggcagatctgaacattgttagaagttgcactgtgaataatttcctctgactgtcttcaaggccgctgactttcttcagctgtatcaagtctactgatgagcctgtcaaagaacttcttcatttctgttatttctagaaatcccatttgactctcttctggtttttacctttctaatgaaattccccatgtgttcatgaatgttagccaccttttccactaaatctgttgataaattaatcctatgtattttaaag

SEQ ID NO: 428999 - DNA, 356 bp, Homo sapiens
  misc_feature (32)..(32): n is a, c, g, or t
  misc_feature (36)..(36): n is a, c, g, or t
  misc_feature (123)..(123): n is a, c, g, or t
  misc_feature (145)..(145): n is a, c, g, or t
ctctgatctttactccatcatcactactatanctcntcctttttttcgcccccccaaaaaaacccccaaaaaaacccccccccttttttcccccccccccccaaagaaaggggaaattggggnaaaaaaagccccctttcccaanaatgggagaacttccttttgaacaacgcagctgccatgatgccttgggatgccctggtcctgggggactcaggtgcctccctgattcctgtgggaaccccgggttcagggccagggcctccttggaataaatggttattgttactaggtccccaccttccctcttttctggaagccaaagtcagcctccccaataaagtcctcactgccaa

SEQ ID NO: 429000 - DNA, 767 bp, Homo sapiens
agcgggcacacccggaagtgggtgcgggccagccggctcgcccgggggccatggcagcagcggctactgcagccgagggggtccccagtcgggggcctcccggggaagtcattcatctgaatgtgggaggcaagagattcagtacctctcgccagactctcacctggatcccagactccttcttctccagtcttctgagcggacgcatctcgacgctgaaagatgagaccggagcaatcttcatcgacagggaccctacagtcttcgcccccatcctcaacttcctgcgcaccaaagagttggatcccaggggtgtccacggttccagcctcctccatgaagcccagttctatgggctcactcctctggttcgtcgcctgcagcttcgagaggagttggatcgatcttcttgtggaaacgtcctcttcaatggttacctgccgccaccagtgttcccagtgaaagcgggcggaacccgggcagcaggcctaggttggggggccctcaagacagaccttagggaagggaaccgggggcaaggcccccccgtgggtcccggaaccggggaagccaaaaccaaccggaattggcccacccccgataaccttttgtggccacaaatggccaggtgcctgcctgggggcgccgaaattggcctcgtgcatgaagaaagaaacccccttcacccgtcaagcccttcaagggacgaatcttgatgggaagccccgggggattgggttgcggcctgtggttgtgttgggacacca

SEQ ID NO: 429001 - DNA, 369 bp, Homo sapiens
agcgggcacacccggaagtgggtgcgggccagccggctcgcccgggggccatggcagcagcggctactgcagccgagggggtccccagtcgggggcctcccggggaagtcattcatctgaatgtgggaggcaagagattcagtacctctcgccagactctcacctggatcccagactccttcttctccagtcttctgagcggacgcatctcgacgctgaaagatgagaccggagcaatcttcatcgacagggaccctacagtcttcgcccccatcctcaacttcctgcgcaccaaagagttggatcccaggttggcatggaaaaaggggagggagtccctcactgtcttcagtccctgaggagttcttt

SEQ ID NO: 429002 - DNA, 2482 bp, Homo sapiens
agcgggcacacccggaagtgggtgcgggccagccggctcgcccgggggccatggcagcagcggctactgcagccgagggggtccccagtcgggggcctcccggggaagtcattcatctgaatgtgggaggcaagagattcagtacctctcgccagactctcacctggatcccagactccttcttctccagtcttctgagcggacgcatctcgacgctgaaagatgagaccggagcagtgagtcggacaagaactgaaatgggatgggggggcaggggtttggtaggaagaggggcaggaccccactcagtcctgcctttgaccgccatccatcctctgcccccctttcccgcagatcttcatcgacagggaccctacagtcttcgcccccatcctcaacttcctgcgcaccaaagagttggatcccaggggtgtccacggttccagcctcctccatgaagcccagttctatgggctcactcctctggttcgtcgcctgcagcttcgagaggagttggatcgatcttcttgtggaaacgtcctcttcaatggttacctgccgccaccagtgttcccagtgaagcggcggaaccggcacagcctagtggggcctcagcagctaggaggacggccagcccctgtccgacggagcaacacgatgccccccaaccttggcaatgcagggctgctgggccgaatgctggatgagaaaacccctccctcaccctcaggacaacctgaggagccggggatggtgcgcctggtgtgtggacaccataattggatcgctgtggcctatacccagtttctagtctgctacaggttgaaggaagcctctggctggcagctggtgttttccagcccccgcctggactggcccatcgaacgactggcgctcacagcccgggtgcatggtggggctttgggtgaacatgacaagatggtggcagcagccaccggcagcgagatcctgctatgggctctgcaggcggaaggcggtggctccgagataggggtctttcatctgggggtgcctgtggaggccttgttcttcgtcgggaaccagctcattgctacaagccacacagggcgcatcggggtgtggaatgccgtcaccaagcactggcaggtccaggaggtgcagcccatcaccagttatgacgcggcaggctccttcctcctcctgggctgcaacaacggctccatttactacgtggatgtgcagaagttccccttgcgcatgaaagacaacgacctccttgtcagcgagctctatcgggacccagcggaggatggggtcaccgccctcagtgtctacctcacccccaagaccagtgacagtgggaactggatcgagatcgcctatggcaccagctcagggggcgtgcgggtcatcgtgcagcacccggagactgtgggctcggggcctcagctcttccagaccttcactgtgcaccgcagccctgtcaccaagatcatgctgtcggagaagcacctcatctcagtctgtgccgacaacaaccacgtgcggacatggtctgtgactcgcttccgcggcatgatttccacccagcccggctccaccccactcgcttcctttaagatcctggctctggagtcggcagatgggcatggcggctgcagtgctggcaatgacattggcccctacggtgagcgggacgaccagcaagtgttcatccagaaggtggtgcccagtgccagccagctcttcgtgcgtctctcatctactgggcagcgggtgtgctccgtgcgctccgtggacggctcacccacgacagccttcacagtgctggagtgcgagggctcccggcggctcggctctcggccccggcgctacctgctcactggccaggccaacggcagcttggccatgtgggacctaaccaccgccatggacggcctcggccaggcccctgcaggtggcctgacggagcaagagctgatggaacagctggaacactgtgagctggccccgccggctccttcagctccctcatggggctgtctccccagcccctcaccccgcatctccctcaccagcctccactcagcctccagcaacacctccttgtctggccaccgtgggagcccaagccccccgcaggctgaggcccggcgccgtggtgggggcagctttgtggaacgctgccaggaactggtgcggagtgggccagacctccgacggccacccacaccagccccgtggccctccagcggtctcggcactcccctcacacctcccaagatgaagctcaatgaaacttccttttgaacaacgcagctgccatgatgccttgggatgccctggtcctgggggactcaggtgcctccctgattcctgtgggaaccccgggttcagggccagggcctccttggaataaatggttattgttactaggtccccaccttccctcttttctggaagccaaagtcagcctccccaataaagtcctcactgccaa

SEQ ID NO: 429003 - DNA, 2395 bp, Homo sapiens
agcgggcacacccggaagtgggtgcgggccagccggctcgcccgggggccatggcagcagcggctactgcagccgagggggtccccagtcgggggcctcccggggaagtcattcatctgaatgtgggaggcaagagattcagtacctctcgccagactctcacctggatcccagactccttcttctccagtcttctgagcggacgcatctcgacgctgaaagatgagaccggagcaatcttcatcgacagggaccctacagtcttcgcccccatcctcaacttcctgcgcaccaaagagttggatcccagaccctgacctctagtcaattctactacccaggggtgtccacggttccagcctcctccatgaagcccagttctatgggctcactcctctggttcgtcgcctgcagcttcgagaggagttggatcgatcttcttgtggaaacgtcctcttcaatggttacctgccgccaccagtgttcccagtgaagcggcggaaccggcacagcctagtggggcctcagcagctaggaggacggccagcccctgtccgacggagcaacacgatgccccccaaccttggcaatgcagggctgctgggccgaatgctggatgagaaaacccctccctcaccctcaggacaacctgaggagccggggatggtgcgcctggtgtgtggacaccataattggatcgctgtggcctatacccagtttctagtctgctacaggttgaaggaagcctctggctggcagctggtgttttccagcccccgcctggactggcccatcgaacgactggcgctcacagcccgggtgcatggtggggctttgggtgaacatgacaagatggtggcagcagccaccggcagcgagatcctgctatgggctctgcaggcggaaggcggtggctccgagataggggtctttcatctgggggtgcctgtggaggccttgttcttcgtcgggaaccagctcattgctacaagccacacagggcgcatcggggtgtggaatgccgtcaccaagcactggcaggtccaggaggtgcagcccatcaccagttatgacgcggcaggctccttcctcctcctgggctgcaacaacggctccatttactacgtggatgtgcagaagttccccttgcgcatgaaagacaacgacctccttgtcagcgagctctatcgggacccagcggaggatggggtcaccgccctcagtgtctacctcacccccaagaccagtgacagtgggaactggatcgagatcgcctatggcaccagctcagggggcgtgcgggtcatcgtgcagcacccggagactgtgggctcggggcctcagctcttccagaccttcactgtgcaccgcagccctgtcaccaagatcatgctgtcggagaagcacctcatctcagtctgtgccgacaacaaccacgtgcggacatggtctgtgactcgcttccgcggcatgatttccacccagcccggctccaccccactcgcttcctttaagatcctggctctggagtcggcagatgggcatggcggctgcagtgctggcaatgacattggcccctacggtgagcgggacgaccagcaagtgttcatccagaaggtggtgcccagtgccagccagctcttcgtgcgtctctcatctactgggcagcgggtgtgctccgtgcgctccgtggacggctcacccacgacagccttcacagtgctggagtgcgagggctcccggcggctcggctctcggccccggcgctacctgctcactggccaggccaacggcagcttggccatgtgggacctaaccaccgccatggacggcctcggccaggcccctgcaggtggcctgacggagcaagagctgatggaacagctggaacactgtgagctggccccgccggctccttcagctccctcatggggctgtctccccagcccctcaccccgcatctccctcaccagcctccactcagcctccagcaacacctccttgtctggccaccgtgggagcccaagccccccgcaggctgaggcccggcgccgtggtgggggcagctttgtggaacgctgccaggaactggtgcggagtgggccagacctccgacggccacccacaccagccccgtggccctccagcggtctcggcactcccctcacacctcccaagatgaagctcaatgaaacttccttttgaacaacgcagctgccatgatgccttgggatgccctggtcctgggggactcaggtgcctccctgattcctgtgggaaccccgggttcagggccagggcctccttggaataaatggttattgttactaggtccccaccttccctcttttctggaagccaaagtcagcctccccaataaagtcctcactgccaa

SEQ ID NO: 429004 - DNA, 3076 bp, Homo sapiens
agcgggcacacccggaagtgggtgcgggccagccggctcgcccgggggccatggcagcagcggctactgcagccgagggggtccccagtcgggggcctcccggggaagtcattcatctgaatgtgggaggcaagagattcagtacctctcgccagactctcacctggatcccagactccttcttctccagtcttctgagcggacgcatctcgacgctgaaagatgagaccggagcaatcttcatcgacagggaccctacagtcttcgcccccatcctcaacttcctgcgcaccaaagagttggatcccaggggtgtccacggttccagcctcctccatgaagcccagttctatgggctcactcctctggttcgtcgcctgcagcttcgagaggagttggatcgatcttcttgtggaaacgtcctcttcaatggttacctgccgccaccagtgttcccagtgaagcggcggaaccggcacagcctagtggggcctcagcagctaggaggacggccagcccctgtccgacggagcaacacgatgccccccaaccttggcaatgcagggctgctgggccgaatgctggatgagaaaacccctccctcaccctcaggacaacctgaggagccggggatggtgcgcctggtgtgtggacaccataattggatcgctgtggcctatacccagtttctagtctgctacaggttgaaggaagcctctggctggcagctggtgttttccagcccccgcctggactggcccatcgaacgactggcgctcacagcccgggtgcatggtggggctttgggtgaacatgacaagatggtggcagcagccaccggcagcgagatcctgctatgggctctgcaggcggaaggcggtggctccgagataggggtctttcatctgggggtgcctgtggaggccttgttcttcgtcgggaaccagctcattgctacaagccacacagggcgcatcggggtgtggaatgccgtcaccaagcactggcaggtccaggaggtgcagcccatcaccagttatgacgcggcaggctccttcctcctcctgggctgcaacaacggctccatttactacgtggatgtgcagaagttccccttgcgcatgaaagacaacgacctccttgtcagcgagctctatcgggacccagcggaggatggggtcaccgccctcagtgtctacctcacccccaagaccagtgacagtgggaactggatcgagatcgcctatggcaccagctcagggggcgtgcgggtcatcgtgcagcacccggagactgtgggctcggggcctcagctcttccagaccttcactgtgcaccgcagccctgtcaccaagatcatgctgtcggagaagcacctcatctcagtctgtgccgacaacaaccacgtgcggacatggtctgtgactcgcttccgcggcatgatttccacccagcccggctccaccccactcgcttcctttaagatcctggctctggagtcggcagatgggcatggcggctgcagtgctggcaatgacattggcccctacggtgagcgggacgaccagcaagtgttcatccagaaggtggtgcccagtgccagccagctcttcgtgcgtctctcatctactgggcagcgggtgtgctccgtgcgctccgtggacggctcacccacgacagccttcacagtgctggagtgcgagggctcccggcggctcggctctcggccccggcgctacctgctcactggccaggccaacggcagcttggccatgtgggacctaaccaccgccatggacggcctcggccaggcccctgcaggtggcctgacggagcaagagctgatggaacagctggaacactgtgagctggccccgccggctccttcagctccctcatggggctgtctccccagcccctcaccccgcatctccctcaccagcctccactcagcctccagcaacacctccttgtctggccaccgtgggagcccaagccccccgcaggctgaggcccggcgccgtggtgggggcagctttgtggaacgctgccaggaactggtgcggagtgggccagacctccgacggccacccacaccagccccgtggccctccagcggtctcggcactcccctcacacctcccaagatgaagctcaatgaaacttccttttgaacaacgcagctgccatgatgccttgggatgccctggtcctgggggactcaggtgcctccctgattcctgtgggaaccccgggttcagggccagggcctccttggaataaatggttattgttactaggtccccaccttccctcttttctggaagccaaagtcagcctccccaataaagtcctcactgccaaaaaaaaaaaaaaaaaaaaaaaaaaaaatttgtgtgcggcccccgcgcccggcgcccggaaaaagtttttaaaaaaccacattcgcgtgttggggcgcgcgcggggcccccagagggtataggggccacttgggcctaagcggtggtcccaaggggaacccggggccaggaacgggggtgggtttcccccccaattaaaaaaacgcgccggggggccacccggggggcgtctgggacaaaacccccagggggggacggtcgagagacggcccaatcaagggggtgtcctataacaagacgggggggtgccacaggcgagagaggctcggatataattaaaattaacccgccccgcgcagggggaaggaagagccagaccagagcgaaaacaccagacaaccaggaacagcacagacgagacaaccaaacaacacaaagcgcacacgagggacaccaacacgaaaccagcgacatcgcacccagggaccaacacagcagcccccccccaggcaagtccccaccaacgccgacatcggcacagagccgcaacaggcgcaacaacaaaatcaagacacataacacaaacacagtcaaaaactcacagcccagaacagaggcagaaacaaaccaaaacagcacgaccgaataagacaacggagcgagacgaccgacagggcaaagcgcataccaacacaggcacacaaaatgaccag

SEQ ID NO: 429005 - DNA, 2088 bp, Homo sapiens
agcgggcacacccggaagtgggtgcgggccagccggctcgcccgggggccatggcagcagcggctactgcagccgagggggtccccagtcgggggcctcccggggaagtcattcatctgaatgtgggaggcaagagattcagtacctctcgccagactctcacctggatcccagactccttcttctccagtcttctgagcggacgcatctcgacgctgaaagatgagaccggagcaatcttcatcgacagggaccctacagtcttcgcccccatcctcaacttcctgcgcaccaaagagttggatcccaggggtgtccacggttccagcctcctccatgaagcccagttctatgggctcactcctctggttcgtcgcctgcagcttcgagaggagttggatcgatcttcttgtggaaacgtcctcttcaatggttacctgccgccaccagtgttcccagtgaagcggcggaaccggcacagcctagtggggcctcagcagctaggaggacggccagcccctgtccgacggagcaacacgatgccccccaaccttggcaatgcagggctgctgggccgaatgctggatgagaaaacccctccctcaccctcaggacaacctgaggagccggggatggtgcgcctggtgtgtggacaccataattggatcgctgtggcctatacccagtttctagtctgctacaggttgaaggaagcctctggctggcagctggtgttttccagcccccgcctggactggcccatcgaacgactggcgctcacagcccgggtgcatggtggggctttgggtgaacatgacaagatggtggcagcagccaccggcagcgagatcctgctatgggctctgcaggcggaaggcggtggctccgagataggggtctttcatctgggggtgcctgtggaggccttgttcttcgtcgggaaccagctcattgctacaagccacacagggcgcatcggggtgtggaatgccgtcaccaagcactggcaggtccaggaggtgcagcccatcaccagttatgacgcggcaggctccttcctcctcctgggctgcaacaacggctccatttactacgtggatgtgcagaagttccccttgcgcatgaaagacaacgacctccttgtcagcgagctctatcgggacccagcggaggatggggtcaccgccctcagtgtctacctcacccccaagaccagtgacagtgggaactggatcgagatcgcctatggcaccagctcagggggcgtgcgggtcatcgtgcagcacccggagactgtgggctcggggcctcagctcttccagaccttcactgtgcaccgcagccctgtcaccaagatcatgctgtcggagaagcacctcatctcagtctgtgccgacaacaaccacgtgcggacatggtctgtgactcgcttccgcggcatgatttccacccagcccggctccaccccactcgcttcctttaagatcctggctctggagtcggcagatgggcatggcggctgcagtgctggcaatgacattgcaggtggcctgacggagcaagagctgatggaacagctggaacactgtgagctggccccgccggctccttcagctccctcatggggctgtctccccagcccctcaccccgcatctccctcaccagcctccactcagcctccagcaacacctccttgtctggccaccgtgggagcccaagccccccgcaggctgaggcccggcgccgtggtgggggcagctttgtggaacgctgccaggaactggtgcggagtgggccagacctccgacggccacccacaccagccccgtggccctccagcggtctcggcactcccctcacacctcccaagatgaagctcaatgaaacttccttttgaacaacgcagctgccatgatgccttgggatgccctggtcctgggggactcaggtgcctccctgattcctgtgggaaccccgggttcagggccagggcctccttggaataaatggttattgttactaggtccccaccttccctcttttctggaagccaaagtcagcctccccaataaagtcctcactgccaa

SEQ ID NO: 429006 - DNA, 1394 bp, Homo sapiens
cgctctgtcattcaacccaggctggagtgcaatggcgcaatctcagctcactacaacctctgcctcctgggttcaagcaattctccagactcagcctcccaagtagctgggattacgggtgcctgccaccatgcccagctaatttttgtgtttttagtagaggcagggttttgccacgttggctaagcaagttttgaactcctgggattctcctctcgtcgtctcccaaagtgctggaattacaggtgacagtgggaactggatcgagatcgcctatggcaccagctcagggggcgtgcgggtcatcgtgcagcacccggagactgtgggctcggggcctcagctcttccagaccttcactgtgcaccgcagccctgtcaccaagatcatgctgtcggagaagcacctcatctcagtctgtgccgacaacaaccacgtgcggacatggtctgtgactcgcttccgcggcatgatttccacccagcccggctccaccccactcgcttcctttaagatcctggctctggagtcggcagatgggcatggcggctgcagtgctggcaatgacattggcccctacggtgagcgggacgaccagcaagtgttcatccagaaggtggtgcccagtgccagccagctcttcgtgcgtctctcatctactgggcagcgggtgtgctccgtgcgctccgtggacggctcacccacgacagccttcacagtgctggagtgcgagggctcccggcggctcggctctcggccccggcgctacctgctcactggccaggccaacggcagcttggccatgtgggacctaaccaccgccatggacggcctcggccaggcccctgcaggtggcctgacggagcaagagctgatggaacagctggaacactgtgagctggccccgccggctccttcagctccctcatggggctgtctccccagcccctcaccccgcatctccctcaccagcctccactcagcctccagcaacacctccttgtctggccaccgtgggagcccaagccccccgcaggctgaggcccggcgccgtggtgggggcagctttgtggaacgctgccaggaactggtgcggagtgggccagacctccgacggccacccacaccagccccgtggccctccagcggtctcggcactcccctcacacctcccaagatgaagctcaatgaaacttccttttgaacaacgcagctgccatgatgccttgggatgccctggtcctgggggactcaggtgcctccctgattcctgtgggaaccccgggttcagggccagggcctccttggaataaatggttattgttactaggtccccaccttccctcttttctggaagccaaagtcagcctccccaataaagtcctcactgccaa

SEQ ID NO: 429007 - DNA, 1059 bp, Homo sapiens
agcgggcacacccggaagtgggtgcgggccagccggctcgcccgggggccatggcagcagcggctactgcagccgagggggtccccagtcgggggcctcccggggaagtcattcatctgaatgtgggaggcaagagattcagtacctctcgccagactctcacctggatcccagactccttcttctccagtcttctgagcggacgcatctcgacgctgaaagatgagaccggagcaatcttcatcgacagggaccctacagtcttcgcccccatcctcaacttcctgcgcaccaaagagttggatcccaggggtgtccacggttccagcctcctccatgaagcccagttctatgggctcactcctctggttcgtcgcctgcagcttcgagaggagttggatcgatcttcttgtggaaacgtcctcttcaatggttacctgccgccaccagtgttcccagtgaagcggcggaaccggcacagcctagtggggcctcagcagctaggaggacggccagcccctgtccgacggagcaacacgatgccccccaaccttggcaatgcagggctgctgggccgaatgctggatgagaaaacccctccctcaccctcaggacaacctgaggagccggggatggtgcgcctggtgtgtggacaccataattggatcgctgtggcctatacccagtttctagtctgctacaggttgaaggaagcctctggctggcagctggtgttttccagcccccgcctggactggcccatcgaacgactggcgctcacagcccgggtgcatggtggggctttgggtgaacatgacaagatggtggcagcagccaccggcagcgagatcctgctatgggctctgcaggcggaaggcggtggctccgagataggggtctttcatctgggggtgcctgtggaggccttgttcttcgtcgggaaccagctcattgctacaagccacacagggcgcatcggggtgtggaatgccgtcaccaagcactggcaggtcagagttctggccagcctggctgcccccttcccagttttccagactg

SEQ ID NO: 429008 - DNA, 760 bp, Homo sapiens
gcgagggtgaccacctcccccactgcaccccccagggtgtgctccgtgcgctccgtggacggctcacccacgacagccttcacagtgctggagtgcgagggctcccggcggctcggctctcggccccggcgctacctgctcactggccaggccaacggcagcttggccatgtgggacctaaccaccgccatggacggcctcggccaggcccctgcaggtggcctgacggagcaagagctgatggaacagctggaacactgtgagctggccccgccggctccttcagctccctcatggggctgtctccccagcccctcaccccgcatctccctcaccagcctccactcagcctccagcaacacctccttgtctggccaccgtgggagcccaagccccccgcaggctgaggcccggcgccgtggtgggggcagctttgtggaacgctgccaggaactggtgcggagtgggccagacctccgacggccacccacaccagccccgtggccctccagcggtctcggcactcccctcacacctcccaagatgaagctcaatgaaacttccttttgaacaacgcagctgccatgatgccttgggatgccctggtcctgggggactcaggtgcctccctgattcctgtgggaaccccgggttcagggccagggcctccttggaataaatggttattgttactaggtccccaccttccctcttttctggaagccaaagtcagcctccccaataaagtcctcactgccaa

SEQ ID NO: 429009 - DNA, 158 bp, Homo sapiens
  misc_feature (12)..(12): n is a, c, g, or t
tgggtccaggtngtgctcgtcgtgtggaatgccgtcaccaagcactggcggtccaggaggtgcagcccatcaccagttatgacgcggcaggctccttcctcctcctgggctgcaacaacggctccatttactacgtggatgtgcagaagttccccttg

SEQ ID NO: 429010 - DNA, 2364 bp, Homo sapiens
agcgggcacacccggaagtgggtgcgggccagccggctcgcccgggggccatggcagcagcggctactgcagccgagggggtccccagtcgggggcctcccggggaagtcattcatctgaatgtgggaggcaagagattcagtacctctcgccagactctcacctggatcccagactccttcttctccagtcttctgagcggacgcatctcgacgctgaaagatgagaccggagcaatcttcatcgacagggaccctacagtcttcgcccccatcctcaacttcctgcgcaccaaagagttggatcccaggggtgtccacggttccagcctcctccatgaagcccagttctatgggctcactcctctggttcgtcgcctgcagcttcgagaggagttggatcgatcttcttgtggaaacgtcctcttcaatggttacctgccgccaccagtgttcccagtgaagcggcggaaccggcacagcctagtggggcctcagcagctaggaggacggccagcccctgtccgacggagcaacacgatgccccccaaccttggcaatgcagggctgctgggccgaatgctggatgagaaaacccctccctcaccctcaggacaacctgaggagccggggatggtgcgcctggtgtgtggacaccataattggatcgctgtggcctatacccagtttctagtctgctacaggttgaaggaagcctctggctggcagctggtgttttccagcccccgcctggactggcccatcgaacgactggcgctcacagcccgggtgcatggtggggctttgggtgaacatgacaagatggtggcagcagccaccggcagcgagatcctgctatgggctctgcaggcggaaggcggtggctccgagataggggtctttcatctgggggtgcctgtggaggccttgttcttcgtcgggaaccagctcattgctacaagccacacagggcgcatcggggtgtggaatgccgtcaccaagcactggcaggtccaggaggtgcagcccatcaccagttatgacgcggcaggctccttcctcctcctgggctgcaacaacggctccatttactacgtggatgtgcagaagttccccttgcgcatgaaagacaacgacctccttgtcagcgagctctatcgggacccagcggaggatggggtcaccgccctcagtgtctacctcacccccaagaccagtgacagtgggaactggatcgagatcgcctatggcaccagctcagggggcgtgcgggtcatcgtgcagcacccggagactgtgggctcggggcctcagctcttccagaccttcactgtgcaccgcagccctgtcaccaagatcatgctgtcggagaagcacctcatctcagtctgtgccgacaacaaccacgtgcggacatggtctgtgactcgcttccgcggcatgatttccacccagcccggctccaccccactcgcttcctttaagatcctggctctggagtcggcagatgggcatggcggctgcagtgctggcaatgacattggcccctacggtgagcgggacgaccagcaagtgttcatccagaaggtggtgcccagtgccagccagctcttcgtgcgtctctcatctactgggcagcgggtgtgctccgtgcgctccgtggacggctcacccacgacagccttcacagtgctggagtgcgagggctcccggcggctcggctctcggccccggcgctacctgctcactggccaggccaacggcagcttggccatgtgggacctaaccaccgccatggacggcctcggccaggcccctgcaggtggcctgacggagcaagagctgatggaacagctggaacactgtgagctggccccgccggctccttcagctccctcatggggctgtctccccagcccctcaccccgcatctccctcaccagcctccactcagcctccagcaacacctccttgtctggccaccgtgggagcccaagccccccgcaggctgaggcccggcgccgtggtgggggcagctttgtggaacgctgccaggaactggtgcggagtgggccagacctccgacggccacccacaccagccccgtggccctccagcggtctcggcactcccctcacacctcccaagatgaagctcaatgaaacttccttttgaacaacgcagctgccatgatgccttgggatgccctggtcctgggggactcaggtgcctccctgattcctgtgggaaccccgggttcagggccagggcctccttggaataaatggttattgttactaggtccccaccttccctcttttctggaagccaaagtcagcctccccaataaagtcctcactgccaa

SEQ ID NO: 429011 - DNA, 2019 bp, Homo sapiens
tatgtcccacacatggggaaatcaatcaccgtcatattttaagtgcttgctgtgtgacagccacgattacaatgactgttactctacctcttattctcactgtagtgttcccagtgaagcggcggaaccggcacagcctagtggggcctcagcagctaggaggacggccagcccctgtccgacggagcaacacgatgccccccaaccttggcaatgcagggctgctgggccgaatgctggatgagaaaacccctccctcaccctcaggacaacctgaggagccggggatggtgcgcctggtgtgtggacaccataattggatcgctgtggcctatacccagtttctagtctgctacaggttgaaggaagcctctggctggcagctggtgttttccagcccccgcctggactggcccatcgaacgactggcgctcacagcccgggtgcatggtggggctttgggtgaacatgacaagatggtggcagcagccaccggcagcgagatcctgctatgggctctgcaggcggaaggcggtggctccgagataggggtctttcatctgggggtgcctgtggaggccttgttcttcgtcgggaaccagctcattgctacaagccacacagggcgcatcggggtgtggaatgccgtcaccaagcactggcaggtccaggaggtgcagcccatcaccagttatgacgcggcaggctccttcctcctcctgggctgcaacaacggctccatttactacgtggatgtgcagaagttccccttgcgcatgaaagacaacgacctccttgtcagcgagctctatcgggacccagcggaggatggggtcaccgccctcagtgtctacctcacccccaagaccagtgacagtgggaactggatcgagatcgcctatggcaccagctcagggggcgtgcgggtcatcgtgcagcacccggagactgtgggctcggggcctcagctcttccagaccttcactgtgcaccgcagccctgtcaccaagatcatgctgtcggagaagcacctcatctcagtctgtgccgacaacaaccacgtgcggacatggtctgtgactcgcttccgcggcatgatttccacccagcccggctccaccccactcgcttcctttaagatcctggctctggagtcggcagatgggcatggcggctgcagtgctggcaatgacattggcccctacggtgagcgggacgaccagcaagtgttcatccagaaggtggtgcccagtgccagccagctcttcgtgcgtctctcatctactgggcagcgggtgtgctccgtgcgctccgtggacggctcacccacgacagccttcacagtgctggagtgcgagggctcccggcggctcggctctcggccccggcgctacctgctcactggccaggccaacggcagcttggccatgtgggacctaaccaccgccatggacggcctcggccaggcccctgcaggtggcctgacggagcaagagctgatggaacagctggaacactgtgagctggccccgccggctccttcagctccctcatggggctgtctccccagcccctcaccccgcatctccctcaccagcctccactcagcctccagcaacacctccttgtctggccaccgtgggagcccaagccccccgcaggctgaggcccggcgccgtggtgggggcagctttgtggaacgctgccaggaactggtgcggagtgggccagacctccgacggccacccacaccagccccgtggccctccagcggtctcggcactcccctcacacctcccaagatgaagctcaatgaaacttccttttgaacaacgcagctgccatgatgccttgggatgccctggtcctgggggactcaggtgcctccctgattcctgtgggaaccccgggttcagggccagggcctccttggaataaatggttattgttactaggtccccaccttccctcttttctggaagccaaagtcagcctccccaataaagtcctcactgccaa

SEQ ID NO: 429012 - DNA, 2193 bp, Homo sapiens
agcgggcacacccggaagtgggtgcgggccagccggctcgcccgggggccatggcagcagcggctactgcagccgagggggtccccagtcgggggcctcccggggaagtcattcatctgaatgtgggaggcaagagattcagtacctctcgccagactctcacctggatcccagactccttcttctccagtcttctgagcggacgcatctcgacgctgaaagatgagaccggagcaatcttcatcgacagggaccctacagtcttcgcccccatcctcaacttcctgcgcaccaaagagttggatcccaggggtgtccacggttccagcctcctccatgaagcccagttctatgggctcactcctctggttcgtcgcctgcagcttcgagaggagttggatcgatcttcttgtggaaacgtcctcttcaatggttacctgccgccaccagtgttcccagtgaagcggcggaaccggcacagcctagtggggcctcagcagctaggaggacggccagcccctgtccgacggagcaacacgatgccccccaaccttggcaatgcagggctgctgggccgaatgctggatgagaaaacccctccctcaccctcaggacaacctgaggagccggggatggtgcgcctggtgtgtggacaccataattggatcgctgtggcctatacccagtttctagtctgctacaggttgaaggaagcctctggctggcagctggtgttttccagcccccgcctggactggcccatcgaacgactggcgctcacagcccgggtgcatggtggggctttgggtgaacatgacaagatggtggcagcagccaccggcagcgagatcctgctatgggctctgcaggcggaaggcggtggctccgagataggggtctttcatctgggggtgcctgtggaggccttgttcttcgtcgggaaccagctcattgctacaagccacacagggcgcatcggggtgtggaatgccgtcaccaagcactggcaggtccaggaggtgcagcccatcaccagttatgacgcggcaggctccttcctcctcctgggctgcaacaacggctccatttactacgtggatgtgcagaagttccccttgcgcatgaaagacaacgacctccttgtcagcgagctctatcgggacccagcggaggatggggtcaccgccctcagtgtctacctcacccccaagaccatctgtgccgacaacaaccacgtgcggacatggtctgtgactcgcttccgcggcatgatttccacccagcccggctccaccccactcgcttcctttaagatcctggctctggagtcggcagatgggcatggcggctgcagtgctggcaatgacattggcccctacggtgagcgggacgaccagcaagtgttcatccagaaggtggtgcccagtgccagccagctcttcgtgcgtctctcatctactgggcagcgggtgtgctccgtgcgctccgtggacggctcacccacgacagccttcacagtgctggagtgcgagggctcccggcggctcggctctcggccccggcgctacctgctcactggccaggccaacggcagcttggccatgtgggacctaaccaccgccatggacggcctcggccaggcccctgcaggtggcctgacggagcaagagctgatggaacagctggaacactgtgagctggccccgccggctccttcagctccctcatggggctgtctccccagcccctcaccccgcatctccctcaccagcctccactcagcctccagcaacacctccttgtctggccaccgtgggagcccaagccccccgcaggctgaggcccggcgccgtggtgggggcagctttgtggaacgctgccaggaactggtgcggagtgggccagacctccgacggccacccacaccagccccgtggccctccagcggtctcggcactcccctcacacctcccaagatgaagctcaatgaaacttccttttgaacaacgcagctgccatgatgccttgggatgccctggtcctgggggactcaggtgcctccctgattcctgtgggaaccccgggttcagggccagggcctccttggaataaatggttattgttactaggtccccaccttccctcttttctggaagccaaagtcagcctccccaataaagtcctcactgccaa

SEQ ID NO: 429013 - DNA, 1595 bp, Homo sapiens
agcgggcacacccggaagtgggtgcgggccagccggctcgcccgggggccatggcagcagcggctactgcagccgagggggtccccagtcgggggcctcccggggaagtcattcatctgaatgtgggaggcaagagattcagtacctctcgccagactctcacctggatcccagactccttcttctccagtcttctgagcggacgcatctcgacgctgaaagatgagaccggagcaatcttcatcgacagggaccctacagtcttcgcccccatcctcaacttcctgcgcaccaaagagttggatcccaggggtgtccacggttccagcctcctccatgaagcccagttctatgggctcactcctctggttcgtcgcctgcagcttcgagaggagttggatcgatcttcttgtggaaacgtcctcttcaatggttacctgccgccaccagtgttcccagtgaagcggcggaaccggcacagcctagtggggcctcagcagctaggaggacggccagcccctgtccgacggagcaacacgatgccccccaaccttggcaatgcagggctgctgggccgaatgctggatgagaaaacccctccctcaccctcaggacaacctgaggagccggggatggtgcgcctggtgtgtggacaccataattggatcgctgtggcctatacccagtttctagtctgctacaggttgaaggaagcctctggctggcagctggtgttttccagcccccgcctggactggcccatcgaacgactggcgctcacagcccgggtgcatggtggggctttgggtgaacatgacaagatggtggcagcagccaccggcagcgagatcctgctatgggctctgcaggcggaaggcggtggctccgagataggggtctttcatctgggggtgcctgtggaggccttgttcttcgtcgggaaccagctcattgctacaagccacacagggcgcatcggggtgtggaatgccgtcaccaagcactggcaggtccaggaggtgcagcccatcaccagttatgacgcggcaggctccttcctcctcctgggctgcaacaacggctccatttactacgtggatgtgcagaagttccccttgcgcatgaaagacaacgacctccttgtcagcgagctctatcgggacccagcggaggatggggtcaccgccctcagtgtctacctcacccccaagaccagtgacagtgggaactggatcgagatcgcctatggcaccagctcagggggcgtgcgggtcatcgtgcagcacccggagactgtgggctcggggcctcagctcttccagaccttcactgtgcaccgcagccctgtcaccaagatcatgctgtcggagaagcacctcatctcagtctgtgccgacaacaaccacgtgcggacatggtctgtgactcgcttccgcggcatgatttccacccagcccggctccaccccactcgcttcctttaagatcctggctctggagtcggcagatgggcatggcggctgcagtgctggcaatgacattggtgcctactggctcctggccttcccaccccactgacccccttacctgacccct

SEQ ID NO: 429014 - DNA, 2087 bp, Homo sapiens
gaggtggagtctccctctgttgcccaggctggagtgcagtggcatgatctcggctcactgcaaccctccacctcctgaattaaagtgattctcctgcctcagcctcccgagtagctgggattacaggcacgcaccactacacccagataatttttgtatttttagtagagacgtgatttcaccatgttggccaggctggtctcgaactcctgacctcagctgatctgcccgccttggcctcccaaagtgctgggattacaggcgtgatccactgcacctggcctcaggtatgtttttctatctacacacaaaaagtttattttccttcctcttatttgatatcagaagaatgacaggaatcagtttttaacagagatagtttttccgtttctccattgtgttaatcagagcgcagacttacattctcagtcatttatcttttctggtggagaataaaaagtcacttatagttaaagatcagaaaattatcacaccaaatccattacatatgttagaatcaataatttactcaaaaatcagcttttataggtatgttggcaccttatccaagaacttatccctgttccagtacccctgtgcttcattcagtatcagtaaccctgcaatgatttttacaaatatctttttctagtgggttttttacttagaggaaagaactttgtaatagctcttaatgtttatatataagagaagacagaatggaaaatgttttttgaagtcaaatattgcatgatgtaaagaaaaaactttaaacttaaatgagtaggttgtcctgaattacactggtaactctctacttctttattaaagaagttatagtaagatgcctttgttacctgatttcagtgtacattgtttttatgtggttttctgataatgtcctgtcagaattgtattggtttaggccaaaggccatagcaaaaacatagagaacaaatatgatcttaaaaatagattgtaacattttaaacaattagtttagtaatttgggaaatagtggatgcataatactttaacagaagtcacacatctgtaggtttatcttttgattattctcctgaggcattagatagtttttctattataagtgacagattgactcacttaatataaataagtagcatacactaaaagcttactatgtgccagatactgtgctggacacttacatagataagccattgaatccacacagcagccctgtaagaaataagtaaaatctgcataaagtgttgaaataggaatatacatttcattatgaaaaatgaatagattatgcctatctgaatcaatattgcattcaaataagtgattacttaaatcatatatcatagtttacactccttaaaaaaaggtacataaattcagtgaggtttttttcttaacatacagaagtactaaatactgcttgcagtataatattgatattggaagctgcagtttccagaataagtggagtaataactaaacagacatttaattttatttcaatatctatggaaaaaacacttattaaatctccctgtattttatgttgtctttattacagaatcacttgtctgtttgttgtgtgccacttactgacaaaactttaaacagtacttgatgccagctctctactctgtggctgtgggacctgtttcttttaggtacttgtgcttattaatctacttactaaattttcacattgacatttttggggatgatactaccatatacgaaatggaaaatgtaatatgctcagtgcttctgtaaaatgcagcaatactggtattactttacatcagtaggcatctttgacatgagcatataaatattttgttgactcagcaaaggtgacactttgtgactaaagtatcccattatatataatgttttttgaaatgttggaaattttggggaattatcaaatgtatagaagttgcatgaaggttatagagaggtgtaactgtttgttaactattacatggatttcatactaggcagtgacaactaacatgttacttcaactaaaagtgtataatgggttgtctttttatttatgaaaataaaagtaattttactta

SEQ ID NO: 429015 - DNA, 2119 bp, Homo sapiens
gaggtggagtctccctctgttgcccaggctggagtgcagtggcatgatctcggctcactgcaaccctccacctcctgaattaaagtgattctcctgcctcagcctcccgagtagctgggattacaggcacgcaccactacacccagataatttttgtatttttagtagagacgtgatttcaccatgttggccaggctggtctcgaactcctgacctcagctgatctgcccgccttggcctcccaaagtgctgggattacaggcgtgatccactgcacctggcctcaggtatgtttttctatctacacacaaaaagtttattttccttcctcttatttgatatcagaagaatgacaggaatcagtttttaacagagatagtttttccgtttctccattgtgttaatcagagcgcagacttacattctcagtcatttatcttttctggtggagaataaaaagtcacttatagttaaagatcagaaaattatcacaccaaatccattacatatgttagaatcaataatttactcaaaaatcagcttttataggtatgttggcaccttatccaagaacttatccctgttccagtacccctgtgcttcattcagtatcagtaaccctgcaatgatttttacaaatatctttttctagtgggttttttacttagaggaaagaactttgtaatagctcttaatgtttatatataagagaagacagaatggaaaatgttttttgaagtcaaatattgcatgatgtaaagaaaaaactttaaacttaaatgagtaggttgtcctgaattacactggtaactctctacttctttattaaagaagttatagtaagatgcctttgttacctgatttcagtgtacattgtttttatgtggttttctgataatgtcctgtcagaattgtattggtttaggccaaaggccatagcaaaaacatagagaacaaatatgatcttaaaaatagattgtaacattttaaacaattagtttagtaatttgggaaatagtggatgcataatactttaacagaagtcacacatctgtaggtttatcttttgattattctcctgaggcattagatagtttttctattataagtgacagattgactcacttaatataaataagtagcatacactaaaagcttactatgtgccagatactgtgctggacacttacatagataagccattgaatccacacagcagccctgtaagaaataagtaaaatctgcataaagtgttgaaataggaatatacatttcattatgaaaaatgaatagattatgcctatctgaatcaatattgcattcaaataagtgattacttaaatcatatatcatagtttacactccttaaaaaaaggtacataaattcagtgaggtttttttcttaacatacagaagtactaaatactgcttgcagtataatattgatattggaagctgcagtttccagaataagtggagtaataactaaacagacatttaattttatttcaatatctatggaaaaaacacttattaaatctccctgtattttatgttgtctttattacagaatcacttgtctgtttgttgtgtgccacttactgacaaaactttaaacagtacttgatgccagctctctactctgtggctgtgggacctgtttcttttaggtacttgtgcttattaatctacttactaaattttcacattgacatttttggggatgatactaccatatacgaaatggaaaatgtaatatgctcagtgcttctgtaaaatgcagcaatactggtattactttacatcagtaggcatctttgacatgagcatataaatattttgttgactcagcaaaggtgacactttgtgactaaagtatcccattatatataatgttttttgaaatgttggaaattttggggaattatcaaatgtatagaagttgcatgaaggttatagagaggtgtaactgtttgttaactattacatggatttcatactaggcagtgacaactaacatgttacttcaactaaaagtgtataatgggttgtctttttatttatgaaaataaaagtaattttacttaaaaaaaaaaaaacacacacaaacaaaacaacc

SEQ ID NO: 429016 - DNA, 2322 bp, Homo sapiens
gaggtggagtctccctctgttgcccaggctggagtgcagtggcatgatctcggctcactgcaaccctccacctcctgaattaaagtgattctcctgcctcagcctcccgagtagctgggattacaggcacgcaccactacacccagataatttttgtatttttagtagagacgtgatttcaccatgttggccaggctggtctcgaactcctgacctcagctgatctgcccgccttggcctcccaaagtgctgggattacaggcgtgatccactgcacctggcctcaggtatgtttttctatctacacacaaaaagtttattttccttcctcttatttgatatcagaagaatgacaggaatcagtttttaacagagatagtttttccgtttctccattgtgttaatcagagcgcagacttacattctcagtcatttatcttttctggtggagaataaaaagtcacttatagttaaagatcagaaaattatcacaccaaatccattacatatgttagaatcaataatttactcaaaaatcagcttttataggtatgttggcaccttatccaagaacttatccctgttccagtacccctgtgcttcattcagtatcagtaaccctgcaatgatttttacaaatatctttttctagtgggttttttacttagaggaaagaactttgtaatagctcttaatgtttatatataagagaagacagaatggaaaatgttttttgaagtcaaatattgcatgatgtaaagaaaaaactttaaacttaaatgagtaggttgtcctgaattacactggtaactctctacttctttattaaagaagttatagtaagatgcctttgttacctgatttcagtgtacattgtttttatgtggttttctgataatgtcctgtcagaattgtattggtttaggccaaaggccatagcaaaaacatagagaacaaatatgatcttaaaaatagattgtaacattttaaacaattagtttagtaatttgggaaatagtggatgcataatactttaacagaagtcacacatctgtaggtttatcttttgattattctcctgaggcattagatagtttttctattataagtgacagattgactcacttaatataaataagtagcatacactaaaagcttactatgtgccagatactgtgctggacacttacatagataagccattgaatccacacagcagccctgtaagaaataagtaaaatctgcataaagtgttgaaataggaatatacatttcattatgaaaaatgaatagattatgcctatctgaatcaatattgcattcaaataagtgattacttaaatcatatatcatagtttacactccttaaaaaaaggtacataaattcagtgaggtttttttcttaacatacagaagtactaaatactgcttgcagtataatattgatattggaagctgcagtttccagaataagtggagtaataactaaacagacatttaattttatttcaatatctatggaaaaaacacttattaaatctccctgtattttatgttgtctttattacagaatcacttgtctgtttgttgtgtgccacttactgacaaaactttaaacagtacttgatgccagctctctactctgtggctgtgggacctgtttcttttaggtacttgtgcttattaatctacttactaaattttcacattgacatttttggggatgatactaccatatacgaaatggaaaatgtaatatgctcagtgcttctgtaaaatgcagcaatactggtattactttacatcagtaggcatctttgacatgagcatataaatattttgttgactcagcaaaggtgacactttgtgactaaagtatcccattatatataatgttttttgaaatgttggaaattttggggaattatcaaatgtatagaagttgcatgaaggttatagagaggtgtaactgtttgttaactattacatggatttcatactaggcagtgacaactaacatgttacttcaactaaaagtgtataatgggttgtctttttatttatgaaaataaaagtaattttacttaacttacaatttcattgagatcttttgtttttcgacaaatatttttatacttactaagccagtagcagttaaaacagtgcaaaattattcttcacagtaatgttttaaaatgacagataaccaggcatggtggcttacgcctataatcctagcattttaggaggcttgggcaggaagattgcttgagcccaggagttgagaccagcctggacaacgtggtgaaaccctgtctctgt

SEQ ID NO: 429017 - DNA, 1836 bp, Homo sapiens
gaggtggagtctccctctgttgcccaggctggagtgcagtggcatgatctcggctcactgcaaccctccacctcctgaattaaagtgattctcctgcctcagcctcccgagtagctgggattacaggcacgcaccactacacccagataatttttgtatttttagtagagacgtgatttcaccatgttggccaggctggtctcgaactcctgacctcagctgatctgcccgccttggcctcccaaagtgctgggattacaggcgtgatccactgcacctggcctcaggtatgtttttctatctacacacaaaaagtttattttccttcctcttatttgatatcagaagaatgacaggaatcagtttttaacagagatagtttttccgtttctccattgtgttaatcagagcgcagacttacattctcagtcatttatcttttctggtggagaataaaaagtcacttatagttaaagatcagaaaattatcacaccaaatccattacatatgttagaatcaataatttactcaaaaatcagcttttataggtatgttggcaccttatccaagaacttatccctgttccagtacccctgtgcttcattcagtatcagtaaccctgcaatgatttttacaaatatctttttctagtgggttttttacttagaggaaagaactttgtaatagctcttaatgtttatatataagagaagacagaatggaaaatgttttttgaagtcaaatattgcatgatgtaaagaaaaaactttaaacttaaatgagtaggttgtcctgaattacactggtaactctctacttctttattaaagaagttatagtaagatgcctttgttacctgatttcagtgtacattgtttttatgtggttttctgataatgtcctgtcagaattgtattggtttaggccaaaggccatagcaaaaacatagagaacaaatatgatcttaaaaatagattgtaacattttaaacaattagtttagtaatttgggaaatagtggatgcataatactttaacagaagtcacacatctgtaggtttatcttttgattattctcctgaggcattagatagtttttctattataagtgacagattgactcacttaatataaataagtagcatacactaaaagcttactatgtgccagatactgtgctggacacttacatagataagccattgaatccacacagcagccctgtaagaaataagtaaaatctgcataaagtgttgaaataggaatatacatttcattatgaaaaatgaatagattatgcctatctgaatcaatattgcattcaaataagtgattacttaaatcatatatcatagtttacactccttaaaaaaaggtacataaattcagtgaggtttttttcttaacatacagaagtactaaatactgcttgcagtataatattgatattggaagctgcagtttccagaataagtggagtaataactaaacagacatttaattttatttcaatatctatggaaaaaacacttattaaatctccctgtattttatgttgtctttattacagaatcacttgtctgtttgttgtgtgccacttactgacaaaactttaaacagtacttgatgccagctctctactctgtggctgtgggacctgtttcttttaggtacttgtgcttattaatctacttactaaattttcacattgacatttttggggatgatactaccatatacgaaatggaaaatgtaatatgctcagtgcttctgtaaaatgcagcaatactggtattactttatatgctcatgtcaaagatgcctactgatgtaaag

SEQ ID NO: 429018 - DNA, 1858 bp, Homo sapiens
gaggtggagtctccctctgttgcccaggctggagtgcagtggcatgatctcggctcactgcaaccctccacctcctgaattaaagtgattctcctgcctcagcctcccgagtagctgggattacaggcacgcaccactacacccagataatttttgtatttttagtagagacgtgatttcaccatgttggccaggctggtctcgaactcctgacctcagctgatctgcccgccttggcctcccaaagtgctgggattacaggcgtgatccactgcacctggcctcaggtatgtttttctatctacacacaaaaagtttattttccttcctcttatttgatatcagaagaatgacaggaatcagtttttaacagagatagtttttccgtttctccattgtgttaatcagagcgcagacttacattctcagtcatttatcttttctggtggagaataaaaagtcacttatagttaaagatcagaaaattatcacaccaaatccattacatatgttagaatcaataatttactcaaaaatcagcttttataggtatgttggcaccttatccaagaacttatccctgttccagtacccctgtgcttcattcagtatcagtaaccctgcaatgatttttacaaatatctttttctagtgggttttttacttagaggaaagaactttgtaatagctcttaatgtttatatataagagaagacagaatggaaaatgttttttgaagtcaaatattgcatgatgtaaagaaaaaactttaaacttaaatgagtaggttgtcctgaattacactggtaactctctacttctttattaaagaagttatagtaagatgcctttgttacctgatttcagtgtacattgtttttatgtggttttctgataatgtcctgtcagaattgtattggtttaggccaaaggccatagcaaaaacatagagaacaaatatgatcttaaaaatagattgtaacattttaaacaattagtttagtaatttgggaaatagtggatgcataatactttaacagaagtcacacatctgtaggtttatcttttgattattctcctgaggcattagatagtttttctattataagtgacagattgactcacttaatataaataagtagcatacactaaaagcttactatgtgccagatactgtgctggacacttacatagataagccattgaatccacacagcagccctgtaagaaataagtaaaatctgcataaagtgttgaaataggaatatacatttcattatgaaaaatgaatagattatgcctatctgaatcaatattgcattcaaataagtgattacttaaatcatatatcatagtttacactccttaaaaaaaggtacataaattcagtgaggtttttttcttaacatacagaagtactaaatactgcttgcagtataatattgatattggaagctgcagtttccagaataagtggagtaataactaaacagacatttaattttatttcaatatctatggaaaaaacacttattaaatctccctgtattttatgttgtctttattacagaatcacttgtctgtttgttgtgtgccacttactgacaaaactttaaacagtacttgatgccagctctctactctgtatgggggatcgagatcccccatacagagtaggaggcgtccttgccctattactatccatcctcatcctagcaataatccccatcctccatatatccaaacaacaaagcataatatttcgccactaagccaatcactttattgactcctagccgcagacctcctcattctaacctgaatcggaggacaaccagtaagctacccttttaccatc

SEQ ID NO: 429019 - DNA, 1158 bp, Homo sapiens
ggaatagcgggttttgcagcaattgttgcatatggattatataaactgaagagcaggggaaatactaaaatgtccattcatctgatccacatgcgtgtggcagcccaaggctttgttgtaggagcaatgactgttggtatgggctattccatgtatcgggaattctgggcaaaacctaagccttagaagaagagatgctgtcttggtcttgttggaggagcttgctttagttagatgtcttattattaaagttacctattattgttggaaataaactaatttgtatgggtttagatggtaacatggcattttgaatattggcttcctttcttgcaggcttgatttgcttggtgaccgaattactagtgactagtttactaactaggtcattcaaggaagtcaagttaacttaaacatgtcacctaaatgcacttgatggtgttgaaatgtccaccttcttaaatttttaagatgaacttagttctaaagaagataacaggccaatcctgaaggtactccctgtttgctgcagaatgtcagatattttggatgttgcataagagtcctatttgccccagttaattcaacttttgtctgcctgttttgtggactggctggctctgttagaactctgtccaaaaagtgcatggaatataacttgtaaagcttcccacaattgacaatatatatgcatgtgtttaaaccaaatccagaaagcttaaacaatagagctgcataatagtatttattaaagaatcacaactgtaaacatgagaataacttaaggattctagtttagttttttgtaattgcaaattatatttttgctgctgatatattagaataatttttaaatgtcatcttgaaatagaaatatgtattttaagcactcacgcaaaggtaaatgaacacgttttaaatgtgtgtgttgctaattttttccataagaattgtaaacattgaactgaacaaattacctataatggatttggttaatgacttatgagcaagctggtttggccagacagtatacccaaacttttatataatatacagaaggctatcacacttgtgaaattctcttgtctaatctgaatttgcattccatggtgataacatggtatatgtattgttattaaagtaagtgacccatgtcaa

SEQ ID NO: 429020 - DNA, 1363 bp, Homo sapiens
  misc_feature (248)..(248): n is a, c, g, or t
  misc_feature (250)..(250): n is a, c, g, or t
gatagaatgattggtccggcgcgcgtcgcaagtaggtaggtgagtgtggatcgattagctggtctcctaggagatcctggctacatgaattagtgtgttggatagcacacacgagtgataacacagcccggcggatgaggaacatcacgaatcaatacagatggaagtctgtggtgcagtgactggtatctatcacgtaggagatcgacggcgagctgcgaagtatctaagttgacgtcactcggatnanatgaagagcaggggaaatactaaaatgtccattcatctgatccacatgcgtgtggcagcccaaggctttgttgtaggagcaatgactgttggtatgggctattccatgtatcgggaattctgggcaaaacctaagccttagaagaagagatgctgtcttggtcttgttggaggagcttgctttagttagatgtcttattattaaagttacctattattgttggaaataaactaatttgtatgggtttagatggtaacatggcattttgaatattggcttcctttcttgcaggcttgatttgcttggtgaccgaattactagtgactagtttactaactaggtcattcaaggaagtcaagttaacttaaacatgtcacctaaatgcacttgatggtgttgaaatgtccaccttcttaaatttttaagatgaacttagttctaaagaagataacaggccaatcctgaaggtactccctgtttgctgcagaatgtcagatattttggatgttgcataagagtcctatttgccccagttaattcaacttttgtctgcctgttttgtggactggctggctctgttagaactctgtccaaaaagtgcatggaatataacttgtaaagcttcccacaattgacaatatatatgcatgtgtttaaaccaaatccagaaagcttaaacaatagagctgcataatagtatttattaaagaatcacaactgtaaacatgagaataacttaaggattctagtttagttttttgtaattgcaaattatatttttgctgctgatatattagaataatttttaaatgtcatcttgaaatagaaatatgtattttaagcactcacgcaaaggtaaatgaacacgttttaaatgtgtgtgttgctaattttttccataagaattgtaaacattgaactgaacaaattacctataatggatttggttaatgacttatgagcaagctggtttggccagacagtatacccaaacttttatataatatacagaaggctatcacacttgtgaaattctcttgtctaatctgaatttgcattccatggtgataacatggtatatgtattgttattaaagtaagtgacccatgtcaa

SEQ ID NO: 429021 - DNA, 1367 bp, Homo sapiens
agcttgctagtagctcatacgtttggtgcgcgtagacccgagtattgttcaagtgaacaattggtcattgtagcatcgttgtaccatcaggtagtatccccgtgtccttactattagcttaggattctcggacctaataacatacaatctgcccggagcgcaaccgaagcagttcttgagatcacacctccagatagtgagttcttgatggtcatctactggtatctatctagcatggatgtccaagtcgagcaccatatcaaattcatcgccctcgtccccatgtacatctgatccacatgcgtgtggcagcccaaggctttgttgtaggagcaatgactgttggtatgggctattccatgtatcgggaattctgggcaaaacctaagccttagaagaagagatgctgtcttggtcttgttggaggagcttgctttagttagatgtcttattattaaagttacctattattgttggaaataaactaatttgtatgggtttagatggtaacatggcattttgaatattggcttcctttcttgcaggcttgatttgcttggtgaccgaattactagtgactagtttactaactaggtcattcaaggaagtcaagttaacttaaacatgtcacctaaatgcacttgatggtgttgaaatgtccaccttcttaaatttttaagatgaacttagttctaaagaagataacaggccaatcctgaaggtactccctgtttgctgcagaatgtcagatattttggatgttgcataagagtcctatttgccccagttaattcaacttttgtctgcctgttttgtggactggctggctctgttagaactctgtccaaaaagtgcatggaatataacttgtaaagcttcccacaattgacaatatatatgcatgtgtttaaaccaaatccagaaagcttaaacaatagagctgcataatagtatttattaaagaatcacaactgtaaacatgagaataacttaaggattctagtttagttttttgtaattgcaaattatatttttgctgctgatatattagaataatttttaaatgtcatcttgaaatagaaatatgtattttaagcactcacgcaaaggtaaatgaacacgttttaaatgtgtgtgttgctaattttttccataagaattgtaaacattgaactgaacaaattacctataatggatttggttaatgacttatgagcaagctggtttggccagacagtatacccaaacttttatataatatacagaaggctatcacacttgtgaaattctcttgtctaatctgaatttgcattccatggtgataacatggtatatgtattgttattaaagtaagtgacccatgtcaa

SEQ ID NO: 429022 - DNA, 1104 bp, Homo sapiens
ggaatagcgggttttgcagcaattgttgcatatggattatataaactgaagagcaggggaaatactaaaatgtccattcatctgatccacatgcgtgtggcagcccaaggctttgttgtaggagcaatgactgttggtatgggctattccatgtatcgggaattctgggcaaaacctaagccttagaagaagagatgctgtcttggtcttgttggaggagcttgctttagttagatgtcttattattaaagttacctattattgttggaaataaactaatttgtatgggtttagatggtaacatggcattttgaatattggcttcctttcttgcaggcttgatttgcttggtgaccgaattactagtgactagtttactaactaggtcattcaaggaagtcaagttaacttaaacatgtcacctaaatgcacttgatggtgttgaaatgtccaccttcttaaatttttaagatgaacttagttctaaagaagataacaggccaatcctgaaggtactccctgtttgctgcagaatgtcagatattttggatgttgcataagagtcctatttgccccagttaattcaacttttgtctgcctgttttgtggactggctggctctgttagaactctgtccaatgtgtttaaaccaaatccagaaagcttaaacaatagagctgcataatagtatttattaaagaatcacaactgtaaacatgagaataacttaaggattctagtttagttttttgtaattgcaaattatatttttgctgctgatatattagaataatttttaaatgtcatcttgaaatagaaatatgtattttaagcactcacgcaaaggtaaatgaacacgttttaaatgtgtgtgttgctaattttttccataagaattgtaaacattgaactgaacaaattacctataatggatttggttaatgacttatgagcaagctggtttggccagacagtatacccaaacttttatataatatacagaaggctatcacacttgtgaaattctcttgtctaatctgaatttgcattccatggtgataacatggtatatgtattgttattaaagtaagtgacccatgtcaa

SEQ ID NO: 429023 - DNA, 291 bp, Homo sapiens
  misc_feature (252)..(252): n is a, c, g, or t
ggaatagcgggttttgcagcaattgttgcatatggattatataaactgaagagcaggggaaatactaaaatgtccattcatctgatccacatgcgtgtggcagcccaaggctttgttgtaggagcaatgactgttggtatgggctattccatgtatcgggaattctgggcaaaacccgctattccaacgggtacgaatggtgcctctttagcttttcgaatgagttttgatccctgatcttcctcatgaggngaagggaacacctgtgcctgttgacaaggtgcctggggg

SEQ ID NO: 429024 - DNA, 1378 bp, Homo sapiens
ggtagggcatcgcgaagccggtcgcggtgctcagaggttaactcgactctaggcgatattcgtcacccaatcacatatgtcatacactgactccagtgtgtgtcccttcctccaatatgagagaacatcagggatccacgactcgattccgaaaagctccagagtgcacctatctcgattagcccgtttaggagatatgctgagtgctaatcgcgaagctacactaagtcgacactactgagtattaatattaaccgtcgccagagcgaagagcaggggaaatactaaaatgtccattcatctgatccacatgcgtgtggcagcccaaggctttgttgtaggagcaatgactgttggtatgggctattccatgtatcgggaattctgggcaaaacctaagccttagaagaagagatgctgtcttggtcttgttggaggagcttgctttagttagatgtcttattattaaagttacctattattgttggaaataaactaatttgtatgggtttagatggtaacatggcattttgaatattggcttcctttcttgcaggcttgatttgcttggtgaccgaattactagtgactagtttactaactaggtcattcaaggaagtcaagttaacttaaacatgtcacctaaatgcacttgatggtgttgaaatgtccaccttcttaaatttttaagatgaacttagttctaaagaagataacaggccaatcctgaaggtactccctgtttgctgcagaatgtcagatattttggatgttgcataagagtcctatttgccccagttaattcaacttttgtctgcctgttttgtggactggctggctctgttagaactctgtccaaaaagtgcatggaatataacttgtaaagcttcccacaattgacaatatatatgcatgtgtttaaaccaaatccagaaagcttaaacaatagagctgcataatagtatttattaaagaatcacaactgtaaacatgagaataacttaaggattctagtttagttttttgtaattgcaaattatatttttgctgctgatatattagaataatttttaaatgtcatcttgaaatagaaatatgtattttaagcactcacgcaaaggtaaatgaacacgttttaaatgtgtgtgttgctaattttttccataagaattgtaaacattgaactgaacaaattacctataatggatttggttaatgacttatgagcaagctggtttggccagacagtatacccaaacttttatataatatacagaaggctatcacacttgtgaaattctcttgtctaatctgaatttgcattccatggtgataacatggtatatgtattgttattaaagtaagtgacccatgtcaa

SEQ ID NO: 429025 - DNA, 1056 bp, Homo sapiens
ccccggcccacaagcccctgcagggagcgggcccgggcggcgcgcgatcgaggtcgggtcgccgtccagcctgcagcatgagcgcccccagcgcgacccccatcttcgcgcccggcgagaactgcagccccgcgtggggggcggcgcccgcggcctacgacgcagcggacacgcacctgcgcatcctgggcaagccggtgatggagcgctgggagaccccctatatgcacgcgctggccgccgccgcctcctccaaagggggccgggtcctggaggtgggctttggcatggccatcgcagcgtcaaaggtgcaggaggcgcccattgatgagcattggatcatcgagtgcaatgacggcgtcttccagcggctccgggactgggccccacggcagacacacaaggtcatccccttgaaaggcctgtgggaggatgtggcacccaccctgcctgacggtcactttgatgggatcctgtacgacacgtacccactctcggaggagacctggcacacacaccagttcaacttcatcaagaaccacgcctttcgcctgctgaagccggggggcgtcctcacctactgcaacctcacctcctggggggagctgatgaagtccaagtactcagacatcaccatcatgtttgaggagacgcaggtgcccgcgctgctggaggccggcttccggagggagaacatccgtacggaggtgatggcgctggtcccaccggccgactgccgctactacgccttcccacagatgatcacgcccctggtgaccaaaggctgagcccccaccccggcccggccacacccatgccctcctccgtgccttcctggccgggagtccagggtgtcgcaccagccctgggctgatcccagctgtgtgtcaccagaagctttcccggcttctctgtgaggggtcccaccagcccagggctgatcccagctgtgtgtcaccagcagctttcccagcttctctgtgagggtcactgctgcccactgcagggtccctgaggtgaagtaaacgccggcgctgggcttggccagtcggcagt

SEQ ID NO: 429026 - DNA, 1181 bp, Homo sapiens
  misc_feature (3)..(3): n is a, c, g, or t
  misc_feature (64)..(67): n is a, c, g, or t
  misc_feature (70)..(72): n is a, c, g, or t
  misc_feature (79)..(79): n is a, c, g, or t
  misc_feature (82)..(82): n is a, c, g, or t
  misc_feature (85)..(85): n is a, c, g, or t
  misc_feature (110)..(113): n is a, c, g, or t
  misc_feature (126)..(128): n is a, c, g, or t
  misc_feature (132)..(133): n is a, c, g, or t
  misc_feature (136)..(136): n is a, c, g, or t
  misc_feature (138)..(139): n is a, c, g, or t
  misc_feature (141)..(141): n is a, c, g, or t
  misc_feature (146)..(146): n is a, c, g, or t
  misc_feature (149)..(149): n is a, c, g, or t
  misc_feature (155)..(155): n is a, c, g, or t
  misc_feature (160)..(160): n is a, c, g, or t
  misc_feature (164)..(165): n is a, c, g, or t
acncaaaaaaaaaaaaaaaaaaaaaaaaaaaaaaaaaaaaaaaaaaaaaaaaaaaaaaaaagcnnnnaannntttgctnttnggncaaaaaaaaaaaaaaaaaaaaaaannnnaaaaaaaaaaaannntgtnncanannanaaatnacnagaatngcacngacnnagcgcgatcgaggtcgggtcgccgtccagcctgcagcatgagcgcccccagcgcgacccccatcttcgcgcccggcgagaactgcagccccgcgtggggggcggcgcccgcggcctacgacgcagcggacacgcacctgcgcatcctgggcaagccggtgatggagcgctgggagaccccctatatgcacgcgctggccgccgccgcctcctccaaagggggccgggtcctggaggtgggctttggcatggccatcgcagcgtcaaaggtgcaggaggcgcccattgatgagcattggatcatcgagtgcaatgacggcgtcttccagcggctccgggactgggccccacggcagacacacaaggtcatccccttgaaaggcctgtgggaggatgtggcacccaccctgcctgacggtcactttgatgggatcctgtacgacacgtacccactctcggaggagacctggcacacacaccagttcaacttcatcaagaaccacgcctttcgcctgctgaagccggggggcgtcctcacctactgcaacctcacctcctggggggagctgatgaagtccaagtactcagacatcaccatcatgtttgaggagacgcaggtgcccgcgctgctggaggccggcttccggagggagaacatccgtacggaggtgatggcgctggtcccaccggccgactgccgctactacgccttcccacagatgatcacgcccctggtgaccaaaggctgagcccccaccccggcccggccacacccatgccctcctccgtgccttcctggccgggagtccagggtgtcgcaccagccctgggctgatcccagctgtgtgtcaccagaagctttcccggcttctctgtgaggggtcccaccagcccagggctgatcccagctgtgtgtcaccagcagctttcccagcttctctgtgagggtcactgctgcccactgcagggtccctgaggtgaagtaaacgccggcgctgggcttggccagtcggcagt

SEQ ID NO: 429027 - DNA, 1201 bp, Homo sapiens
ccccggcccacaagcccctgcagggagcgggcccgggcggcgcgcgatcgaggtcgggtcgccgtccagcctgcagcatgagcgcccccagcgcgacccccatcttcgcgcccggcgagaactgcagccccgcgtggggggcggcgcccgcggcctacgacgcagcggacacgcacctgcgcatcctgggcaagccggtgatggagcgctgggagaccccctatatgcacgcgctggccgccgccgcctcctccaaagggggccgggtcctggaggtgggctttggcatggccatcgcagcgtcaaaggtgcaggaggcgcccattgatgagcattggatcatcgagtgcaatgacggcgtcttccagcggctccgggactgggccccacggcagacacacaaggtcatccccttgaaaggcctgtgggaggatgtggcacccaccctgcctgacggtcactttgatgggatcctgtacgacacgtacccactctcggaggagacctggcacacacaccagttcaacttcatcaagaaccacgcctttcgcctgctgaagccggggggcgtcctcacctactgcaacctcacctcctggggggagctgatgaagtccaagtactcagacatcaccatcatgtttgaggagacgcaggtgcccgcgctgctggaggccggcttccggagggagaacatccgtacggaggtgatggcgctggtcccaccggccgactgccgctactacgccttcccacagatgatcacgcccctggtgaccaaaggctgagcccccaccccggcccggccacacccatgccctcctccgtgccttcctggccgggagtccagggtgtcgcaccagccctgggctgatcccagctgtgtgtcaccagaagctttcccggcttctctgtgaggggtcccaccagcccagggctgatcccagctgtgtgtcaccagcagctttcccagcttctctgtgagggtcactgctgcccactgcagggtccctgaggtgaagtaaacgccggcgctgggcttggccagtcggcagtaaaaaaaaaaaaagaaaacaacgacaaaccaaccaaaagaagcacaaaaaaccacggaggggacatctaaaagggggggggcgacaacaaaggcggcgtactaagaaagggggaagcggtggccaaaacaggggtcgcggccgaa

SEQ ID NO: 429028 - DNA, 933 bp, Homo sapiens
  misc_feature (902)..(902): n is a, c, g, or t
  misc_feature (933)..(933): n is a, c, g, or t
ccccggcccacaagcccctgcagggagcgggcccgggcggcgcgcgatcgaggtcgggtcgccgtccagcctgcagcatgagcgcccccagcgcgacccccatcttcgcgcccggcgagaactgcagccccgcgtggggggcggcgcccgcggcctacgacgcagcggacacgcacctgcgcatcctgggcaagccggtgatggagcgctgggagaccccctatatgcacgcgctggccgccgccgcctcctccaaagggggccgggtcctggaggtgggctttggcatggccatcgcagcgtcaaaggtgcaggaggcgcccattgatgagcattggatcatcgagtgcaatgacggcgtcttccagcggctccgggactgggccccacggcagacacacaaggtcatccccttgaaaggcctgtgggaggatgtggcacccaccctgcctgacggtcactttgatgggatcctgtacgacacgtacccactctcggaggagacctggcacacacaccagttcaacttcatcaagaaccacgcctttcgcctgctgaagccggggggcgtcctcacctactgcaacctcacctcctggggggagctgatgaagtccaagtactcagacatcaccatcatgtttgaggagacgcaggtgcccgcgctgctggaggccggcttccggagggagaacatccgtacggaggtgatggcgctggtcccaccggccgactgccgctactacgccttcccacagatgatcacgcccctggtgaccaaaggctgagcccccaccccggcccggccacacccatgccctcctccgtgccttcctggccgggagtccagggtgtcgcaccagccctgtgggcctgaattttccaagcttgttgttgttaanaagaaagcttttttcccgggctttctttttn

SEQ ID NO: 429029 - DNA, 1397 bp, Homo sapiens
  misc_feature (3)..(3): n is a, c, g, or t
  misc_feature (64)..(67): n is a, c, g, or t
  misc_feature (70)..(72): n is a, c, g, or t
  misc_feature (79)..(79): n is a, c, g, or t
  misc_feature (82)..(82): n is a, c, g, or t
  misc_feature (85)..(85): n is a, c, g, or t
  misc_feature (110)..(113): n is a, c, g, or t
  misc_feature (126)..(128): n is a, c, g, or t
  misc_feature (132)..(133): n is a, c, g, or t
  misc_feature (136)..(136): n is a, c, g, or t
  misc_feature (138)..(139): n is a, c, g, or t
  misc_feature (141)..(141): n is a, c, g, or t
  misc_feature (146)..(146): n is a, c, g, or t
  misc_feature (149)..(149): n is a, c, g, or t
  misc_feature (155)..(155): n is a, c, g, or t
  misc_feature (160)..(160): n is a, c, g, or t
  misc_feature (164)..(165): n is a, c, g, or t
acncaaaaaaaaaaaaaaaaaaaaaaaaaaaaaaaaaaaaaaaaaaaaaaaaaaaaaaaaagcnnnnaannntttgctnttnggncaaaaaaaaaaaaaaaaaaaaaaannnnaaaaaaaaaaaannntgtnncanannanaaatnacnagaatngcacngacnnagcgcgatcgaggtcgggtcgccgtccagcctgcagcatgagcgcccccagcgcgacccccatcttcgcgcccggcgagaactgcagccccgcgtggggggcggcgcccgcggcctacgacgcagcggacacgcacctgcgcatcctgggcaagccggtgatggagcgctgggagaccccctatatgcacgcgctggccgccgccgcctcctccaaagggggccgggtcctggaggtgggctttggcatggccatcgcagcgtcaaaggtgcaggaggcgcccattgatgagcattggatcatcgagtgcaatgacggcgtcttccagcggctccgggactgggccccacggcagacacacaaggtcatccccttgaaaggcctgtgggaggatgtggcacccaccctgcctgacggtcactttgatgggatcctgtacgacacgtacccactctcggaggagacctggcacacacaccagttcaacttcatcaagaaccacgcctttcgcctgctgaagccggggggcgtcctcacctactgcaacctcacctcctggggggagctgatgaagtccaagtactcagacatcaccatcatgtttgaggtgcgcccacctgaagttccccatgggtctccaggaagtgaccttggatgggggtgggaaggggctgctggagccaccttgctacctggggagggtcccttcctgaccccctgggtgggctggactgtgctggttcatttagaaatcaaagtcctttgcctggcgcagtggctgccaggagcagtggctcaggtctataatcccagcactgtggaaggccgaggtgggcagattgcttgagcctaggagttcaagaccagcctgggctacagagcaagacctcatctttcctaaaaaaaaaaaatacaaaaaactagctgggcgtggtggcgtgtgcctgtactcccagctacttgggaggctgaggtaggaggattgcttgggccccaggggcagaggttgcagtgagcccagatcgaaccactgcactccagcctgggtaacagagccagaccctgtctcaagaaccacgaacagaacgaaagaacagaaagaacgaaaatttaaacaacaaaacatggaaatcaggctgggcgtggtggctcacacctgtgatcccggcacttcggaaggccaaggcgggtggatcacttgagcccaggagtttgagcctagcctggccaac

SEQ ID NO: 429030 - DNA, 604 bp, Homo sapiens
  misc_feature (3)..(3): n is a, c, g, or t
  misc_feature (64)..(67): n is a, c, g, or t
  misc_feature (70)..(72): n is a, c, g, or t
  misc_feature (79)..(79): n is a, c, g, or t
  misc_feature (82)..(82): n is a, c, g, or t
  misc_feature (85)..(85): n is a, c, g, or t
  misc_feature (110)..(113): n is a, c, g, or t
  misc_feature (126)..(128): n is a, c, g, or t
  misc_feature (132)..(133): n is a, c, g, or t
  misc_feature (136)..(136): n is a, c, g, or t
  misc_feature (138)..(139): n is a, c, g, or t
  misc_feature (141)..(141): n is a, c, g, or t
  misc_feature (146)..(146): n is a, c, g, or t
  misc_feature (149)..(149): n is a, c, g, or t
  misc_feature (155)..(155): n is a, c, g, or t
  misc_feature (160)..(160): n is a, c, g, or t
  misc_feature (164)..(165): n is a, c, g, or t
acncaaaaaaaaaaaaaaaaaaaaaaaaaaaaaaaaaaaaaaaaaaaaaaaaaaaaaaaaagcnnnnaannntttgctnttnggncaaaaaaaaaaaaaaaaaaaaaaannnnaaaaaaaaaaaannntgtnncanannanaaatnacnagaatngcacngacnnagcgcgatcgaggtcgggtcgccgtccagcctgcagcatgagcgcccccagcgcgacccccatcttcgcgcccggcgagaactgcagccccgcgtggggggcggcgcccgcggcctacgacgcagcggacacgcacctgcgcatcctgggcaagccggtgatggagcgctgggagaccccctatatgcacgcgctggccgccgccgcctcctccaaagggggccgggtcctggaggtgggctttggcatggccatcgcagcgtcaaaggtgcaggaggcgcccattgatgagcattggatcatcgagtgcaatgacggcgtcttccagcggctccgggactgggccccacggcagacacagtcatcccttaaaggcctgtggaggatgtgcaccacctgctgacgtactgatgatctgtcacctacccccgagagactg

SEQ ID NO: 429031 - DNA, 2945 bp, Homo sapiens
tgagacatattctgctgaacagtttctacttcctctcccgcctgtcctgtcatgggagacgtgtatagttgctgctgtttcagcaaaccaccataagacgaaaatgcctcaggttgggttgccagtcctttacaactcagcttgaatttcacaacagtgattgtgagaatctgcgtggtatacactgaaatatcggtgtgctgtgatgcaaagcttacctttgacgatattgaatgtgatatagctgtagagaagtacttccttgccttatgtgaggatttcaaacttatttaaattatgtagacaaatcaaagtggcattgcttaatttttagcaggcataataagcaagttaacagtaaaatgcaaaacatgataagcgttgctcaatttttagcaggtataataagcaggttaacagtaaaaatgcaaaacatgatagataagtcactttgaaaattcaaaccaaagttccttcaccttatggaaataggaaattatggacttcaaaattggacacttcctgtttacaaaaagaaattcagagctaaaatcatggtaaaaaaaaatagaaacacttgagaactatggtctttatgggtgcaatttgaaatccttttcatcatcttaccagactaaactaagagcacataccaaacctatcttatggttgaaagttggggtttattttttatatgagaatattatcactattacataacatactcaggacaaagaactttgctcagggaacataccatgtaatatttttgttgtttctttacagactagtctacagtcctgcttactcaaaacaaaccaaataacttatacctttatataagtattatgtactgatgatagtaactacctctgagtttgacacagatcaaaatttttgaatatcagatatcagttatcctatttttatttcatgtgaaaactcctctaaagcagattccctcaactctgtgcatatgtgaatatcactgatgtgaacacattgttcatttacataggtaaaatattactctgtttacagcaaaaggctacctcatagttgatacatagcacacctgtatgtatgctgttccagccttacaggtggctgataattctctggtacagaacctttttatctgtattataaatagcaattcacaactgcatgtttctgacaaacacttgtgaataatgaagcatctcgttttagttagcaaagtctccaaacatttccttaaaataatcatgtatttagtttaaagaattatgggcactgttcaacttaagcaaaacagaacacggaagcagtcttagaagcaccactttgcccagaggtggaggttggaaggggtagcagggagaggggttggtgtatgcaggtattcatgctaggcaaagagtttaaaagacgccaatgtccttcatttactgtctgtgctgccctgaagccaagcgtattgcagcattatagccccaggcacataactaactagcactggcttgccaaggaatgaacatgcaatgccattactagctattgagggaaaagggtctgtgtgaagcatcactttgcagggattactaatggtggggcagcaggtctgtgaattaagttatctcttgacctcaccctcatgtcaacacaaatgtaattcctaaacaagatgcattgccagtctcttagccctgtaagctgatcttttgctacatggcagactataatgaaaacatttttatacttgggtttctagtcttcactagaaggccttggatgtatttttgcagttgaaagatttagaaagatttttacctgcttataacttggaagtttagagtgcaatgtaagaaaaaagatcaagaaatgtcatgttattagcatcagtccacctccaatattgccgatactttttttattctggctcagttttattttgcaccagtgcggccccaagttactgctggttgtatttagtttgtgaataggagcccataagtgttaatagactttgtaacattcactataagatgaattatacaggacatgggaaatctcattaagtcttaaagttaatttaaattaatttatctgttttctctaagaaatgtttatcataaaatatatatgtgtatttcccctttggttataaaatttgggaaagtatgtacaagtgcagctgcactgactttaattttctagatgtcttaatgagatttatttgttttagagaagaacatcttgttaaaagcatcaaactctgtcttacatagctgtcaacagcctctttaagatgtggtggttgtatgatctgtgtcttaattgttcagttagagtgagaagttgacctatgattcatttttaaattttatatttggaacaaagctgcaagttatggtaaagtactgtactgtgagaagtattatgatatttaatgcatctgtggcttaacacttgtgagagttaccagcttgaaaatgatggtgttgactacctcttgaatcacatctatcaaccactggcacctaccaccaagctggcttcaattagtatgtgttgctttttggtattaacaactaaccgtactagagaccaaagtgaaccctgatttttatatgtctttaataatggtgttttatctagtgtttttaaattatcctgtgtagtatttagattacctcattgtccattttgactcatgttgtttacaagtgaaaataaaaacacttgaactgtatgtttttaaaagacaaaaaaggggtagatgtttggaatgcgtttcactcgcatgcagtcatctggagggactgaagcactgtttgcctttctgtacactctgggttttatattctcatttcatgcctaatgtcttattctgtcaattatggatatgttgaggtttaaaaaaattacttgattaaaaataaaacatataacgttggcattta

SEQ ID NO: 429032 - DNA, 3309 bp, Homo sapiens
tgagacatattctgctgaacagtttctacttcctctcccgcctgtcctgtcatgggagacgtgtatagttgctgctgtttcagcaaaccaccataagacgaaaatgcctcaggttgggttgccagtcctttacaactcagcttgaatttcacaacagtgattgtgagaatctgcgtggtatacactgaaatatcggtgtgctgtgatgcaaagcttacctttgacgatattgaatgtgatatagctgtagagaagtacttccttgccttatgtgaggatttcaaacttatttaaattatgtagacaaatcaaagtggcattgcttaatttttagcaggcataataagcaagttaacagtaaaatgcaaaacatgataagcgttgctcaatttttagcaggtataataagcaggttaacagtaaaaatgcaaaacatgatagataagtcactttgaaaattcaaaccaaagttccttcaccttatggaaataggaaattatggacttcaaaattggacacttcctgtttacaaaaagaaattcagagctaaaatcatggtaaaaaaaaatagaaacacttgagaactatggtctttatgggtgcaatttgaaatccttttcatcatcttaccagactaaactaagagcacataccaaacctatcttatggttgaaagttggggtttattttttatatgagaatattatcactattacataacatactcaggacaaagaactttgctcagggaacataccatgtaatatttttgttgtttctttacagactagtctacagtcctgcttactcaaaacaaaccaaataacttatacctttatataagtattatgtactgatgatagtaactacctctgagtttgacacagatcaaaatttttgaatatcagatatcagttatcctatttttatttcatgtgaaaactcctctaaagcagattccctcaactctgtgcatatgtgaatatcactgatgtgaacacattgttcatttacataggtaaaatattactctgtttacagcaaaaggctacctcatagttgatacatagcacacctgtatgtatgctgttccagccttacaggtggctgataattctctggtacagaacctttttatctgtattataaatagcaattcacaactgcatgtttctgacaaacacttgtgaataatgaagcatctcgttttagttagcaaagtctccaaacatttccttaaaataatcatgtatttagtttaaagaattatgggcactgttcaacttaagcaaaacagaacacggaagcagtcttagaagcaccactttgcccagaggtggaggttggaaggggtagcagggagaggggttggtgtatgcaggtattcatgctaggcaaagagtttaaaagacgccaatgtccttcatttactgtctgtgctgccctgaagccaagcgtattgcagcattatagccccaggcacataactaactagcactggcttgccaaggaatgaacatgcaatgccattactagctattgagggaaaagggtctgtgtgaagcatcactttgcagggattactaatggtggggcagcaggtctgtgaattaagttatctcttgacctcaccctcatgtcaacacaaatgtaattcctaaacaagatgcattgccagtctcttagccctgtaagctgatcttttgctacatggcagactataatgaaaacatttttatacttgggtttctagtcttcactagaaggccttggatgtatttttgcagttgaaagatttagaaagatttttacctgcttataacttggaagtttagagtgcaatgtaagaaaaaagatcaagaaatgtcatgttattagcatcagtccacctccaatattgccgatactttttttattctggctcagttttattttgcaccagtgcggccccaagttactgctggttgtatttagtttgtgaataggagcccataagtgttaatagactttgtaacattcactataagatgaattatacaggacatgggaaatctcattaagtcttaaagttaatttaaattaatttatctgttttctctaagaaatgtttatcataaaatatatatgtgtatttcccctttggttataaaatttgggaaagtatgtacaagtgcagctgcactgactttaattttctagatgtcttaatgagatttatttgttttagagaagaacatcttgttaaaagcatcaaactctgtcttacatagctgtcaacagcctctttaagatgtggtggttgtatgatctgtgtcttaattgttcagttagagtgagaagttgacctatgattcatttttaaattttatatttggaacaaagctgcaagttatggtaaagtactgtactgtgagaagtattatgatatttaatgcatctgtggcttaacacttgtgagagttaccagcttgaaaatgatggtgttgactacctcttgaatcacatctatcaaccactggcacctaccaccaagctggcttcaattagtatgtgttgctttttggtattaacaactaaccgtactagagaccaaagtgaaccctgatttttatatgtctttaataatggtgttttatctagtgtttttaaattatcctgtgtagtatttagattacctcattgtccattttgactcatgttgtttacaagtgaaaataaaaacacttgaactgtatgtttttaaaagacaaaaaaggggtagatgtttggaatgcgtttcactcgcatgcagtcatctggagggactgaagcactgtttgcctttctgtacactctgggttttatattctcatttcatgcctaatgtcttattctgtcaattatggatatgttgaggtttaaaaaaattacttgattaaaaataaaacatataacgttggcatttaaaaaaaaaaaaaaaaaaaaaaaaaaaaaaaaaaggggggaggctaaaagattaccacctcgggggggcaacaaagtttatgggtgtacaaccgagattgttatgtaaaaaaaggggggcccaaataagagggagagtaataaatagagcaagagacggggcgcgagtaataaaaaacgcatcttgggaggtaggaaacaaatgcgatagcatgggggatattatggtgaacgaagacataacattgtgggggagaacacaatggggcaaaataccaaacagattaagggcagagaaatcaaactttaggggtagtggtgaaacaaggaattgtagcggtgaaatctgtcgcggatttgaatttg

SEQ ID NO: 429033 - DNA, 1113 bp, Homo sapiens
tcgggcgaaccaaacttacggctaggtacgaggctgggtgttgggtcggtacttcaggcgcccaggccggcggggcgcgctccggcggctcctgtcagcggcgggtgcggcggatcccagggcagccttcgggcggcggcgctgcctggtgcgtcgcggcgtggtcctccggcggctgtccggggcggtaggagttggctgcgggatgtgctcagccggggagctgctgcggggcggcgacggcggggaacgcgacgaggacggggacgcgctggcggagcgggaggcggcagggaccgagtgggatcccggggcgagcccgcggcggcgcggacagcggccgaaggagagcgagcaggatgttgaagactcacagaaccacactggtgagccggttggagatgactacaagaaaatgggaacactttttggtgaactgaacaaaaaccttatcaacatgggcttcacaaggatgtattttggagaacgaatagtggaaccagtaatagtcattttcttttgggttatgctgtggttccttggcctgcaagcccttggactagttgctgttctttgccttgttattatttatgtgcaacagtaaaacatggccgaattgaaaaaaaaacaaaaaaaaaaaacccaggggcctcaaatgccggggtccggaaaaaacgggttatgaattgcgccattggccaaaaccgtgttctctgacccaagttttcttgtcccaacggggaaaactgccggggctcacttaggggagcggataaattcgataaccccggttacctgtaattcacgaacaaggaccacgcagaaataaatcgacgactaaaaagaggacgaaaacggggacacaaacaagaaaaattttgagaagcacatttaatgcagggaaaataaacgtgtgttagtaaaaaaaaaaagaacaccgataacaaagagcagagagagtataagcacgaccaagaaaagaaagcaaacattattagcaagaaagagacgtctcgagaagagcaagcaagcgagcaacaagacacatagtacagaggcacagagccgtcaaaatagaaaataatcagcaacgaagaacacaggtactacagt

SEQ ID NO: 429034 - DNA, 2579 bp, Homo sapiens
agcgggtgcggctccgccccgacggccgggggttgggcgagccagtgacaggaggggccgggctggtacttcaggcgcccaggccggcggggcgcgctccggcggctcctgtcagcggcgggtgcggcggatcccagggcagccttcgggcggcggcgctgcctggtgcgtcgcggcgtggtcctccggcggctgtccggggcggtaggagttggctgcgggatgtgctcagccggggagctgctgcggggcggcgacggcggggaacgcgacgaggacggggacgcgctggcggagcgggaggcggcagggaccgagtgggatcccggggcgagcccgcggcggcgcggacagcggccgaaggagagcgagcaggatgttgaagactcacagaaccacactggtgagccggttggagatgactacaagaaaatgggaacactttttggtgaactgaacaaaaaccttatcaacatgggcttcacaaggatgtattttggagaacgaatagtggaaccagtaatagtcattttcttttgggttatgctgtggttccttggcctgcaagcccttggactagttgctgttctttgccttgttattatttatgtgcaacagtaaaacatggccgaattgaattgtttgacatttggtagccatatatgtaattgaagaagttatatatttcactttttgacaaccgaaaaagtttgccttgtttcaaatcatgtgctggctgttttggtaagtaaatttatacatggatgtcacttaaaactaaactcttgatcataacagggttgaatatatattttgaatatacattagcttattcaaaactcttgtttcactactgtgatctctggtctcctttatacacctctatccccatgccaaatcttaagtaacaccaccagaaagtgaacagggaaaataacaggacatggaattcaaatcaagcaatatagttcttataaagagttccaataaaacatttcagaagaaaaagtatgaaacaagctaaaagtaagtttcacttagaaaacttctccccactcacactccccaccaaataatctcatattatttgggaaatatttggatttcaattgtccctacccagcctaaactaaggtaaatgataattagcatacactaccttaatattgtgatgaaaatcagtaaagatagaacgttttctaaaggtcaaaaataatatatttattattactggggaaagctcccaggttaaatataacttttttaaaatgtaacatttggacctagacctactttaatatatcatttgaagtttcagacaattttggtgctaattactttttgtgagtttttaaagtctcatagcctagttgactgcaccctatggtaatgccatattttcttgtatctaacaagttgcatattttttcctagagagacattttcagtgtatttttttttagaaatttataattttatagttctttcataacacttattctgagttttgaaacaatgtatttcctatcttgacatggattttttcacaaaaaatttgtattttactgttgttttcaggaaaaaaatcagatcatttttctttgatatctatatcagaaaggtacaatattaacagtataaaaccaaatgcttaaatttggaacttagccaattttgataatctttttctaaggctaaagtcacatcagtaattggctagccatgttattaaggtgtcttaattcagcattttcaggttttatattgaaatacgcatttctttaaatattctttgaaaatggagaatggctttagtgatattttgggttttgttagagaacctaaaatctttacactttcatctcaaagattataaaggaaaggggggtagttaagatttagaattcaagttaaatttcagaaattggggcagtcaggcatttgtatctttggtagggcaacaagtaaaacatgtagagtgcttgctatcccacttcataaagcttttacccaatcttatttctaaacctctgtgcattcttagtgtcttctcattctgaaacagaaaataaggaaaaacatttaacttagttttctaaaatcagataatcctaaacaaaaatgttagtcagggtcactaaaaagtattgcacatttatataaatacagtccttttaaaatttgacttttaaaaaacaaaagactttgtacgatattgtgtttttattgcttttgcaatatttttatagtagcctttatgaactcagtataagtgcaagttgtttgaaaaggtgtttttattagtgcacaatagaattgtgaggttttcaatagatgtcatgagattttgtatatctacataaaatatcagtacatttttttctaatgctactggaaattttacttttcctttgcaacacataaatgatatgatgtacaaaataacagctctggttccaccagtacctaatgttgaaaacatttttaaagtaatttttaatactaactatttagtatactgtcagtactgtacatctgcacactggtgttaatagggtatatattaaattatataaaga

SEQ ID NO: 429035 - DNA, 2753 bp, Homo sapiens
  misc_feature (23)..(23): n is a, c, g, or t
acggccagtacaccacggggtantgtagcgaggcctgggtggtacttcaggcgcccaggccggcggggcgcgctccggcggctcctgtcagcggcgggtgcggcggatcccagggcagccttcgggcggcggcgctgcctggtgcgtcgcggcgtggtcctccggcggctgtccggggcggtaggagttggctgcgggatgtgctcagccggggagctgctgcggggcggcgacggcggggaacgcgacgaggacggggacgcgctggcggagcgggaggcggcagggaccgagtgggatcccggggcgagcccgcggcggcgcggacagcggccgaaggagagcgagcaggatgttgaagactcacagaaccacactggtgagccggttggagatgactacaagaaaatgggaacactttttggtgaactgaacaaaaaccttatcaacatgggcttcacaaggatgtattttggagaacgaatagtggaaccagtaatagtcattttcttttgggttatgctgtggttccttggcctgcaagcccttggactagttgctgttctttgccttgttattatttatgtgcaacagtaaaacatggccgaattgaattgtttgacatttggtagccatatatgtaattgaagaagttatatatttcactttttgacaaccgaaaaagtttgccttgtttcaaatcatgtgctggctgttttggtaagtaaatttatacatggatgtcacttaaaactaaactcttgatcataacagggttgaatatatattttgaatatacattagcttattcaaaactcttgtttcactactgtgatctctggtctcctttatacacctctatccccatgccaaatcttaagtaacaccaccagaaagtgaacagggaaaataacaggacatggaattcaaatcaagcaatatagttcttataaagagttccaataaaacatttcagaagaaaaagtatgaaacaagctaaaagtaagtttcacttagaaaacttctccccactcacactccccaccaaataatctcatattatttgggaaatatttggatttcaattgtccctacccagcctaaactaaggtaaatgataattagcatacactaccttaatattgtgatgaaaatcagtaaagatagaacgttttctaaaggtcaaaaataatatatttattattactggggaaagctcccaggttaaatataacttttttaaaatgtaacatttggacctagacctactttaatatatcatttgaagtttcagacaattttggtgctaattactttttgtgagtttttaaagtctcatagcctagttgactgcaccctatggtaatgccatattttcttgtatctaacaagttgcatattttttcctagagagacattttcagtgtatttttttttagaaatttataattttatagttctttcataacacttattctgagttttgaaacaatgtatttcctatcttgacatggattttttcacaaaaaatttgtattttactgttgttttcaggaaaaaaatcagatcatttttctttgatatctatatcagaaaggtacaatattaacagtataaaaccaaatgcttaaatttggaacttagccaattttgataatctttttctaaggctaaagtcacatcagtaattggctagccatgttattaaggtgtcttaattcagcattttcaggttttatattgaaatacgcatttctttaaatattctttgaaaatggagaatggctttagtgatattttgggttttgttagagaacctaaaatctttacactttcatctcaaagattataaaggaaaggggggtagttaagatttagaattcaagttaaatttcagaaattggggcagtcaggcatttgtatctttggtagggcaacaagtaaaacatgtagagtgcttgctatcccacttcataaagcttttacccaatcttatttctaaacctctgtgcattcttagtgtcttctcattctgaaacagaaaataaggaaaaacatttaacttagttttctaaaatcagataatcctaaacaaaaatgttagtcagggtcactaaaaagtattgcacatttatataaatacagtccttttaaaatttgacttttaaaaaacaaaagactttgtacgatattgtgtttttattgcttttgcaatatttttatagtagcctttatgaactcagtataagtgcaagttgtttgaaaaggtgtttttattagtgcacaatagaattgtgaggttttcaatagatgtcatgagattttgtatatctacataaaatatcagtacatttttttctaatgctactggaaattttacttttcctttgcaacacataaatgatatgatgtacaaaataacagctctggttccaccagtacctaatgttgaaaacatttttaaagtaatttttaatactaactatttagtatactgtcagtactgtacatctgcacactggtgttaatagggtatatattaaattatataaagaaataagatattttgctgttattctttctacatatattattggtcagtacatcaaataatatttggctttgatatgggaaaaaacaaactttgcctatgtaatggaaataaaatattttcttttatgaaatatattagaatgcagattatactaatatcctgaaataaaactggtaatttatttggttaaaagtataaa

SEQ ID NO: 429036 - DNA, 2777 bp, Homo sapiens
agcgggtgcggctccgccccgacggccgggggttgggcgagccagtgacaggaggggccgggctggtacttcaggcgcccaggccggcggggcgcgctccggcggctcctgtcagcggcgggtgcggcggatcccagggcagccttcgggcggcggcgctgcctggtgcgtcgcggcgtggtcctccggcggctgtccggggcggtaggagttggctgcgggatgtgctcagccggggagctgctgcggggcggcgacggcggggaacgcgacgaggacggggacgcgctggcggagcgggaggcggcagggaccgagtgggatcccggggcgagcccgcggcggcgcggacagcggccgaaggagagcgagcaggatgttgaagactcacagaaccacactggtgagccggttggagatgactacaagaaaatgggaacactttttggtgaactgaacaaaaaccttatcaacatgggcttcacaaggatgtattttggagaacgaatagtggaaccagtaatagtcattttcttttgggttatgctgtggttccttggcctgcaagcccttggactagttgctgttctttgccttgttattatttatgtgcaacagtaaaacatggccgaattgaattgtttgacatttggtagccatatatgtaattgaagaagttatatatttcactttttgacaaccgaaaaagtttgccttgtttcaaatcatgtgctggctgttttggtaagtaaatttatacatggatgtcacttaaaactaaactcttgatcataacagggttgaatatatattttgaatatacattagcttattcaaaactcttgtttcactactgtgatctctggtctcctttatacacctctatccccatgccaaatcttaagtaacaccaccagaaagtgaacagggaaaataacaggacatggaattcaaatcaagcaatatagttcttataaagagttccaataaaacatttcagaagaaaaagtatgaaacaagctaaaagtaagtttcacttagaaaacttctccccactcacactccccaccaaataatctcatattatttgggaaatatttggatttcaattgtccctacccagcctaaactaaggtaaatgataattagcatacactaccttaatattgtgatgaaaatcagtaaagatagaacgttttctaaaggtcaaaaataatatatttattattactggggaaagctcccaggttaaatataacttttttaaaatgtaacatttggacctagacctactttaatatatcatttgaagtttcagacaattttggtgctaattactttttgtgagtttttaaagtctcatagcctagttgactgcaccctatggtaatgccatattttcttgtatctaacaagttgcatattttttcctagagagacattttcagtgtatttttttttagaaatttataattttatagttctttcataacacttattctgagttttgaaacaatgtatttcctatcttgacatggattttttcacaaaaaatttgtattttactgttgttttcaggaaaaaaatcagatcatttttctttgatatctatatcagaaaggtacaatattaacagtataaaaccaaatgcttaaatttggaacttagccaattttgataatctttttctaaggctaaagtcacatcagtaattggctagccatgttattaaggtgtcttaattcagcattttcaggttttatattgaaatacgcatttctttaaatattctttgaaaatggagaatggctttagtgatattttgggttttgttagagaacctaaaatctttacactttcatctcaaagattataaaggaaaggggggtagttaagatttagaattcaagttaaatttcagaaattggggcagtcaggcatttgtatctttggtagggcaacaagtaaaacatgtagagtgcttgctatcccacttcataaagcttttacccaatcttatttctaaacctctgtgcattcttagtgtcttctcattctgaaacagaaaataaggaaaaacatttaacttagttttctaaaatcagataatcctaaacaaaaatgttagtcagggtcactaaaaagtattgcacatttatataaatacagtccttttaaaatttgacttttaaaaaacaaaagactttgtacgatattgtgtttttattgcttttgcaatatttttatagtagcctttatgaactcagtataagtgcaagttgtttgaaaaggtgtttttattagtgcacaatagaattgtgaggttttcaatagatgtcatgagattttgtatatctacataaaatatcagtacatttttttctaatgctactggaaattttacttttcctttgcaacacataaatgatatgatgtacaaaataacagctctggttccaccagtacctaatgttgaaaacatttttaaagtaatttttaatactaactatttagtatactgtcagtactgtacatctgcacactggtgttaatagggtatatattaaattatataaagaaataagatattttgctgttattctttctacatatattattggtcagtacatcaaataatatttggctttgatatgggaaaaaacaaactttgcctatgtaatggaaataaaatattttcttttatgaaatatattagaatgcagattatactaatatcctgaaataaaactggtaatttatttggttaaaagtataaa

SEQ ID NO: 429037 - DNA, 2567 bp, Homo sapiens
agcgggtgcggctccgccccgacggccgggggttgggcgagccagtgacaggaggggccgggctggtacttcaggcgcccaggccggcggggcgcgctccggcggctcctgtcagcggcgggtgcggcggatcccagggcagccttcgggcggcggcgctgcctggatgttgaagactcacagaaccacactggtgagccggttggagatgactacaagaaaatgggaacactttttggtgaactgaacaaaaaccttatcaacatgggcttcacaaggatgtattttggagaacgaatagtggaaccagtaatagtcattttcttttgggttatgctgtggttccttggcctgcaagcccttggactagttgctgttctttgccttgttattatttatgtgcaacagtaaaacatggccgaattgaattgtttgacatttggtagccatatatgtaattgaagaagttatatatttcactttttgacaaccgaaaaagtttgccttgtttcaaatcatgtgctggctgttttggtaagtaaatttatacatggatgtcacttaaaactaaactcttgatcataacagggttgaatatatattttgaatatacattagcttattcaaaactcttgtttcactactgtgatctctggtctcctttatacacctctatccccatgccaaatcttaagtaacaccaccagaaagtgaacagggaaaataacaggacatggaattcaaatcaagcaatatagttcttataaagagttccaataaaacatttcagaagaaaaagtatgaaacaagctaaaagtaagtttcacttagaaaacttctccccactcacactccccaccaaataatctcatattatttgggaaatatttggatttcaattgtccctacccagcctaaactaaggtaaatgataattagcatacactaccttaatattgtgatgaaaatcagtaaagatagaacgttttctaaaggtcaaaaataatatatttattattactggggaaagctcccaggttaaatataacttttttaaaatgtaacatttggacctagacctactttaatatatcatttgaagtttcagacaattttggtgctaattactttttgtgagtttttaaagtctcatagcctagttgactgcaccctatggtaatgccatattttcttgtatctaacaagttgcatattttttcctagagagacattttcagtgtatttttttttagaaatttataattttatagttctttcataacacttattctgagttttgaaacaatgtatttcctatcttgacatggattttttcacaaaaaatttgtattttactgttgttttcaggaaaaaaatcagatcatttttctttgatatctatatcagaaaggtacaatattaacagtataaaaccaaatgcttaaatttggaacttagccaattttgataatctttttctaaggctaaagtcacatcagtaattggctagccatgttattaaggtgtcttaattcagcattttcaggttttatattgaaatacgcatttctttaaatattctttgaaaatggagaatggctttagtgatattttgggttttgttagagaacctaaaatctttacactttcatctcaaagattataaaggaaaggggggtagttaagatttagaattcaagttaaatttcagaaattggggcagtcaggcatttgtatctttggtagggcaacaagtaaaacatgtagagtgcttgctatcccacttcataaagcttttacccaatcttatttctaaacctctgtgcattcttagtgtcttctcattctgaaacagaaaataaggaaaaacatttaacttagttttctaaaatcagataatcctaaacaaaaatgttagtcagggtcactaaaaagtattgcacatttatataaatacagtccttttaaaatttgacttttaaaaaacaaaagactttgtacgatattgtgtttttattgcttttgcaatatttttatagtagcctttatgaactcagtataagtgcaagttgtttgaaaaggtgtttttattagtgcacaatagaattgtgaggttttcaatagatgtcatgagattttgtatatctacataaaatatcagtacatttttttctaatgctactggaaattttacttttcctttgcaacacataaatgatatgatgtacaaaataacagctctggttccaccagtacctaatgttgaaaacatttttaaagtaatttttaatactaactatttagtatactgtcagtactgtacatctgcacactggtgttaatagggtatatattaaattatataaagaaataagatattttgctgttattctttctacatatattattggtcagtacatcaaataatatttggctttgatatgggaaaaaacaaactttgcctatgtaatggaaataaaatattttcttttatgaaatatattagaatgcagattatactaatatcctgaaataaaactggtaatttatttggttaaaagtataaa

SEQ ID NO: 429038 - DNA, 790 bp, Homo sapiens
acaaggctgagttcctggacctgggctatgtgagtctcctctgctcctgcagatgccccctccccaccaggagcccaccctgcagaccaaagccaccaactcaggggtgggcagcctgtcacctggagcctggaccagggatctcggggctgacccccccccaactccatcatctgcaaacctgttagggtcactgttacaaggacagtgaagccaggaagggggcatgagcctacagtcccccgtggggcggagtgaccactggagtccagccgccccctctcctgtggatttggggatgggatgggggtttgtccgggtgagtcccagaagagggctggcgctgctaagggacaccaagtcaagtgccaaagacagacgtgctccgcctccatctcccctcttcctgccccctggctgccacacctccaccggcctgaggccctcctcactgccacaggagctgatggagaggctgcagggcatcgtcacgcggccgcaccacctaaggcctattcagagcagcaaggtgtgcagtggcctgggtgggccagggtcgggggccctgcagggcagtggaggccacctcatgaccccatcccgctgcccagattgccagtgaccaccgagctgaattcgcgcgctgtctggagccactgctgctgctggggccacgtcgggtggcagctgctgcaagtggtgctaacacgtgagcagcaaccggggaggccaggcacaaggtccccaacactggggtgtgggggagggtgggcgctgaggggccagatcg

SEQ ID NO: 429039 - DNA, 1707 bp, Homo sapiens
acaaggctgagttcctggacctgggctatgtgagtctcctctgctcctgcagatgccccctccccaccaggagcccaccctgcagaccaaagccaccaactcaggggtgggcagcctgtcacctggagcctggaccagggatctcggggctgacccccccccaactccatcatctgcaaacctgttagggtcactgttacaaggacagtgaagccaggaagggggcatgagcctacagtcccccgtggggcggagtgaccactggagtccagccgccccctctcctgtggatttggggatgggatgggggtttgtccgggtgagtcccagaagagggctggcgctgctaagggacaccaagtcaagtgccaaagacagacgtgctccgcctccatctcccctcttcctgccccctggctgccacacctccaccggcctgaggccctcctcactgccacaggagctgatggagaggctgcagggcatcgtcacgcggccgcaccacctaaggcctattcagagcagcaagattgccagtgaccaccgagctgaattcgcgcgctgtctggagccactgctgctgctggggccacgtcgggtggcagctgctgcaagtggtgctaacacgctggcagggggcttaggccccaaggcgctgacggggccccactgcccctccccagtaggaaagatgtcggggtcacccgtccaaaagcccacgctgcaccggtccatcagcaccaaggtgctgctggcggagggcgagaacacgcccttcgcagagcactgccgccactatgaggactcctaccggcacctgcaggcagagatgcagagcctaaaggaccaggtacaggagctgcaccgagacctcaccaagcaccactcgctcatcaaggcggagatcatgggagacgtcctgcacaagtccctgcaactggacgtgcagatcgcctcggagcacgcctccttagagggcatgagggtcgtcttccaggagcttttctctttcagatttgggaggaagcctatcagcgagtggctaatgagcaggagatttatgaaggttccagacagttggctgctgagtgaaccctctgtccctgagctaacccacatactagcagaggaggaagtcagagtcggccactaaccagatgcaaatccccacactcttccccttagcgcttgaccgtgcctcccagctgctaactggcctcaaatgatgcatgtgaggtcaggattcattgagtagaatgcccccaccaagtgcctccctctttaattagaggtcatcatggaaatggtcgggatatttacgtggtgcctggcttgagtaaaaatctgaagccagatgcttcaggattaagaccccatgctctggccttggccccacagcccagctccatgaccttctccagctgaggcaggagaatgcctacctgaccaccatcaccaagcagatcacgccctacgtccgctccattgccaaggtgaaggagcggctggagcccaggtttcaggcacccgtggatgagcagtcagagagtctacagaacacgcacgacgacagcaggaacaacgcggcctcagccaggaataatccaggaagtgtcccggaaaagagagagaagacatcagagcctaaaggaaacagctgggctccgaacggcctctcagaagagcctctactgaaaaatatggatc

SEQ ID NO: 429040 - DNA, 1789 bp, Homo sapiens
acaaggctgagttcctggacctgggctatgtgagtctcctctgctcctgcagatgccccctccccaccaggagcccaccctgcagaccaaagccaccaactcaggggtgggcagcctgtcacctggagcctggaccagggatctcggggctgacccccccccaactccatcatctgcaaacctgttagggtcactgttacaaggacagtgaagccaggaagggggcatgagcctacagtcccccgtggggcggagtgaccactggagtccagccgccccctctcctgtggatttggggatgggatgggggtttgtccgggtgagtcccagaagagggctggcgctgctaagggacaccaagtcaagtgccaaagacagacgtgctccgcctccatctcccctcttcctgccccctggctgccacacctccaccggcctgaggccctcctcactgccacaggagctgatggagaggctgcagggcatcgtcacgcggccgcaccacctaaggcctattcagagcagcaaggtgtgcagtggcctgggtgggccagggtcgggggccctgcagggcagtggaggccacctcatgaccccatcccgctgcccagattgccagtgaccaccgagctgaattcgcgcgctgtctggagccactgctgctgctggggccacgtcgggtggcagctgctgcaagtggtgctaacacgctggcagggggcttaggccccaaggcgctgacggggccccactgcccctccccagtaggaaagatgtcggggtcacccgtccaaaagcccacgctgcaccggtccatcagcaccaaggtgctgctggcggagggcgagaacacgcccttcgcagagcactgccgccactatgaggactcctaccggcacctgcaggcagagatgcagagcctaaaggaccaggtacaggagctgcaccgagacctcaccaagcaccactcgctcatcaaggcggagatcatgggagacgtcctgcacaagtccctgcaactggacgtgcagatcgcctcggagcacgcctccttagagggcatgagggtcgtcttccaggagcttttctctttcagatttgggaggaagcctatcagcgagtggctaatgagcaggagatttatgaaggttccagacagttggctgctgagtgaaccctctgtccctgagctaacccacatactagcagaggaggaagtcagagtcggccactaaccagatgcaaatccccacactcttccccttagcgcttgaccgtgcctcccagctgctaactggcctcaaatgatgcatgtgaggtcaggattcattgagtagaatgcccccaccaagtgcctccctctttaattagaggtcatcatggaaatggtcgggatatttacgtggtgcctggcttgagtaaaaatctgaagccagatgcttcaggattaagaccccatgctctggccttggccccacagcccagctccatgaccttctccagctgaggcaggagaatgcctacctgaccaccatcaccaagcagatcacgccctacgtccgctccattgccaaggtgaaggagcggctggagcccaggtttcaggcacccgtggatgagcagtcagagagtctacagaacacgcacgacgacagcaggaacaacgcggcctcagccaggaataatccaggaagtgtcccggaaaagagagagaagacatcagagcctaaaggaaacagctgggctccgaacggcctctcagaagagcctctactgaaaaatatggatc

SEQ ID NO: 429041 - DNA, 1457 bp, Homo sapiens
acaaggctgagttcctggacctgggctatgtgagtctcctctgctcctgcagatgccccctccccaccaggagcccaccctgcagaccaaagccaccaactcaggggtgggcagcctgtcacctggagcctggaccagggatctcggggctgacccccccccaactccatcatctgcaaacctgttagggtcactgttacaaggacagtgaagccaggaagggggcatgagcctacagtcccccgtggggcggagtgaccactggagtccagccgccccctctcctgtggatttggggatgggatgggggtttgtccgggtgagtcccagaagagggctggcgctgctaagggacaccaagtcaagtgccaaagacagacgtgctccgcctccatctcccctcttcctgccccctggctgccacacctccaccggcctgaggccctcctcactgccacaggagctgatggagaggctgcagggcatcgtcacgcggccgcaccacctaaggcctattcagagcagcaaggtgtgcagtggcctgggtgggccagggtcgggggccctgcagggcagtggaggccacctcatgaccccatcccgctgcccagattgccagtgaccaccgagctgaattcgcgcgctgtctggagccactgctgctgctggggccacgtcgggtggcagctgctgcaagtggtgctaacacgctggcagggggcttaggccccaaggcgctgacggggccccactgcccctccccagtaggaaagatgtcggggtcacccgtccaaaagcccacgctgcaccggtccatcagcaccaaggtgctgctggcggagggcgagaacacgcccttcgcagagcactgccgccactatgaggactcctaccggcacctgcaggcagagatgcagagcctaaaggaccaggtacaggagctgcaccgagacctcaccaagcaccactcgctcatcaaggcggagatcatgggagacgtcctgcacaagtccctgcaactggacgtgcagatcgcctcggagcacgcctccttagagggcatgagggtcgtcttccaggagcttttctctttcagatttgggaggaagcctatcagcgagtggctaatgagcaggagatttatgaagcccagctccatgaccttctccagctgaggcaggagaatgcctacctgaccaccatcaccaagcagatcacgccctacgtccgctccattgccaaggtgaaggagcggctggagcccaggtttcaggcacccgtggatgagcagtcagagagtctacagaacacgcacgacgacagcaggaacaacgcggcctcagccaggaataatccaggaagtgtcccggaaaagagagagaagacatcagagcctaaaggaaacagctgggctccgaacggcctctcagaagagcctctactgaaaaatatggatc

SEQ ID NO: 429042 - DNA, 1651 bp, Homo sapiens
acaaggctgagttcctggacctgggctatgtgagtctcctctgctcctgcagatgccccctccccaccaggagcccaccctgcagaccaaagccaccaactcaggggtgggcagcctgtcacctggagcctggaccagggatctcggggctgacccccccccaactccatcatctgcaaacctgttagggtcactgttacaaggacagtgaagccaggaagggggcatgagcctacagtcccccgtggggcggagtgaccactggagtccagccgccccctctcctgtggatttggggatgggatgggggtttgtccgggtgagtcccagaagagggctggcgctgctaagggacaccaagtcaagtgccaaagacagacgtgctccgcctccatctcccctcttcctgccccctggctgccacacctccaccggcctgaggccctcctcactgccacaggagctgatggagaggctgcagggcatcgtcacgcggccgcaccacctaaggcctattcagagcagcaagattgccagtgaccaccgagctgaattcgcgcgctgtctggagccactgctgctgctggggccacgtcgggtggcagctgctgcaagtggtgctaacactaggaaagatgtcggggtcacccgtccaaaagcccacgctgcaccggtccatcagcaccaaggtgctgctggcggagggcgagaacacgcccttcgcagagcactgccgccactatgaggactcctaccggcacctgcaggcagagatgcagagcctaaaggaccaggtacaggagctgcaccgagacctcaccaagcaccactcgctcatcaaggcggagatcatgggagacgtcctgcacaagtccctgcaactggacgtgcagatcgcctcggagcacgcctccttagagggcatgagggtcgtcttccaggagcttttctctttcagatttgggaggaagcctatcagcgagtggctaatgagcaggagatttatgaaggttccagacagttggctgctgagtgaaccctctgtccctgagctaacccacatactagcagaggaggaagtcagagtcggccactaaccagatgcaaatccccacactcttccccttagcgcttgaccgtgcctcccagctgctaactggcctcaaatgatgcatgtgaggtcaggattcattgagtagaatgcccccaccaagtgcctccctctttaattagaggtcatcatggaaatggtcgggatatttacgtggtgcctggcttgagtaaaaatctgaagccagatgcttcaggattaagaccccatgctctggccttggccccacagcccagctccatgaccttctccagctgaggcaggagaatgcctacctgaccaccatcaccaagcagatcacgccctacgtccgctccattgccaaggtgaaggagcggctggagcccaggtttcaggcacccgtggatgagcagtcagagagtctacagaacacgcacgacgacagcaggaacaacgcggcctcagccaggaataatccaggaagtgtcccggaaaagagagagaagacatcagagcctaaaggaaacagctgggctccgaacggcctctcagaagagcctctactgaaaaatatggatc

SEQ ID NO: 429043 - DNA, 1422 bp, Homo sapiens
tgtgtgtccaggggccccaagaccaagagagactgggcccacacttcctctgtccagcatagaagtgaacacaccactcactcggtcctggccccggcagcattccgacggacttgctcttggccccacatcctggaacccactccagggactttaaaaaatagatgtggatgtccgggtgaggccttgcctcagccttttcaaatctcctggtggctctgctgtgctccaggtggtggagagggctgtgagatcccggagcagtccagggggctgccctgggaggctgggggaggggcagacttccccacccccctgcatccacactggctctctccccaggctggcagggggcttaggccccaaggcgctgacggggccccactgcccctccccagtaggaaagatgtcggggtcacccgtccaaaagcccacgctgcaccggtccatcagcaccaaggtgctgctggcggagggcgagaacacgcccttcgcagagcactgccgccactatgaggactcctaccggcacctgcaggcagagatgcagagcctaaaggaccaggtacaggagctgcaccgagacctcaccaagcaccactcgctcatcaaggcggagatcatgggagacgtcctgcacaagtccctgcaactggacgtgcagatcgcctcggagcacgcctccttagagggcatgagggtcgtcttccaggagcttttctctttcagatttgggaggaagcctatcagcgagtggctaatgagcaggagatttatgaaggttccagacagttggctgctgagtgaaccctctgtccctgagctaacccacatactagcagaggaggaagtcagagtcggccactaaccagatgcaaatccccacactcttccccttagcgcttgaccgtgcctcccagctgctaactggcctcaaatgatgcatgtgaggtcaggattcattgagtagaatgcccccaccaagtgcctccctctttaattagaggtcatcatggaaatggtcgggatatttacgtggtgcctggcttgagtaaaaatctgaagccagatgcttcaggattaagaccccatgctctggccttggccccacagcccagctccatgaccttctccagctgaggcaggagaatgcctacctgaccaccatcaccaagcagatcacgccctacgtccgctccattgccaaggtgaaggagcggctggagcccaggtttcaggcacccgtggatgagcagtcagagagtctacagaacacgcacgacgacagcaggaacaacgcggcctcagccaggaataatccaggaagtgtcccggaaaagagagagaagacatcagagcctaaaggaaacagctgggctccgaacggcctctcagaagagcctctactgaaaaatatggatc

SEQ ID NO: 429044 - DNA, 121 bp, Homo sapiens
gtaaagcaagtctctccactggagagtgtgcacgcgatgtggcttctgaggccaacaggacgacaaaggaaactccaggcttttcccctttggcgccagctctggggccctggctgggcct

SEQ ID NO: 429045 - DNA, 250 bp, Homo sapiens
ccaaggtgctgctggcggagggcgagaacacgcccttcgcagagcactgccgccactatgaggactcctaccgggtgagggggcagggatctgccggaggggggagatgtcctaacccactcctcaccaaggtacgctcagggaaatcgagttctcccagctgctgaagctgggagccattcctccaccaagtccatggcagtaaaaacagcctagggtgacccacgctctcacacagcctctctgtgca

SEQ ID NO: 429046 - DNA, 318 bp, Homo sapiens
cattgccaaggtgaaggagcggctggagcccaggtgaggccaagggggtgttcccagggccactgagactcttcagaatgtgcatgggggctgggtgcggtggctcacgcctgtaatcctaacacttcgggaggctgaggtgggcggataacctgaggtcagcagttcgagaccagcctggccaacatggtggaaccccatctctactaaaaatacaaaaatcagccatgcatggtggctcatgcctgtaatcccagctactggggaggctgaggcacgacaatctacagcctgggtgacacagtgagaccttgtctt

SEQ ID NO: 429047 - DNA, 226 bp, Homo sapiens
atctgagtagctagagatagcaatgccgccaccgtaaattcagctcactgccacatccaatgtccagcttttctctttcagatttgggaggaagcctatcagcgagtggctaatgagcaggagatttatgaaggttccagacagttggctgctgagtgaaccctctgtccctgagctaacccacatactagcagaggaggaagtcagagtcggccactaaccagat

SEQ ID NO: 429048 - DNA, 461 bp, Homo sapiens
accacctaaggcctattcagagcagcaaggtgtgcagtggcctgggtgggccagggtcgggggccctgcagggcagtggaggccacctcatgaccccatcccgctgcccagattgccagtgaccaccgagctgaattcgcgcgctgtctggagccactgctgctgctggggccacgtcgggtggcagctgctgcaagtggtgctaacacgtgagcagcaaccggggaggccaggcacaaggtccccaacactggggtgtgggggagggtgggcgctgaggggccagatcgccagcaagaagccaggtgccaccattccttcctccgtccttagctcgccaccctcccagcagggtgtctgggcacaggggatggccagggcgagtccactaagtaggggaacaggaagccctggacctgaagtccatggcagaccgggctcggagcttggctaaaggagga

SEQ ID NO: 429049 - DNA, 449 bp, Homo sapiens
gcggccgcaccacctaaggcctattcagagcagcaaggtgtgcagtggcctgggtgggccagggtcgggggccctgcagggcagtggaggccacctcatgaccccatcccgctgcccagattgccagtgaccaccgagctgaattcgcgcgctgtctggagccactgctgctgctggggccacgtcgggtggcagctgctgcaagtggtgctaacacgtgagcagcaaccggggaggccaggcacaaggtccccaacactggggtgtgggggagggtgggcgctgaggggccagatcgccagcaagaagccaggtgccaccattccttcctccgtccttagctcgccaccctcccagcagggtgtctgggcacaggggatggccagggcgagtccactaagtaggggaacaggaagccctggacctgaagtccatggcagaccgggctc

SEQ ID NO: 429050 - DNA, 2006 bp, Homo sapiens
agtgacctgctgggtaaactgtggatgatggttgcaaaagactaatttaaaaaataactaccaagaggccctgtctgtacctaacgccctatttttgcaatggctatatggcaagaaagctggtaaactatttgtctttcaggaccttttgaagtagtttgtataacttcttaaaagttgtgattccagataaccagctgtaacacagctgagagacttttaatcagacaaagtaattcctctcactaaactttacccaaaaactaaatctctaatatggcaaaaatggctagacacccattttcacattcccatctgtcaccaattggttaatctttcctgatggtacaggaaagctcagctactgatttttgtgatttagaactgtatgtcagacatccatgtttgtaaaactacacatccctaatgtgtgccatagagtttaacacaagtcctgtgaatttcttcactgttgaaaattattttaaacaaaatagaagctgtagtagccctttctgtgtgcaccttaccaactttctgtaaactcaaaacttaacatatttactaagccacaagaaatttgatttctattcaaggtggccaaattatttgtgtaatagaaaactgaaaatctaatattaaaaatatggaacttctaatatatttttatatttagttatagtttcagatatatatcatattggtattcactaatctgggaagggaagggctactgcagctttacatgcaatttattaaaaatgattgtaaaaatagcttgtatagtgtaaaataagaatgatttttagatgagattgttttatcatgacatgttatatattttttgtaggggtcaaagaaatgctgatggataacctatatgatttatagtttgtacatgcattcatacaggcagcgatggtctcagaaaccaaacagtttgctctaggggaagagggagatggagactggtcctgtgtgcagtgaaggttgctgaggctctgacccagtgagattacagaggaagttatcctctgcctcccattctgaccacccttctcattccaacagtgagtctgtcagcgcaggtttagtttactcaatctccccttgcactaaagtatgtaaagtatgtaaacaggagacaggaaggtggtgcttacatccttaaaggcaccatctaatagcgggttactttcacatacagccctcccccagcagttgaatgacaacagaagcttcagaagtttggcaatagtttgcatagaggtaccagcaatatgtaaatagtgcagaatctcataggttgccaataatacactaattcctttctatcctacaacaagagtttatttccaaataaaatgaggacatgtttttgttttctttgaatgctttttgaatgttatttgttattttcagtattttggagaaattatttaataaaaaaacaatcatttgctttttgaatgctctctaaaagggaatgtaatattttaagatggtgtgtaacccggctggataaatttttggtgcctaagaaaactgcttgaatattcttatcaatgacagtgttaagtttcaaaaagagcttctaaaacgtagattatcattcctttatagaatgttatgtggttaaaaccagaaagcacatctcacacattaatctgattttcatccccaacaatcttggcgctcaaaaaatagaactcaatgagaaaaagaagattatgtgcacttcgttgtcaataataagtcaactgatgctcatcgaacactgagggcttccattcaagggcaacaacccgggcccttaagactccgtgggaagacacctctcataagcaccgcgattacggcaacaggacgcgcgagcatatctagaggtacggccgcacccacggcacggaaccagcacgccccccacggaataagcagcaggaccccagccgcacggttacaaggatccacccgttgtacacctccttggttcgactcccgcccgc

SEQ ID NO: 429051 - DNA, 3165 bp, Homo sapiens
agtgacctgctgggtaaactgtggatgatggttgcaaaagactaatttaaaaaataactaccaagaggccctgtctgtacctaacgccctatttttgcaatggctatatggcaagaaagctggtaaactatttgtctttcaggaccttttgaagtagtttgtataacttcttaaaagttgtgattccagataaccagctgtaacacagctgagagacttttaatcagacaaagtaattcctctcactaaactttacccaaaaactaaatctctaatatggcaaaaatggctagacacccattttcacattcccatctgtcaccaattggttaatctttcctgatggtacaggaaagctcagctactgatttttgtgatttagaactgtatgtcagacatccatgtttgtaaaactacacatccctaatgtgtgccatagagtttaacacaagtcctgtgaatttcttcactgttgaaaattattttaaacaaaatagaagctgtagtagccctttctgtgtgcaccttaccaactttctgtaaactcaaaacttaacatatttactaagccacaagaaatttgatttctattcaaggtggccaaattatttgtgtaatagaaaactgaaaatctaatattaaaaatatggaacttctaatatatttttatatttagttatagtttcagatatatatcatattggtattcactaatctgggaagggaagggctactgcagctttacatgcaatttattaaaaatgattgtaaaaatagcttgtatagtgtaaaataagaatgatttttagatgagattgttttatcatgacatgttatatattttttgtaggggtcaaagaaatgctgatggataacctatatgatttatagtttgtacatgcattcatacaggcagcgatggtctcagaaaccaaacagtttgctctaggggaagagggagatggagactggtcctgtgtgcagtgaaggttgctgaggctctgacccagtgagattacagaggaagttatcctctgcctcccattctgaccacccttctcattccaacagtgagtctgtcagcgcaggtttagtttactcaatctccccttgcactaaagtatgtaaagtatgtaaacaggagacaggaaggtggtgcttacatccttaaaggcaccatctaatagcgggttactttcacatacagccctcccccagcagttgaatgacaacagaagcttcagaagtttggcaatagtttgcatagaggtaccagcaatatgtaaatagtgcagaatctcataggttgccaataatacactaattcctttctatcctacaacaagagtttatttccaaataaaatgaggacatgtttttgttttctttgaatgctttttgaatgttatttgttattttcagtattttggagaaattatttaataaaaaaacaatcatttgctttttgaatgctctctaaaagggaatgtaatattttaagatggtgtgtaacccggctggataaatttttggtgcctaagaaaactgcttgaatattcttatcaatgacagtgttaagtttcaaaaagagcttctaaaacgtagattatcattcctttatagaatgttatgtggttaaaaccagaaagcacatctcacacattaatctgattttcatccccaacaatcttggcgctcaaaaaatagaactcaatgagaaaaagaagattatgtgcacttcgttgtcaataataagtcaactgatgctcatcgacaactataggaggcttttcattaaatgggaaaagaagctgtgcccttttaggatacgtgggggaaaagaaagtcatcttaattatgtttaattgtggatttaagtgctatatggtggtgctgtttgaaagcagatttatttcctatgtatgtgttatctggccatcccaacccaaactgttgaagtttgtagtaacttcagtgagagttggttactcacaacaaatcctgaaaagtatttttagtgtttgtaggtattctgtgggatactatacaagcagaactgaggcacttaggacataacacttttggggtatatatatccaaatgcctaaaactatgggaggaaaccttggccaccccaaaaggaaaactaacatgatttgtgtctatgaagtgctggataattagcatgggatgagctctgggcatgccatgaaggaaagccacgctcccttcagaattcagaggcagggagcaattccagtttcacctaagtctcataattttagttcccttttaaaaaccctgaaaactacatcaccatggaatgaaaaatattgttatacaatacattgatctgtcaaacttccagaaccatggtagccttcagtgagatttccatcttggctggtcactccctgactgtagctgtaggtgaatgtgtttttttgtgtgtgtgtctggttttagtgtcagaagggaaataaaagtgtaaggaggacactttaaaccctttgggtggagtttcgtaatttcccagactattttcaagcaacctggtccacccaggattagtgaccaggttttcaggaaaggatttgcttctctctagaaaatgtctgaaaggattttattttctgatgaaaggctgtatgaaaataccctcctcaaataacttgcttaactacatatagattcaagtgtgtcaatattctattttgtatattaaatgctatataatggggacaaatctatattatactgtgtatggcattattaagaagctttttcattattttttatcacagtaattttaaaatgtgtaaaaattaaaaccagtgactcctgtttaaaaataaaagttgtagttttttattcatgctgaataataatctgtagttaaaaaaaaagtgtctttttacctacgcagtgaaatgtcagactgtaaaaccttgtgtggaaatgtttaacttttattttttcatttaaatttgctgttctggtattaccaaaccacacatttgtaccgaattggcagtaaatgttagccatttacagcaatgccaaatatggagaaacatcataataaaaaaatctgctttttcaaacaacagaaacacaaagacaggaccacaagaatacaacaagaagagaacaagagagagaaaa

SEQ ID NO: 429052 - DNA, 3102 bp, Homo sapiens
agtgacctgctgggtaaactgtggatgatggttgcaaaagactaatttaaaaaataactaccaagaggccctgtctgtacctaacgccctatttttgcaatggctatatggcaagaaagctggtaaactatttgtctttcaggaccttttgaagtagtttgtataacttcttaaaagttgtgattccagataaccagctgtaacacagctgagagacttttaatcagacaaagtaattcctctcactaaactttacccaaaaactaaatctctaatatggcaaaaatggctagacacccattttcacattcccatctgtcaccaattggttaatctttcctgatggtacaggaaagctcagctactgatttttgtgatttagaactgtatgtcagacatccatgtttgtaaaactacacatccctaatgtgtgccatagagtttaacacaagtcctgtgaatttcttcactgttgaaaattattttaaacaaaatagaagctgtagtagccctttctgtgtgcaccttaccaactttctgtaaactcaaaacttaacatatttactaagccacaagaaatttgatttctattcaaggtggccaaattatttgtgtaatagaaaactgaaaatctaatattaaaaatatggaacttctaatatatttttatatttagttatagtttcagatatatatcatattggtattcactaatctgggaagggaagggctactgcagctttacatgcaatttattaaaaatgattgtaaaaatagcttgtatagtgtaaaataagaatgatttttagatgagattgttttatcatgacatgttatatattttttgtaggggtcaaagaaatgctgatggataacctatatgatttatagtttgtacatgcattcatacaggcagcgatggtctcagaaaccaaacagtttgctctaggggaagagggagatggagactggtcctgtgtgcagtgaaggttgctgaggctctgacccagtgagattacagaggaagttatcctctgcctcccattctgaccacccttctcattccaacagtgagtctgtcagcgcaggtttagtttactcaatctccccttgcactaaagtatgtaaagtatgtaaacaggagacaggaaggtggtgcttacatccttaaaggcaccatctaatagcgggttactttcacatacagccctcccccagcagttgaatgacaacagaagcttcagaagtttggcaatagtttgcatagaggtaccagcaatatgtaaatagtgcagaatctcataggttgccaataatacactaattcctttctatcctacaacaagagtttatttccaaataaaatgaggacatgtttttgttttctttgaatgctttttgaatgttatttgttattttcagtattttggagaaattatttaataaaaaaacaatcatttgctttttgaatgctctctaaaagggaatgtaatattttaagatggtgtgtaacccggctggataaatttttggtgcctaagaaaactgcttgaatattcttatcaatgacagtgttaagtttcaaaaagagcttctaaaacgtagattatcattcctttatagaatgttatgtggttaaaaccagaaagcacatctcacacattaatctgattttcatccccaacaatcttggcgctcaaaaaatagaactcaatgagaaaaagaagattatgtgcacttcgttgtcaataataagtcaactgatgctcatcgacaactataggaggcttttcattaaatgggaaaagaagctgtgcccttttaggatacgtgggggaaaagaaagtcatcttaattatgtttaattgtggatttaagtgctatatggtggtgctgtttgaaagcagatttatttcctatgtatgtgttatctggccatcccaacccaaactgttgaagtttgtagtaacttcagtgagagttggttactcacaacaaatcctgaaaagtatttttagtgtttgtaggtattctgtgggatactatacaagcagaactgaggcacttaggacataacacttttggggtatatatatccaaatgcctaaaactatgggaggaaaccttggccaccccaaaaggaaaactaacatgatttgtgtctatgaagtgctggataattagcatgggatgagctctgggcatgccatgaaggaaagccacgctcccttcagaattcagaggcagggagcaattccagtttcacctaagtctcataattttagttcccttttaaaaaccctgaaaactacatcaccatggaatgaaaaatattgttatacaatacattgatctgtcaaacttccagaaccatggtagccttcagtgagatttccatcttggctggtcactccctgactgtagctgtaggtgaatgtgtttttttgtgtgtgtgtctggttttagtgtcagaagggaaataaaagtgtaaggaggacactttaaaccctttgggtggagtttcgtaatttcccagactattttcaagcaacctggtccacccaggattagtgaccaggttttcaggaaaggatttgcttctctctagaaaatgtctgaaaggattttattttctgatgaaaggctgtatgaaaataccctcctcaaataacttgcttaactacatatagattcaagtgtgtcaatattctattttgtatattaaatgctatataatggggacaaatctatattatactgtgtatggcattattaagaagctttttcattattttttatcacagtaattttaaaatgtgtaaaaattaaaaccagtgactcctgtttaaaaataaaagttgtagttttttattcatgctgaataataatctgtagttaaaaaaaaagtgtctttttacctacgcagtgaaatgtcagactgtaaaaccttgtgtggaaatgtttaacttttattttttcatttaaatttgctgttctggtattaccaaaccacacatttgtaccgaattggcagtaaatgttagccatttacagcaatgccaaatatggagaaacatcataataaaaaaatctgctttttca

SEQ ID NO: 429053 - DNA, 2848 bp, Homo sapiens
agtgacctgctgggtaaactgtggatgatggttgcaaaagactaatttaaaaaataactaccaagaggccctgtctgtacctaacgccctatttttgcaatggctatatggcaagaaagctggtaaactatttgtctttcaggaccttttgaagtagtttgtataacttcttaaaagttgtgattccagataaccagctgtaacacagctgagagacttttaatcagacaaagtaattcctctcactaaactttacccaaaaactaaatctctaatatggcaaaaatggctagacacccattttcacattcccatctgtcaccaattggttaatctttcctgatggtacaggaaagctcagctactgatttttgtgatttagaactgtatgtcagacatccatgtttgtaaaactacacatccctaatgtgtgccatagagtttaacacaagtcctgtgaatttcttcactgttgaaaattattttaaacaaaatagaagctgtagtagccctttctgtgtgcaccttaccaactttctgtaaactcaaaacttaacatatttactaagccacaagaaatttgatttctattcaaggtggccaaattatttgtgtaatagaaaactgaaaatctaatattaaaaatatggaacttctaatatatttttatatttagttatagtttcagatatatatcatattggtattcactaatctgggaagggaagggctactgcagctttacatgcaatttattaaaaatgattgtaaaaatagcttgtatagtgtaaaataagaatgatttttagatgagattgttttatcatgacatgttatatattttttgtaggggtcaaagaaatgctgatggataacctatatgatttatagtttgtacatgcattcatacaggcagcgatggtctcagaaaccaaacagtttgctctaggggaagagggagatggagactggtcctgtgtgcagtgaaggttgctgaggctctgacccagtgagattacagaggaagttatcctctgcctcccattctgaccacccttctcattccaacagtgagtctgtcagcgcaggtttagtttactcaatctccccttgcactaaagtatgtaaagtatgtaaacaggagacaggaaggtggtgcttacatccttaaaggcaccatctaatagcgggttactttcacatacagccctcccccagcagttgaatgacaacagaagcttcagaagtttggcaatagtttgcatagaggtaccagcaatatgtaaatagtgcagaatctcataggttgccaataatacactaattcctttctatcctacaacaagagtttatttccaaataaaatgaggacatgtttttgttttctttgaatgctttttgaatgttatttgttattttcagtattttggagaaattatttaataaaaaaacaatcatttgctttttgaatgctctctaaaagggaatgtaatattttaagatggtgtgtaacccggctggataaatttttggtgcctaagaaaactgcttgaatattcttatcaatgacagtgttaagtttcaaaaagagcttctaaaacgtagattatcattcctttatagaatgttatgtggttaaaaccagaaagcacatctcacacattaatctgattttcatccccaacaatcttggcgctcaaaaaatagaactcaatgagaaaaagaagattatgtgcacttcgttgtcaataataagtcaactgatgctcatcgacaactataggaggcttttcattaaatgggaaaagaagctgtgcccttttaggatacgtgggggaaaagaaagtcatcttaattatgtttaattgtggatttaagtgctatatggtggtgctgtttgaaagcagatttatttcctatgtatgtgttatctggccatcccaacccaaactgttgaagtttgtagtaacttcagtgagagttggttactcacaacaaatcctgaaaagtatttttagtgtttgtaggtattctgtgggatactatacaagcagaactgaggcacttaggacataacacttttggggtatatatatccaaatgcctaaaactatgggaggaaaccttggccaccccaaaaggaaaactaacatgatttgtgtctatgaagtgctggataattagcatgggatgagctctgggcatgccatgaaggaaagccacgctcccttcagaattcagaggcagggagcaattccagtttcacctaagtctcataattttagttcccttttaaaaaccctgaaaactacatcaccatggaatgaaaaatattgttatacaatacattgatctgtcaaacttccagaaccatggtagccttcagtgagatttccatcttggctggtcactccctgactgtagctgtaggtgaatgtgtttttttgtgtgtgtgtctggttttagtgtcagaagggaaataaaagtgtaaggaggacactttaaaccctttgggtggagtttcgtaatttcccagactattttcaagcaacctggtccacccaggattagtgaccaggttttcaggaaaggatttgcttctctctagaaaatgtctgaaaggattttattttctgatgaaaggctgtatgaaaataccctcctcaaataacttgcttaactacatatagattcaagtgtgtcaatattctattttgtatattaaatgctatataatggggacaaatctatattatactgtgtatggcattattaagaagctttttcattattttttatcacagtaattttaaaatgtgtaaaaattaaaaccagtgactcctgttta

SEQ ID NO: 429054 - DNA, 2678 bp, Homo sapiens
agtgacctgctgggtaaactgtggatgatggttgcaaaagactaatttaaaaaataactaccaagaggccctgtctgtacctaacgccctatttttgcaatggctatatggcaagaaagctggtaaactatttgtctttcaggaccttttgaagtagtttgtataacttcttaaaagttgtgattccagataaccagctgtaacacagctgagagacttttaatcagacaaagtaattcctctcactaaactttacccaaaaactaaatctctaatatggcaaaaatggctagacacccattttcacattcccatctgtcaccaattggttaatctttcctgatggtacaggaaagctcagctactgatttttgtgatttagaactgtatgtcagacatccatgtttgtaaaactacacatccctaatgtgtgccatagagtttaacacaagtcctgtgaatttcttcactgttgaaaattattttaaacaaaatagaagctgtagtagccctttctgtgtgcaccttaccaactttctgtaaactcaaaacttaacatatttactaagccacaagaaatttgatttctattcaaggtggccaaattatttgtgtaatagaaaactgaaaatctaatattaaaaatatggaacttctaatatatttttatatttagttatagtttcagatatatatcatattggtattcactaatctgggaagggaagggctactgcagctttacatgcaatttattaaaaatgattgtaaaaatagcttgtatagtgtaaaataagaatgatttttagatgagattgttttatcatgacatgttatatattttttgtaggggtcaaagaaatgctgatggataacctatatgatttatagtttgtacatgcattcatacaggcagcgatggtctcagaaaccaaacagtttgctctaggggaagagggagatggagactggtcctgtgtgcagtgaaggttgctgaggctctgacccagtgagattacagaggaagttatcctctgcctcccattctgaccacccttctcattccaacagtgagtctgtcagcgcaggtttagtttactcaatctccccttgcactaaagtatgtaaagtatgtaaacaggagacaggaaggtggtgcttacatccttaaaggcaccatctaatagcgggttactttcacatacagccctcccccagcagttgaatgacaacagaagcttcagaagtttggcaatagtttgcatagaggtaccagcaatatgtaaatagtgcagaatctcataggttgccaataatacactaattcctttctatcctacaacaagagtttatttccaaataaaatgaggacatgtttttgttttctttgaatgctttttgaatgttatttgttattttcagtattttggagaaattatttaataaaaaaacaatcatttgctttttgaatgctctctaaaagggaatgtaatattttaagatggtgtgtaacccggctggataaatttttggtgcctaagaaaactgcttgaatattcttatcaatgacagtgttaagtttcaaaaagagcttctaaaacgtagattatcattcctttatagaatgttatgtggttaaaaccagaaagcacatctcacacattaatctgattttcatccccaacaatcttggcgctcaaaaaatagaactcaatgagaaaaagaagattatgtgcacttcgttgtcaataataagtcaactgatgctcatcgacaactataggaggcttttcattaaatgggaaaagaagctgtgcccttttaggatacgtgggggaaaagaaagtcatcttaattatgtttaattgtggatttaagtgctatatggtggtgctgtttgaaagcagatttatttcctatgtatgtgttatctggccatcccaacccaaactgttgaagtttgtagtaacttcagtgagagttggttactcacaacaaatcctgaaaagtatttttagtgtttgtaggtattctgtgggatactatacaagcagaactgaggcacttaggacataacacttttggggtatatatatccaaatgcctaaaactatgggaggaaaccttggccaccccaaaaggaaaactaacatgatttgtgtctatgaagtgctggataattagcatgggatgagctctgggcatgccatgaaggaaagccacgctcccttcagaattcagaggcagggagcaattccagtttcacctaagtctcataattttagttcccttttaaaaaccctgaaaactacatcaccatggaatgaaaaatattgttatacaatacattgatctgtcaaacttccagaaccatggtagccttcagtgagatttccatcttggctggtcactccctgactgtagctgtaggtgaatgtgtttttttgtgtgtgtgtctggttttagtgtcagaagggaaataaaagtgtaaggaggacactttaaaccctttgggtggagtttcgtaatttcccagactattttcaagcaacctggtccacccaggattagtgaccaggttttcaggaaaggatttgcttctctctagaaaatgtctgaaaggattttattttctgatgaaaggctgtatattctattttgtatatttgctatttggg

SEQ ID NO: 429055 - DNA, 2480 bp, Homo sapiens
agtgacctgctgggtaaactgtggatgatggttgcaaaagactaatttaaaaaataactaccaagaggccctgtctgtacctaacgccctatttttgcaatggctatatggcaagaaagctggtaaactatttgtctttcaggaccttttgaagtagtttgtataacttcttaaaagttgtgattccagataaccagctgtaacacagctgagagacttttaatcagacaaagtaattcctctcactaaactttacccaaaaactaaatctctaatatggcaaaaatggctagacacccattttcacattcccatctgtcaccaattggttaatctttcctgatggtacaggaaagctcagctactgatttttgtgatttagaactgtatgtcagacatccatgtttgtaaaactacacatccctaatgtgtgccatagagtttaacacaagtcctgtgaatttcttcactgttgaaaattattttaaacaaaatagaagctgtagtagccctttctgtgtgcaccttaccaactttctgtaaactcaaaacttaacatatttactaagccacaagaaatttgatttctattcaaggtggccaaattatttgtgtaatagaaaactgaaaatctaatattaaaaatatggaacttctaatatatttttatatttagttatagtttcagatatatatcatattggtattcactaatctgggaagggaagggctactgcagctttacatgcaatttattaaaaatgattgtaaaaatagcttgtatagtgtaaaataagaatgatttttagatgagattgttttatcatgacatgttatatattttttgtaggggtcaaagaaatgctgatggataacctatatgatttatagtttgtacatgcattcatacaggcagcgatggtctcagaaaccaaacagtttgctctaggggaagagggagatggagactggtcctgtgtgcagtgaaggttgctgaggctctgacccagtgagattacagaggaagttatcctctgcctcccattctgaccacccttctcattccaacagtgagtctgtcagcgcaggtttagtttactcaatctccccttgcactaaagtatgtaaagtatgtaaacaggagacaggaaggtggtgcttacatccttaaaggcaccatctaatagcgggttactttcacatacagccctcccccagcagttgaatgacaacagaagcttcagaagtttggcaatagtttgcatagaggtaccagcaatatgtaaatagtgcagaatctcataggttgccaataatacactaattcctttctatcctacaacaagagtttatttccaaataaaatgaggacatgtttttgttttctttgaatgctttttgaatgttatttgttattttcagtattttggagaaattatttaataaaaaaacaatcatttgctttttgaatgctctctaaaagggaatgtaatattttaagatggtgtgtaacccggctggataaatttttggtgcctaagaaaactgcttgaatattcttatcaatgacagtgttaagtttcaaaaagagcttctaaaacgtagattatcattcctttatagaatgttatgtggttaaaaccagaaagcacatctcacacattaatctgattttcatccccaacaatcttggcgctcaaaaaatagaactcaatgagaaaaagaagattatgtgcacttcgttgtcaataataagtcaactgatgctcatcgacaactataggaggcttttcattaaatgggaaaagaagctgtgcccttttaggatacgtgggggaaaagaaagtcatcttaattatgtttaattgtggatttaagtgctatatggtggtgctgtttgaaagcagatttatttcctatgtatgtgttatctggccatcccaacccaaactgttgaagtttgtagtaacttcagtgagagttggttactcacaacaaatcctgaaaagtatttttagtgtttgtaggtattctgtgggatactatacaagcagaactgaggcacttaggacataacacttttggggtatatatatccaaatgcctaaaactatgggaggaaaccttggccaccccaaaaggaaaactaacatgatttgtgtctatgaagtgctggataattagcatgggatgagctctgggcatgccatgaaggaaagccacgctcccttcagaattcagaggcagggagcaattccagtttcacctaagtctcataattttagttcccttttaaaaaccctgaaaactacatcaccatggaatgaaaaatattgttatacaatacattgatctgtcaaacttccagaaccatggtagccttcagtgagatttccatcttggctggtcactccctgactgtagctgtaggtgaatgtgtttttttgtgtgtgattctggccggaatcctcggagtcacc

SEQ ID NO: 429056 - DNA, 2307 bp, Homo sapiens
agtgacctgctgggtaaactgtggatgatggttgcaaaagactaatttaaaaaataactaccaagaggccctgtctgtacctaacgccctatttttgcaatggctatatggcaagaaagctggtaaactatttgtctttcaggaccttttgaagtagtttgtataacttcttaaaagttgtgattccagataaccagctgtaacacagctgagagacttttaatcagacaaagtaattcctctcactaaactttacccaaaaactaaatctctaatatggcaaaaatggctagacacccattttcacattcccatctgtcaccaattggttaatctttcctgatggtacaggaaagctcagctactgatttttgtgatttagaactgtatgtcagacatccatgtttgtaaaactacacatccctaatgtgtgccatagagtttaacacaagtcctgtgaatttcttcactgttgaaaattattttaaacaaaatagaagctgtagtagccctttctgtgtgcaccttaccaactttctgtaaactcaaaacttaacatatttactaagccacaagaaatttgatttctattcaaggtggccaaattatttgtgtaatagaaaactgaaaatctaatattaaaaatatggaacttctaatatatttttatatttagttatagtttcagatatatatcatattggtattcactaatctgggaagggaagggctactgcagctttacatgcaatttattaaaaatgattgtaaaaatagcttgtatagtgtaaaataagaatgatttttagatgagattgttttatcatgacatgttatatattttttgtaggggtcaaagaaatgctgatggataacctatatgatttatagtttgtacatgcattcatacaggcagcgatggtctcagaaaccaaacagtttgctctaggggaagagggagatggagactggtcctgtgtgcagtgaaggttgctgaggctctgacccagtgagattacagaggaagttatcctctgcctcccattctgaccacccttctcattccaacagtgagtctgtcagcgcaggtttagtttactcaatctccccttgcactaaagtatgtaaagtatgtaaacaggagacaggaaggtggtgcttacatccttaaaggcaccatctaatagcgggttactttcacatacagccctcccccagcagttgaatgacaacagaagcttcagaagtttggcaatagtttgcatagaggtaccagcaatatgtaaatagtgcagaatctcataggttgccaataatacactaattcctttctatcctacaacaagagtttatttccaaataaaatgaggacatgtttttgttttctttgaatgctttttgaatgttatttgttattttcagtattttggagaaattatttaataaaaaaacaatcatttgctttttgaatgctctctaaaagggaatgtaatattttaagatggtgtgtaacccggctggataaatttttggtgcctaagaaaactgcttgaatattcttatcaatgacagtgttaagtttcaaaaagagcttctaaaacgtagattatcattcctttatagaatgttatgtggttaaaaccagaaagcacatctcacacattaatctgattttcatccccaacaatcttggcgctcaaaaaatagaactcaatgagaaaaagaagattatgtgcacttcgttgtcaataataagtcaactgatgctcatcgacaactataggaggcttttcattaaatgggaaaagaagctgtgcccttttaggatacgtgggggaaaagaaagtcatcttaattatgtttaattgtggatttaagtgctatatggtggtgctgtttgaaagcagatttatttcctatgtatgtgttatctggccatcccaacccaaactgttgaagtttgtagtaacttcagtgagagttggttactcacaacaaatcctgaaaagtatttttagtgtttgtaggtattctgtgggatactatacaagcagaactgaggcacttaggacataacacttttggggtatatatatccaaatgcctaaaactatgggaggaaaccttggccaccccaaaaggaaaactaacatgatttgtgtctatgaagtgctggataattagcatgggatgagctctgggcatgccatgaaggaaagccacgctcccttcagaattcagaggacacaaatcatgttagttttccttttggggtggccaaggtttcctcccatagttttaggcaat

SEQ ID NO: 429057 - DNA, 2275 bp, Homo sapiens
agtgacctgctgggtaaactgtggatgatggttgcaaaagactaatttaaaaaataactaccaagaggccctgtctgtacctaacgccctatttttgcaatggctatatggcaagaaagctggtaaactatttgtctttcaggaccttttgaagtagtttgtataacttcttaaaagttgtgattccagataaccagctgtaacacagctgagagacttttaatcagacaaagtaattcctctcactaaactttacccaaaaactaaatctctaatatggcaaaaatggctagacacccattttcacattcccatctgtcaccaattggttaatctttcctgatggtacaggaaagctcagctactgatttttgtgatttagaactgtatgtcagacatccatgtttgtaaaactacacatccctaatgtgtgccatagagtttaacacaagtcctgtgaatttcttcactgttgaaaattattttaaacaaaatagaagctgtagtagccctttctgtgtgcaccttaccaactttctgtaaactcaaaacttaacatatttactaagccacaagaaatttgatttctattcaaggtggccaaattatttgtgtaatagaaaactgaaaatctaatattaaaaatatggaacttctaatatatttttatatttagttatagtttcagatatatatcatattggtattcactaatctgggaagggaagggctactgcagctttacatgcaatttattaaaaatgattgtaaaaatagcttgtatagtgtaaaataagaatgatttttagatgagattgttttatcatgacatgttatatattttttgtaggggtcaaagaaatgctgatggataacctatatgatttatagtttgtacatgcattcatacaggcagcgatggtctcagaaaccaaacagtttgctctaggggaagagggagatggagactggtcctgtgtgcagtgaaggttgctgaggctctgacccagtgagattacagaggaagttatcctctgcctcccattctgaccacccttctcattccaacagtgagtctgtcagcgcaggtttagtttactcaatctccccttgcactaaagtatgtaaagtatgtaaacaggagacaggaaggtggtgcttacatccttaaaggcaccatctaatagcgggttactttcacatacagccctcccccagcagttgaatgacaacagaagcttcagaagtttggcaatagtttgcatagaggtaccagcaatatgtaaatagtgcagaatctcataggttgccaataatacactaattcctttctatcctacaacaagagtttatttccaaataaaatgaggacatgtttttgttttctttgaatgctttttgaatgttatttgttattttcagtattttggagaaattatttaataaaaaaacaatcatttgctttttgaatgctctctaaaagggaatgtaatattttaagatggtgtgtaacccggctggataaatttttggtgcctaagaaaactgcttgaatattcttatcaatgacagtgttaagtttcaaaaagagcttctaaaacgtagattatcattcctttatagaatgttatgtggttaaaaccagaaagcacatctcacacattaatctgattttcatccccaacaatcttggcgctcaaaaaatagaactcaatgagaaaaagaagattatgtgcacttcgttgtcaataataagtcaactgatgctcatcgacaactataggaggcttttcattaaatgggaaaagaagctgtgcccttttaggatacgtgggggaaaagaaagtcatcttaattatgtttaattgtggatttaagtgctatatggtggtgctgtttgaaagcagatttatttcctatgtatgtgttatctggccatcccaacccaaactgttgaagtttgtagtaacttcagtgagagttggttactcacaacaaatcctgaaaagtatttttagtgtttgtaggtattctgtgggatactatacaagcagaactgaggcacttaggacataacacttttggggtatatatatccaaatgcctaaaactatgggaggaaaccttggccaccccaaaaggaaaactaacatgatttgtgtctatgaagggagcgtggctttccttcatggcatgcccagagctcatcccatgctaattatccagcacttcatagacacaaatcatgttagttttcgtcgacgcggccgcgaat

SEQ ID NO: 429058 - DNA, 4159 bp, Homo sapiens
aagacttaggaagactggtggatgcgtttgggttgtagctaggctttttcttttctttctcttttaaaacacatctagacaaggaaaaaacaagcctcggatctgatttttcactcctcgttcttgtgcttggttcttactgtgtttgtgtattttaaaggcgagaagacgaggggaacaaaaccagctggatccatccatcaccgtgggtggttttaatttttcgttttttctcgttatttttttttaaacaaccactcttcacaatgaacaaactgtatatcggaaacctcagcgagaacgccgccccctcggacctagaaagtatcttcaaggacgccaagatcccggtgtcgggacccttcctggtgaagactggctacgcgttcgtggactgcccggacgagagctgggccctcaaggccatcgaggcgctttcaggtaaaatagaactgcacgggaaacccatagaagttgagcactcggtcccaaaaaggcaaaggattcggaaacttcagatacgaaatatcccgcctcatttacagtgggaggtgctggatagtttactagtccagtatggagtggtggagagctgtgagcaagtgaacactgactcggaaactgcagttgtaaatgtaacctattccagtaaggaccaagctagacaagcactagacaaactgaatggatttcagttagagaatttcaccttgaaagtagcctatatccctgatgaaatggccgcccagcaaaaccccttgcagcagccccgaggtcgccgggggcttgggcagaggggctcctcaaggcaggggtctccaggatccgtatccaagcagaaaccatgtgatttgcctctgcgcctgctggttcccacccaatttgttggagccatcataggaaaagaaggtgccaccattcggaacatcaccaaacagacccagtctaaaatcgatgtccaccgtaaagaaaatgcgggggctgctgagaagtcgattactatcctctctactcctgaaggcacctctgcggcttgtaagtctattctggagattatgcataaggaagctcaagatataaaattcacagaagagatccccttgaagattttagctcataataactttgttggacgtcttattggtaaagaaggaagaaatcttaaaaaaattgagcaagacacagacactaaaatcacgatatctccattgcaggaattgacgctgtataatccagaacgcactattacagttaaaggcaatgttgagacatgtgccaaagctgaggaggagatcatgaagaaaatcagggagtcttatgaaaatgatattgcttctatgaatcttcaagcacatttaattcctggattaaatctgaacgccttgggtctgttcccacccacttcagggatgccacctcccacctcagggcccccttcagccatgactcctccctacccgcagtttgagcaatcagaaacggagactgttcatctgtttatcccagctctatcagtcggtgccatcatcggcaagcagggccagcacatcaagcagctttctcgctttgctggagcttcaattaagattgctccagcggaagcaccagatgctaaagtgaggatggtgattatcactggaccaccagaggctcagttcaaggctcagggaagaatttatggaaaaattaaagaagaaaactttgttagtcctaaagaagaggtgaaacttgaagctcatatcagagtgccatcctttgctgctggcagagttattggaaaaggaggcaaaacggtgaatgaacttcagaatttgtcaagtgcagaagttgttgtccctcgtgaccagacacctgatgagaatgaccaagtggttgtcaaaataactggtcacttctatgcttgccaggttgcccagagaaaaattcaggaaattctgactcaggtaaagcagcaccaacaacagaaggctctgcaaagtggaccacctcagtcaagacggaagtaaaggctcaggaaacagcccaccacagaggcagatgccaaaccaaagacagattgcttaaccaacagatgggcgctgaccccctatccagaatcacatgcacaagtttttacctagccagttgtttctgaggaccaggcaacttttgaactcctgtctctgtgagaatgtatactttatgctctctgaaatgtatgacacccagctttaaaacaaacaaacaaacaaacaaaaaaagggtgggggagggagggaaagagaagagctctgcacttccctttgttgtagtctcacagtataacagatattctaattcttcttaatattcccccataatgccagaaattggcttaatgatgctttcactaaattcatcaaatagattgctcctaaatccaattgttaaaattggatcagaataattatcacaggaacttaaatgttaagccattagcatagaaaaactgttctcagttttatttttacctaacactaacatgagtaacctaagggaagtgctgaatggtgttggcaggggtattaaacgtgcatttttactcaactacctcaggtattcagtaatacaatgaaaagcaaaattgttccttttttttgaaaattttatatactttataatgatagaagtccaaccgttttttaaaaaataaatttaaaatttaacagcaatcagctaacaggcaaattaagatttttacttctggctggtgacagtaaagctggaaaattaatttcagggttttttgaggcttttgacacagttattagttaaatcaaatgttcaaaaatacggagcagtgcctagtatctggagagcagcactaccatttattctttcatttatagttgggaaagtttttgacggtactaacaaagtggtcgcaggagattttggaacggctggtttaaatggcttcaggagacttcagttttttgtttagctacatgattgaatgcataataaatgctttgtgcttctgactatcaatacctaaagaaagtgcatcagtgaagagatgcaagactttcaactgactggcaaaaagcaagctttagcttgtcttataggatgcttagtttgccactacacttcagaccaatgggacagtcatagatggtgtgacagtgtttaaacgcaacaaaaggctacatttccatggggccagcactgtcatgagcctcactaagctattttgaagatttttaagcactgataaattaaaaaaaaaaaattagactccaccttaagtagtaaagtataacaggatttctgtatactgtgcaatcagttctttgaaaaaaaagtcaaaagatagagaatacaagaaaagtttttgggatataatttgaatgactgtgaaaacatatgacctttgataacgaactcatttgctcactccttgacagcaaagcccagtacgtacaattgtgttgggtgtgggtggtctccaaggccacgctgctctctgaattgattttttgagttttgtttgtaagatgatcacagtcatgttacactgatctaaaggacatatatataaccctttaaaaaaaaaatcactgcctcattcttatttcaagatgaatttctatacagactagatgtttttctgaagatcaattagacattttgaaaatgatttaaagtgttttccttaatgttctctgaaaacaagtttcttttgtagttttaaccaaaaaagtgccctttttgtcactggattctcctagcattcatgatttttttttcatacaatgaattaaaattgctaaaatcatggactggctttctggttggatttcaggtaagatgtgtttaaggccagagcttttctcagtatttgatttttttccccaatatttgattttttaaaaatatacacataggtgctgcatttatatctgctggtttaaattctgtcatatttcacttctagccttttagtatggcaaatcatattttacttttacttaagcatttgtaatttggagtatctggtactagctaagaaataattctataattgagttttgtactcaccatatatggatcattcctcatgtataatgtgccccaaatgcagcttcattttccagataccttgacgcagaataaattttttcatcatttaggtgca

SEQ ID NO: 429059 - DNA, 861 bp, Homo sapiens
aagacttaggaagactggtggatgcgtttgggttgtagctaggctttttcttttctttctcttttaaaacacatctagacaaggaaaaaacaagcctcggatctgatttttcactcctcgttcttgtgcttggttcttactgtgtttgtgtattttaaaggcgagaagacgaggggaacaaaaccagctggatccatccatcaccgtgggtggttttaatttttcgttttttctcgttatttttttttaaacaaccactcttcacaatgaacaaactgtatatcggaaacctcagcgagaacgccgccccctcggacctagaaagtatcttcaaggacgccaagatcccggtgtcgggacccttcctggtgaagactggctacgcgttcgtggactgcccggacgagagctgggccctcaaggccatcgaggcgctttcaggtaaaatagaactgcacgggaaacccatagaagttgagcactcggtcccaaaaaggcaaaggattcggaaacttcagatacgaaatatcccgcctcatttacagtgggaggtgctggatagtttactagtccagtatggagtggtggagagctgtgagcaagtgaacactgactcggaaactgcagttgtaaatgtaacctattccagtaaggaccaagctagacagtaagcagcttgaagcttttaatctatatataataactaagttaagtacagtaacatattttgcggatttctcaactgagaagggctggtaggtggcagagagaaactttattttacaaaatttgaccctgtaatcgtgcctttctttttaagtttgaatgtctagtaaaaatctacattggttaaagttgtat

SEQ ID NO: 429060 - DNA, 4074 bp, Homo sapiens
gattcaacagacataaaattcttgtcagtctgctataaaaatttgtaaatgcttaatctccacttataagtttgtcttgtcatgatatggtctctatcttcatctcactctttttcttcccacagtcacccaaaatgacggtatgttcctaaaatactttcccgtggaaggtgtaagttcccctcttcctggccaaatgctcaaatgttttactcccatcacctcctttgttttgcataagtatcactttctataaaaattatcatttaatgatggaaatgaacttaactgcctttaccatcagcagtctctttttatccatgataaaatttgcagagtagtttaacaggcataactcaagctgtttatttcttcttagctttatatacttacggataggaagtcatgcagtacaagtgtgcaaaagttctgcaaagtatatgttacttttgctgatcacatacaggtgctggatagtttactagtccagtatggagtggtggagagctgtgagcaagtgaacactgactcggaaactgcagttgtaaatgtaacctattccagtaaggaccaagctagacaagcactagacaaactgaatggatttcagttagagaatttcaccttgaaagtagcctatatccctgatgaaatggccgcccagcaaaaccccttgcagcagccccgaggtcgccgggggcttgggcagaggggctcctcaaggcaggggtctccaggatccgtatccaagcagaaaccatgtgatttgcctctgcgcctgctggttcccacccaatttgttggagccatcataggaaaagaaggtgccaccattcggaacatcaccaaacagacccagtctaaaatcgatgtccaccgtaaagaaaatgcgggggctgctgagaagtcgattactatcctctctactcctgaaggcacctctgcggcttgtaagtctattctggagattatgcataaggaagctcaagatataaaattcacagaagagatccccttgaagattttagctcataataactttgttggacgtcttattggtaaagaaggaagaaatcttaaaaaaattgagcaagacacagacactaaaatcacgatatctccattgcaggaattgacgctgtataatccagaacgcactattacagttaaaggcaatgttgagacatgtgccaaagctgaggaggagatcatgaagaaaatcagggagtcttatgaaaatgatattgcttctatgaatcttcaagcacatttaattcctggattaaatctgaacgccttgggtctgttcccacccacttcagggatgccacctcccacctcagggcccccttcagccatgactcctccctacccgcagtttgagcaatcagaaacggagactgttcatctgtttatcccagctctatcagtcggtgccatcatcggcaagcagggccagcacatcaagcagctttctcgctttgctggagcttcaattaagattgctccagcggaagcaccagatgctaaagtgaggatggtgattatcactggaccaccagaggctcagttcaaggctcagggaagaatttatggaaaaattaaagaagaaaactttgttagtcctaaagaagaggtgaaacttgaagctcatatcagagtgccatcctttgctgctggcagagttattggaaaaggaggcaaaacggtgaatgaacttcagaatttgtcaagtgcagaagttgttgtccctcgtgaccagacacctgatgagaatgaccaagtggttgtcaaaataactggtcacttctatgcttgccaggttgcccagagaaaaattcaggaaattctgactcaggtaaagcagcaccaacaacagaaggctctgcaaagtggaccacctcagtcaagacggaagtaaaggctcaggaaacagcccaccacagaggcagatgccaaaccaaagacagattgcttaaccaacagatgggcgctgaccccctatccagaatcacatgcacaagtttttacctagccagttgtttctgaggaccaggcaacttttgaactcctgtctctgtgagaatgtatactttatgctctctgaaatgtatgacacccagctttaaaacaaacaaacaaacaaacaaaaaaagggtgggggagggagggaaagagaagagctctgcacttccctttgttgtagtctcacagtataacagatattctaattcttcttaatattcccccataatgccagaaattggcttaatgatgctttcactaaattcatcaaatagattgctcctaaatccaattgttaaaattggatcagaataattatcacaggaacttaaatgttaagccattagcatagaaaaactgttctcagttttatttttacctaacactaacatgagtaacctaagggaagtgctgaatggtgttggcaggggtattaaacgtgcatttttactcaactacctcaggtattcagtaatacaatgaaaagcaaaattgttccttttttttgaaaattttatatactttataatgatagaagtccaaccgttttttaaaaaataaatttaaaatttaacagcaatcagctaacaggcaaattaagatttttacttctggctggtgacagtaaagctggaaaattaatttcagggttttttgaggcttttgacacagttattagttaaatcaaatgttcaaaaatacggagcagtgcctagtatctggagagcagcactaccatttattctttcatttatagttgggaaagtttttgacggtactaacaaagtggtcgcaggagattttggaacggctggtttaaatggcttcaggagacttcagttttttgtttagctacatgattgaatgcataataaatgctttgtgcttctgactatcaatacctaaagaaagtgcatcagtgaagagatgcaagactttcaactgactggcaaaaagcaagctttagcttgtcttataggatgcttagtttgccactacacttcagaccaatgggacagtcatagatggtgtgacagtgtttaaacgcaacaaaaggctacatttccatggggccagcactgtcatgagcctcactaagctattttgaagatttttaagcactgataaattaaaaaaaaaaaattagactccaccttaagtagtaaagtataacaggatttctgtatactgtgcaatcagttctttgaaaaaaaagtcaaaagatagagaatacaagaaaagtttttgggatataatttgaatgactgtgaaaacatatgacctttgataacgaactcatttgctcactccttgacagcaaagcccagtacgtacaattgtgttgggtgtgggtggtctccaaggccacgctgctctctgaattgattttttgagttttgtttgtaagatgatcacagtcatgttacactgatctaaaggacatatatataaccctttaaaaaaaaaatcactgcctcattcttatttcaagatgaatttctatacagactagatgtttttctgaagatcaattagacattttgaaaatgatttaaagtgttttccttaatgttctctgaaaacaagtttcttttgtagttttaaccaaaaaagtgccctttttgtcactggattctcctagcattcatgatttttttttcatacaatgaattaaaattgctaaaatcatggactggctttctggttggatttcaggtaagatgtgtttaaggccagagcttttctcagtatttgatttttttccccaatatttgattttttaaaaatatacacataggtgctgcatttatatctgctggtttaaattctgtcatatttcacttctagccttttagtatggcaaatcatattttacttttacttaagcatttgtaatttggagtatctggtactagctaagaaataattctataattgagttttgtactcaccatatatggatcattcctcatgtataatgtgccccaaatgcagcttcattttccagataccttgacgcagaataaattttttcatcatttaggtgca

SEQ ID NO: 429061 - DNA, 3897 bp, Homo sapiens
aagacttaggaagactggtggatgcgtttgggttgtagctaggctttttcttttctttctcttttaaaacacatctagacaaggaaaaaacaagcctcggatctgatttttcactcctcgttcttgtgcttggttcttactgtgtttgtgtattttaaaggcgagaagacgaggggaacaaaaccagctggatccatccatcaccgtgggtggttttaatttttcgttttttctcgttatttttttttaaacaaccactcttcacaatgaacaaactgtatatcggaaacctcagcgagaacgccgccccctcggacctagaaagtatcttcaaggacgccaagatcccggtgtcgggacccttcctggtgaagactggctacgcgttcgtggactgcccggacgagagctgggccctcaaggccatcgaggcgctttcaggtaaaatagaactgcacgggaaacccatagaagttgagcactcggtcccaaaaaggcaaaggattcggaaacttcagatacgaaatatcccgcctcatttacagtgggaggtgctggatagtttactagtccagtatggagtggtggagagctgtgagcaagtgaacactgactcggaaactgcagttgtaaatgtaacctattccagtaaggaccaagctagacaagcactagacaaactgaatggatttcagttagagaatttcaccttgaaagtagcctatatccctgatgaaatggccgcccagcaaaaccccttgcagcagccccgaggtcgccgggggcttgggcagaggggctcctcaaggcaggggtctccaggatccgtatccaagcagaaaccatgtgatttgcctctgcgcctgctggttcccacccaatttgttggagccatcataggaaaagaaggtgccaccattcggaacatcaccaaacagacccagtctaaaatcgatgtccaccgtaaagaaaatgcgggggctgctgagaagtcgattactatcctctctactcctgaaggcacctctgcggcttgtaagtctattctggagattatgcataaggaagctcaagatataaaattcacagaagagatccccttgaagattttagctcataataactttgttggacgtcttattggtaaagaaggaagaaatcttaaaaaaattgagcaagacacagacactaaaatcacgatatctcccaatcagaaacggagactgttcatctgtttatcccagctctatcagtcggtgccatcatcggcaagcagggccagcacatcaagcagctttctcgctttgctggagcttcaattaagattgctccagcggaagcaccagatgctaaagtgaggatggtgattatcactggaccaccagaggctcagttcaaggctcagggaagaatttatggaaaaattaaagaagaaaactttgttagtcctaaagaagaggtgaaacttgaagctcatatcagagtgccatcctttgctgctggcagagttattggaaaaggaggcaaaacggtgaatgaacttcagaatttgtcaagtgcagaagttgttgtccctcgtgaccagacacctgatgagaatgaccaagtggttgtcaaaataactggtcacttctatgcttgccaggttgcccagagaaaaattcaggaaattctgactcaggtaaagcagcaccaacaacagaaggctctgcaaagtggaccacctcagtcaagacggaagtaaaggctcaggaaacagcccaccacagaggcagatgccaaaccaaagacagattgcttaaccaacagatgggcgctgaccccctatccagaatcacatgcacaagtttttacctagccagttgtttctgaggaccaggcaacttttgaactcctgtctctgtgagaatgtatactttatgctctctgaaatgtatgacacccagctttaaaacaaacaaacaaacaaacaaaaaaagggtgggggagggagggaaagagaagagctctgcacttccctttgttgtagtctcacagtataacagatattctaattcttcttaatattcccccataatgccagaaattggcttaatgatgctttcactaaattcatcaaatagattgctcctaaatccaattgttaaaattggatcagaataattatcacaggaacttaaatgttaagccattagcatagaaaaactgttctcagttttatttttacctaacactaacatgagtaacctaagggaagtgctgaatggtgttggcaggggtattaaacgtgcatttttactcaactacctcaggtattcagtaatacaatgaaaagcaaaattgttccttttttttgaaaattttatatactttataatgatagaagtccaaccgttttttaaaaaataaatttaaaatttaacagcaatcagctaacaggcaaattaagatttttacttctggctggtgacagtaaagctggaaaattaatttcagggttttttgaggcttttgacacagttattagttaaatcaaatgttcaaaaatacggagcagtgcctagtatctggagagcagcactaccatttattctttcatttatagttgggaaagtttttgacggtactaacaaagtggtcgcaggagattttggaacggctggtttaaatggcttcaggagacttcagttttttgtttagctacatgattgaatgcataataaatgctttgtgcttctgactatcaatacctaaagaaagtgcatcagtgaagagatgcaagactttcaactgactggcaaaaagcaagctttagcttgtcttataggatgcttagtttgccactacacttcagaccaatgggacagtcatagatggtgtgacagtgtttaaacgcaacaaaaggctacatttccatggggccagcactgtcatgagcctcactaagctattttgaagatttttaagcactgataaattaaaaaaaaaaaattagactccaccttaagtagtaaagtataacaggatttctgtatactgtgcaatcagttctttgaaaaaaaagtcaaaagatagagaatacaagaaaagtttttgggatataatttgaatgactgtgaaaacatatgacctttgataacgaactcatttgctcactccttgacagcaaagcccagtacgtacaattgtgttgggtgtgggtggtctccaaggccacgctgctctctgaattgattttttgagttttgtttgtaagatgatcacagtcatgttacactgatctaaaggacatatatataaccctttaaaaaaaaaatcactgcctcattcttatttcaagatgaatttctatacagactagatgtttttctgaagatcaattagacattttgaaaatgatttaaagtgttttccttaatgttctctgaaaacaagtttcttttgtagttttaaccaaaaaagtgccctttttgtcactggattctcctagcattcatgatttttttttcatacaatgaattaaaattgctaaaatcatggactggctttctggttggatttcaggtaagatgtgtttaaggccagagcttttctcagtatttgatttttttccccaatatttgattttttaaaaatatacacataggtgctgcatttatatctgctggtttaaattctgtcatatttcacttctagccttttagtatggcaaatcatattttacttttacttaagcatttgtaatttggagtatctggtactagctaagaaataattctataattgagttttgtactcaccatatatggatcattcctcatgtataatgtgccccaaatgcagcttcattttccagataccttgacgcagaataaattttttcatcatttaggtgca

SEQ ID NO: 429062 - DNA, 3895 bp, Homo sapiens
aagacttaggaagactggtggatgcgtttgggttgtagctaggctttttcttttctttctcttttaaaacacatctagacaaggaaaaaacaagcctcggatctgatttttcactcctcgttcttgtgcttggttcttactgtgtttgtgtattttaaaggcgagaagacgaggggaacaaaaccagctggatccatccatcaccgtgggtggttttaatttttcgttttttctcgttatttttttttaaacaaccactcttcacaatgaacaaactgtatatcggaaacctcagcgagaacgccgccccctcggacctagaaagtatcttcaaggacgccaagatcccggtgtcgggacccttcctggtgaagactggctacgcgttcgtggactgcccggacgagagctgggccctcaaggccatcgaggcgctttcaggtaaaatagaactgcacgggaaacccatagaagttgagcactcggtcccaaaaaggcaaaggattcggaaacttcagatacgaaatatcccgcctcatttacagtgggaggtgctggatagtttactagtccagtatggagtggtggagagctgtgagcaagtgaacactgactcggaaactgcagttgtaaatgtaacctattccagtaaggaccaagctagacaagcactagacaaactgaatggatttcagttagagaatttcaccttgaaagtagcctatatccctgatgaaatggccgcccagcaaaaccccttgcagcagccccgaggtcgccgggggcttgggcagaggggctcctcaaggcaggggtctccaggatccgtatccaagcagaaaccatgtgatttgcctctgcgcctgctggttcccacccaatttgttggagccatcataggaaaagaaggtgccaccattcggaacatcaccaaacagacccagtctaaaatcgatgtccaccgtaaagaaaatgcgggggctgctgagaagtcgattactatcctctctactcctgaaggcacctctgcggcttgtaagtctattctggagattatgcataaggaagctcaagatataaaattcacagaagagatccccttgaagattttagctcataataactttgttggacgtcttattggtaaagaaggaagaaatcttaaaaaaattgagcaagacacagacactaaaatcacgatatctccattgcaggaattgacgctgtataatccagaacgcactattacagttaaaggcaatgttgagacatgtgccaaagctgaggaggagatcatgaagaaaatcagggagtcttatgaaaatgatattgcttctatgaatcttcaagcacatttaattcctggattaaatctgaacgccttgggtctgttcccacccacttcagggatgccacctcccacctcagggcccccttcagccatgactcctccctacccgcagtttgagcaatcagaaacggagactgttcatctgtttatcccagctctatcagtcggtgccatcatcggcaagcagggccagcacatcaagcagctttctcgctttgctggagcttcaattaagattgctccagcggaagcaccagatgctaaagtgaggatggtgattatcactggaccaccagaggctcagttcaagcaggaaattctgactcaggtaaagcagcaccaacaacagaaggctctgcaaagtggaccacctcagtcaagacggaagtaaaggctcaggaaacagcccaccacagaggcagatgccaaaccaaagacagattgcttaaccaacagatgggcgctgaccccctatccagaatcacatgcacaagtttttacctagccagttgtttctgaggaccaggcaacttttgaactcctgtctctgtgagaatgtatactttatgctctctgaaatgtatgacacccagctttaaaacaaacaaacaaacaaacaaaaaaagggtgggggagggagggaaagagaagagctctgcacttccctttgttgtagtctcacagtataacagatattctaattcttcttaatattcccccataatgccagaaattggcttaatgatgctttcactaaattcatcaaatagattgctcctaaatccaattgttaaaattggatcagaataattatcacaggaacttaaatgttaagccattagcatagaaaaactgttctcagttttatttttacctaacactaacatgagtaacctaagggaagtgctgaatggtgttggcaggggtattaaacgtgcatttttactcaactacctcaggtattcagtaatacaatgaaaagcaaaattgttccttttttttgaaaattttatatactttataatgatagaagtccaaccgttttttaaaaaataaatttaaaatttaacagcaatcagctaacaggcaaattaagatttttacttctggctggtgacagtaaagctggaaaattaatttcagggttttttgaggcttttgacacagttattagttaaatcaaatgttcaaaaatacggagcagtgcctagtatctggagagcagcactaccatttattctttcatttatagttgggaaagtttttgacggtactaacaaagtggtcgcaggagattttggaacggctggtttaaatggcttcaggagacttcagttttttgtttagctacatgattgaatgcataataaatgctttgtgcttctgactatcaatacctaaagaaagtgcatcagtgaagagatgcaagactttcaactgactggcaaaaagcaagctttagcttgtcttataggatgcttagtttgccactacacttcagaccaatgggacagtcatagatggtgtgacagtgtttaaacgcaacaaaaggctacatttccatggggccagcactgtcatgagcctcactaagctattttgaagatttttaagcactgataaattaaaaaaaaaaaattagactccaccttaagtagtaaagtataacaggatttctgtatactgtgcaatcagttctttgaaaaaaaagtcaaaagatagagaatacaagaaaagtttttgggatataatttgaatgactgtgaaaacatatgacctttgataacgaactcatttgctcactccttgacagcaaagcccagtacgtacaattgtgttgggtgtgggtggtctccaaggccacgctgctctctgaattgattttttgagttttgtttgtaagatgatcacagtcatgttacactgatctaaaggacatatatataaccctttaaaaaaaaaatcactgcctcattcttatttcaagatgaatttctatacagactagatgtttttctgaagatcaattagacattttgaaaatgatttaaagtgttttccttaatgttctctgaaaacaagtttcttttgtagttttaaccaaaaaagtgccctttttgtcactggattctcctagcattcatgatttttttttcatacaatgaattaaaattgctaaaatcatggactggctttctggttggatttcaggtaagatgtgtttaaggccagagcttttctcagtatttgatttttttccccaatatttgattttttaaaaatatacacataggtgctgcatttatatctgctggtttaaattctgtcatatttcacttctagccttttagtatggcaaatcatattttacttttacttaagcatttgtaatttggagtatctggtactagctaagaaataattctataattgagttttgtactcaccatatatggatcattcctcatgtataatgtgccccaaatgcagcttcattttccagataccttgacgcagaataaattttttcatcatttaggtgca

SEQ ID NO: 429063 - DNA, 2326 bp, Homo sapiens
aagacttaggaagactggtggatgcgtttgggttgtagctaggctttttcttttctttctcttttaaaacacatctagacaaggaaaaaacaagcctcggatctgatttttcactcctcgttcttgtgcttggttcttactgtgtttgtgtattttaaaggcgagaagacgaggggaacaaaaccagctggatccatccatcaccgtgggtggttttaatttttcgttttttctcgttatttttttttaaacaaccactcttcacaatgaacaaactgtatatcggaaacctcagcgagaacgccgccccctcggacctagaaagtatcttcaaggacgccaagatcccggtgtcgggacccttcctggtgaagactggctacgcgttcgtggactgcccggacgagagctgggccctcaaggccatcgaggcgctttcaggtaaaatagaactgcacgggaaacccatagaagttgagcactcggtcccaaaaaggcaaaggattcggaaacttcagatacgaaatatcccgcctcatttacagtgggaggtgctggatagtttactagtccagtatggagtggtggagagctgtgagcaagtgaacactgactcggaaactgcagttgtaaatgtaacctattccagtaaggaccaagctagacaagcactagacaaactgaatggatttcagttagagaatttcaccttgaaagtagcctatatccctgatgaaatggccgcccagcaaaaccccttgcagcagccccgaggtcgccgggggcttgggcagaggggctcctcaaggcaggggtctccaggatccgtatccaagcagaaaccatgtgatttgcctctgcgcctgctggttcccacccaatttgttggagccatcataggaaaagaaggtgccaccattcggaacatcaccaaacagacccagtctaaaatcgatgtccaccgtaaagaaaatgcgggggctgctgagaagtcgattactatcctctctactcctgaaggcacctctgcggcttgtaagtctattctggagattatgcataaggaagctcaagatataaaattcacagaagagatccccttgaagattttagctcataataactttgttggacgtcttattggtaaagaaggaagaaatcttaaaaaaattgagcaagacacagacactaaaatcacgatatctccattgcaggaattgacgctgtataatccagaacgcactattacagttaaaggcaatgttgagacatgtgccaaagctgaggaggagatcatgaagaaaatcagggagtcttatgaaaatgatattgcttctatgaatcttcaagcacatttaattcctggattaaatctgaacgccttgggtctgttcccacccacttcagggatgccacctcccacctcagggcccccttcagccatgactcctccctacccgcagtttgagcaatcagaaacggagactgttcatctgtttatcccagctctatcagtcggtgccatcatcggcaagcagggccagcacatcaagcagctttctcgctttgctggagcttcaattaagattgctccagcggaagcaccagatgctaaagtgaggatggtgattatcactggaccaccagaggctcagttcaaggctcagggaagaatttatggaaaaattaaagaagaaaactttgttagtcctaaagaagaggtgaaacttgaagctcatatcagagtgccatcctttgctgctggcagagttattggaaaaggaggcaaaacggtgaatgaacttcagaatttgtcaagtgcagaagttgttgtccctcgtgaccagacacctgatgagaatgaccaagtggttgtcaaaataactggtcacttctatgcttgccaggttgcccagagaaaaattcaggaaattctgactcaggtaaagcagcaccaacaacagaaggctctgcaaagtggaccacctcagtcaagacggaagtaaaggctcaggaaacagcccaccacagaggcagatgccaaaccaaagacagattgcttaaccaacagatgggcgctgaccccctatccagaatcacatgcacaagtttttacctagccagttgtttctgaggaccaggcaacttttgaactcctgtctctgtgagaatgtatactttatgctctctgaaatgtatgacacccagctttaaaacaaacaaacaaacaaacaaaaaaagggtgggggagggagggaaagtactcactctctctccacttttgttatttttccctacccccctctccttcatcattttcttatct

SEQ ID NO: 429064 - DNA, 327 bp, Homo sapiens
gaatgaacttcagaatttgtcaagtgcagaagttgttgtccctcgtgaccagacacctgatgagaatgaccaagtggttgtcaaaataactggtcacttctatgcttgccaggcaagtgggctctaaaataagctattgtatctttctcacgtggaagcaattctcccacaggtgctcctacctgatagaattagttaaggttgtttgatgcttaagacttttcatctcccttttagcgggtgatttcagagactactagcaaactgactagtatgtatctttaatcatcaaatggatttctatttgaaattgttgaaatgaaggag

SEQ ID NO: 429065 - DNA, 739 bp, Homo sapiens
aagacttaggaagactggtggatgcgtttgggttgtagctaggctttttcttttctttctcttttaaaacacatctagacaaggaaaaaacaagcctcggatctgatttttcactcctcgttcttgtgcttggttcttactgtgtttgtgtattttaaaggcgagaagacgaggggaacaaaaccagctggatccatccatcaccgtgggtggttttaatttttcgttttttctcgttatttttttttaaacaaccactcttcacaatgaacaaactgtatatcggaaacctcagcgagaacgccgccccctcggacctagaaagtatcttcaaggacgccaagatcccggtgtcgggacccttcctggtgaagactggctacgcgttcgtggactgcccggacgagagctgggccctcaaggccatcgaggcgctttcaggtaaaatagaactgcacgggaaacccatagaagttgagcactcggtcccaaaaaggcaaaggattcggaaacttcagatacgaaatatcccgcctcatttacagtgggaggaaatggggcagccttgaggtcagacttggaattatgtcctagctccactactttctcattgtgtgatctagttatgggatctctgaacagacagggacctgcggatgcggtgatgccgactgacggacgggacctgcggatgcagtgatgccgactgacggagggggacctgcggatgcggtgatgc

SEQ ID NO: 429066 - DNA, 4318 bp, Homo sapiens
aagacttaggaagactggtggatgcgtttgggttgtagctaggctttttcttttctttctcttttaaaacacatctagacaaggaaaaaacaagcctcggatctgatttttcactcctcgttcttgtgcttggttcttactgtgtttgtgtattttaaaggcgagaagacgaggggaacaaaaccagctggatccatccatcaccgtgggtggttttaatttttcgttttttctcgttatttttttttaaacaaccactcttcacaatgaacaaactgtatatcggaaacctcagcgagaacgccgccccctcggacctagaaagtatcttcaaggacgccaagatcccggtgtcgggacccttcctggtgaagactggctacgcgttcgtggactgcccggacgagagctgggccctcaaggccatcgaggcgctttcaggtaaaatagaactgcacgggaaacccatagaagttgagcactcggtcccaaaaaggcaaaggattcggaaacttcagatacgaaatatcccgcctcatttacagtgggaggtgctggatagtttactagtccagtatggagtggtggagagctgtgagcaagtgaacactgactcggaaactgcagttgtaaatgtaacctattccagtaaggaccaagctagacaagcactagacaaactgaatggatttcagttagagaatttcaccttgaaagtagcctatatccctgatgaaatggccgcccagcaaaaccccttgcagcagccccgaggtcgccgggggcttgggcagaggggctcctcaaggcaggggtctccaggatccgtatccaagcagaaaccatgtgatttgcctctgcgcctgctggttcccacccaatttgttggagccatcataggaaaagaaggtgccaccattcggaacatcaccaaacagacccagtctaaaatcgatgtccaccgtaaagaaaatgcgggggctgctgagaagtcgattactatcctctctactcctgaaggcacctctgcggcttgtaagtctattctggagattatgcataaggaagctcaagatataaaattcacagaagagatccccttgaagattttagctcataataactttgttggacgtcttattggtaaagaaggaagaaatcttaaaaaaattgagcaagacacagacactaaaatcacgatatctccattgcaggaattgacgctgtataatccagaacgcactattacagttaaaggcaatgttgagacatgtgccaaagctgaggaggagatcatgaagaaaatcagggagtcttatgaaaatgatattgcttctatgaatcttcaagcacatttaattcctggattaaatctgaacgccttgggtctgttcccacccacttcagggatgccacctcccacctcagggcccccttcagccatgactcctccctacccgcagtttgagcaatcagaaacggagactgttcatctgtttatcccagctctatcagtcggtgccatcatcggcaagcagggccagcacatcaagcagctttctcgctttgctggagcttcaattaagattgctccagcggaagcaccagatgctaaagtgaggatggtgattatcactggaccaccagaggctcagttcaaggctcagggaagaatttatggaaaaattaaagaagaaaactttgttagtcctaaagaagaggtgaaacttgaagctcatatcagagtgccatcctttgctgctggcagagttattggaaaaggaggcaaaacggtgaatgaacttcagaatttgtcaagtgcagaagttgttgtccctcgtgaccagacacctgatgagaatgaccaagtggttgtcaaaataactggtcacttctatgcttgccaggttgcccagagaaaaattcaggaaattctgactcaggtaaagcagcaccaacaacagaaggctctgcaaagtggaccacctcagtcaagacggaagtaaaggctcaggaaacagcccaccacagaggcagatgccaaaccaaagacagattgcttaaccaacagatgggcgctgaccccctatccagaatcacatgcacaagtttttacctagccagttgtttctgaggaccaggcaacttttgaactcctgtctctgtgagaatgtatactttatgctctctgaaatgtatgacacccagctttaaaacaaacaaacaaacaaacaaaaaaagggtgggggagggagggaaagagaagagctctgcacttccctttgttgtagtctcacagtataacagatattctaattcttcttaatattcccccataatgccagaaattggcttaatgatgctttcactaaattcatcaaatagattgctcctaaatccaattgttaaaattggatcagaataattatcacaggaacttaaatgttaagccattagcatagaaaaactgttctcagttttatttttacctaacactaacatgagtaacctaagggaagtgctgaatggtgttggcaggggtattaaacgtgcatttttactcaactacctcaggtattcagtaatacaatgaaaagcaaaattgttccttttttttgaaaattttatatactttataatgatagaagtccaaccgttttttaaaaaataaatttaaaatttaacagcaatcagctaacaggcaaattaagatttttacttctggctggtgacagtaaagctggaaaattaatttcagggttttttgaggcttttgacacagttattagttaaatcaaatgttcaaaaatacggagcagtgcctagtatctggagagcagcactaccatttattctttcatttatagttgggaaagtttttgacggtactaacaaagtggtcgcaggagattttggaacggctggtttaaatggcttcaggagacttcagttttttgtttagctacatgattgaatgcataataaatgctttgtgcttctgactatcaatacctaaagaaagtgcatcagtgaagagatgcaagactttcaactgactggcaaaaagcaagctttagcttgtcttataggatgcttagtttgccactacacttcagaccaatgggacagtcatagatggtgtgacagtgtttaaacgcaacaaaaggctacatttccatggggccagcactgtcatgagcctcactaagctattttgaagatttttaagcactgataaattaaaaaaaaaaaattagactccaccttaagtagtaaagtataacaggatttctgtatactgtgcaatcagttctttgaaaaaaaagtcaaaagatagagaatacaagaaaagtttttgggatataatttgaatgactgtgaaaacatatgacctttgataacgaactcatttgctcactccttgacagcaaagcccagtacgtacaattgtgttgggtgtgggtggtctccaaggccacgctgctctctgaattgattttttgagttttgtttgtaagatgatcacagtcatgttacactgatctaaaggacatatatataaccctttaaaaaaaaaatcactgcctcattcttatttcaagatgaatttctatacagactagatgtttttctgaagatcaattagacattttgaaaatgatttaaagtgttttccttaatgttctctgaaaacaagtttcttttgtagttttaaccaaaaaagtgccctttttgtcactggattctcctagcattcatgatttttttttcatacaatgaattaaaattgctaaaatcatggactggctttctggttggatttcaggtaagatgtgtttaaggccagagcttttctcagtatttgatttttttccccaatatttgattttttaaaaatatacacataggtgctgcatttatatctgctggtttaaattctgtcatatttcacttctagccttttagtatggcaaatcatattttacttttacttaagcatttgtaatttggagtatctggtactagctaagaaataattctataattgagttttgtactcaccatatatggatcattcctcatgtataatgtgccccaaatgcagcttcattttccagataccttgacgcagaataaattttttcatcatttaggtgcagcttgttgtgtagtatgttttatttttggttttcaattgaatgggaatgttctgaattttttttcaaactctacgcagatttctgttataccatgtccagccatggtacttaatgtgaaccttgataatactcttgcatatgaactaagaactagagcg

SEQ ID NO: 429067 - DNA, 3227 bp, Homo sapiens
tacagactccactgtgaatacacgcttactgctctcgttttcctctctgcttgcgcccactatcagaatcgatgtccaccgtaaagaaaatgcgggggctgctgagaagtcgattactatcctctctactcctgaaggcacctctgcggcttcacagaagagatccccttgaagattttagctcataataactttgttggacgtcttattggtaaagaaggaagaaatcttaaaaaaattgagcaagacacagacactaaaatcacgatatctccattgcaggaattgacgctgtataatccagaacgcactattacagttaaaggcaatgttgagacatgtgccaaagctgaggaggagatcatgaagaaaatcagggagtcttatgaaaatgatattgcttctatgaatcttcaagcacatttaattcctggattaaatctgaacgccttgggtctgttcccacccacttcagggatgccacctcccacctcagggcccccttcagccatgactcctccctacccgcagtttgagcaatcagaaacggagactgttcatctgtttatcccagctctatcagtcggtgccatcatcggcaagcagggccagcacatcaagcagctttctcgctttgctggagcttcaattaagattgctccagcggaagcaccagatgctaaagtgaggatggtgattatcactggaccaccagaggctcagttcaaggctcagggaagaatttatggaaaaattaaagaagaaaactttgttagtcctaaagaagaggtgaaacttgaagctcatatcagagtgccatcctttgctgctggcagagttattggaaaaggaggcaaaacggtgaatgaacttcagaatttgtcaagtgcagaagttgttgtccctcgtgaccagacacctgatgagaatgaccaagtggttgtcaaaataactggtcacttctatgcttgccaggttgcccagagaaaaattcaggaaattctgactcaggtaaagcagcaccaacaacagaaggctctgcaaagtggaccacctcagtcaagacggaagtaaaggctcaggaaacagcccaccacagaggcagatgccaaaccaaagacagattgcttaaccaacagatgggcgctgaccccctatccagaatcacatgcacaagtttttacctagccagttgtttctgaggaccaggcaacttttgaactcctgtctctgtgagaatgtatactttatgctctctgaaatgtatgacacccagctttaaaacaaacaaacaaacaaacaaaaaaagggtgggggagggagggaaagagaagagctctgcacttccctttgttgtagtctcacagtataacagatattctaattcttcttaatattcccccataatgccagaaattggcttaatgatgctttcactaaattcatcaaatagattgctcctaaatccaattgttaaaattggatcagaataattatcacaggaacttaaatgttaagccattagcatagaaaaactgttctcagttttatttttacctaacactaacatgagtaacctaagggaagtgctgaatggtgttggcaggggtattaaacgtgcatttttactcaactacctcaggtattcagtaatacaatgaaaagcaaaattgttccttttttttgaaaattttatatactttataatgatagaagtccaaccgttttttaaaaaataaatttaaaatttaacagcaatcagctaacaggcaaattaagatttttacttctggctggtgacagtaaagctggaaaattaatttcagggttttttgaggcttttgacacagttattagttaaatcaaatgttcaaaaatacggagcagtgcctagtatctggagagcagcactaccatttattctttcatttatagttgggaaagtttttgacggtactaacaaagtggtcgcaggagattttggaacggctggtttaaatggcttcaggagacttcagttttttgtttagctacatgattgaatgcataataaatgctttgtgcttctgactatcaatacctaaagaaagtgcatcagtgaagagatgcaagactttcaactgactggcaaaaagcaagctttagcttgtcttataggatgcttagtttgccactacacttcagaccaatgggacagtcatagatggtgtgacagtgtttaaacgcaacaaaaggctacatttccatggggccagcactgtcatgagcctcactaagctattttgaagatttttaagcactgataaattaaaaaaaaaaaattagactccaccttaagtagtaaagtataacaggatttctgtatactgtgcaatcagttctttgaaaaaaaagtcaaaagatagagaatacaagaaaagtttttgggatataatttgaatgactgtgaaaacatatgacctttgataacgaactcatttgctcactccttgacagcaaagcccagtacgtacaattgtgttgggtgtgggtggtctccaaggccacgctgctctctgaattgattttttgagttttgtttgtaagatgatcacagtcatgttacactgatctaaaggacatatatataaccctttaaaaaaaaaatcactgcctcattcttatttcaagatgaatttctatacagactagatgtttttctgaagatcaattagacattttgaaaatgatttaaagtgttttccttaatgttctctgaaaacaagtttcttttgtagttttaaccaaaaaagtgccctttttgtcactggattctcctagcattcatgatttttttttcatacaatgaattaaaattgctaaaatcatggactggctttctggttggatttcaggtaagatgtgtttaaggccagagcttttctcagtatttgatttttttccccaatatttgattttttaaaaatatacacataggtgctgcatttatatctgctggtttaaattctgtcatatttcacttctagccttttagtatggcaaatcatattttacttttacttaagcatttgtaatttggagtatctggtactagctaagaaataattctataattgagttttgtactcaccatatatggatcattcctcatgtataatgtgccccaaatgcagcttcattttccagataccttgacgcagaataaattttttcatcatttaggtgca

SEQ ID NO: 429068 - DNA, 4008 bp, Homo sapiens
aagacttaggaagactggtggatgcgtttgggttgtagctaggctttttcttttctttctcttttaaaacacatctagacaaggaaaaaacaagcctcggatctgatttttcactcctcgttcttgtgcttggttcttactgtgtttgtgtattttaaaggcgagaagacgaggggaacaaaaccagctggatccatccatcaccgtgggtggttttaatttttcgttttttctcgttatttttttttaaacaaccactcttcacaatgaacaaactgtatatcggaaacctcagcgagaacgccgccccctcggacctagaaagtatcttcaaggacgccaagatcccggtgtcgggacccttcctggtgaagactggctacgcgttcgtggactgcccggacgagagctgggccctcaaggccatcgaggcgctttcaggtaaaatagaactgcacgggaaacccatagaagttgagcactcggtcccaaaaaggcaaaggattcggaaacttcagatacgaaatatcccgcctcatttacagtgggaggtgctggatagtttactagtccagtatggagtggtggagagctgtgagcaagtgaacactgactcggaaactgcagttgtaaatgtaacctattccagtaaggaccaagctagacaagcactagacaaactgaatggatttcagttagagaatttcaccttgaaagtagcctatatccctgatgaaatggccgcccagcaaaaccccttgcagcagccccgaggtcgccgggggcttgggcagaggggctcctcaaggcaggggtctccaggatccgtatccaagcagaaaccatgtgatttgcctctgcgcctgctggttcccacccaatttgttggagccatcataggaaaagaaggtgccaccattcggaacatcaccaaacagacccagtctaaaatcgatgtccaccgtaaagaaaatgcgggggctgctgagaagtcgattactatcctctctactcctgaaggcacctctgcggcttgtaagtctattctggagattatgcataaggaagctcaagatataaaattcacagaagagatccccttgaagattttagctcataataactttgttggacgtcttattggtaaagaaggaagaaatcttaaaaaaattgagcaagacacagacactaaaatcacgatatctccattgcaggaattgacgctgtataatccagaacgcactattacagttaaaggcaatgttgagacatgtgccaaagctgaggaggagatcatgaagaaaatcagggagtcttatgaaaatgatattgcttctatgaatcttcaagcacatttaattcctggattaaatctgaacgccttgggtctgttcccacccacttcagggatgccacctcccacctcagggcccccttcagccatgactcctccctacccgcagtttgagcaatcagaaacggagactgttcatctgtttatcccagctctatcagtcggtgccatcatcggcaagcagggccagcacatcaagcagctttctcgctttgctggagcttcaattaagattgctccagcggaagcaccagatgctaaagtgaggatggtgattatcactggaccaccagaggctcagttcaaggctcagggaagaatttatggaaaaattaaagaagaaaactttgttagtcctaaagaagaggtgaaacttgaagctcatatcagagtgccatcctttgctgctggcagagttattggaaaaggaggcaaaacggtgaatgaacttcagaatttgtcaagtgcagaagttgttgtccctcgtgaccagacacctgatgagaatgaccaagtggttgtcaaaataactggtcacttctatgcttgccaggttgcccagagaaaaattcaggaaattctgactcaggtaaagcagcaccaacaacagaaggctctgcaaagtggaccacctcagtcaagacggaagtaaaggctcaggaaacagcccaccacagaggcagatgccaaaccaaagacagattgcttaaccaacagatgggcgctgaccccctatccagaatcacatgcacaagtttttacctagccagttgtttctgaggaccaggcaacttttgaactcctgtctctgtgagaatgtatactttatgctctctgaaatgtatgacacccagctttaaaacaaacaaacaaacaaacaaaaaaagggtgggggagggagggaaagagaagagctctgcacttccctttgttgtagtctcacagtataacagatattctaattcttcttaatattcccccataatgccagaaattggcttaatgatgctttcactaaattcatcaaatagattgctcctaaatccaattgttaaaattggatcagaataattatcacaggaacttaaatgttaagccattagcatagaaaaactgttctcagttttcattattttaccatcaaccactcaaccatgcagtcacaccctcacagggcaagtagctgcacatggatgctctgcgccagcgggctcatatcaacacgctgaccaattattacccactcccaacctcaccactaaagagttaattcccaggtcacatcacccacactagcacaacagcccaacacatatgctcgccaccttacactctctctcccacaaacaccccccagactccatccacctcgtagccatccaccactcgggcactcaaggcaaacgtacgcaacaaccaggcagcaaacacgacacacaacagatccagacatccaccaaaaccacaatcagccacaacccaggcccacaactccccagaccctcactacccagccgacccagacctgtcacaacaacacaacctcaccaaccacacagatacacccatcggcgacccatggccgaaccgcaacccaacgcacacaacccacagcccaccgcgacacccaccactcacgacacacataaaacaacaaggccgggacacaccacacacacacccggcaaccacgccctacacacacagcaacccacacgaacagcacacaaaattaacacgactacaccaacaaacactccacacaacacccacgcctacaaccaacacacaacaacacgatcaccaccgagcggcaacacagcaccacacagccaccccgaacccccaacacaaagactgacaaatacacacgttcgaggaacacacaactcagcaccacagaggaaccacacagctacaagcacacgcacatcaacgacacacgatccagccctacatcaaccacagctcatacagaacactaaacatgacaatacgggcagccacacacacagagctccaaaagcacgacaaaccgcacggaaccaatgcgaagacgacagacacaaggaacgagagaacaccgaacacagcagaacaagaaaagcctcatcacctgcgccaacagcacaccgaagagccacaaagcgagacctcatcaccatcaaacaacgacaaacacgaacaccactagccagacaccagacacccaaccaccacggcaatcatatcgcaacacagcacatcacacacagcacgacagcacgcaactgaacacactcacggacaacaactccggcacaataacacagtaacacacacggacctaactgaggacagcacaaataccaactactgcaaccaacctaaccacaacagaacacaactacaatacagccaacacaagcgacggacacacatcacgagctgcgacacacacacacaccacacttgcgcaacacgaagacacaccacagacgccgcgacaccgctggcgtacacacacaaccacgcccaacacacgcaacctcaaccaaaacagcaaacaccaacacaaagacaagagacaacaacaacagtgcaaccacaccacaaacaaacacaaacaacacacaggcacataacacgaagacaaacacactcacgtgacacac

SEQ ID NO: 429069 - DNA, 490 bp, Homo sapiens
  misc_feature (408)..(408): n is a, c, g, or t
  misc_feature (428)..(428): n is a, c, g, or t
  misc_feature (469)..(469): n is a, c, g, or t
  misc_feature (481)..(481): n is a, c, g, or t
gggagaggagggggaggggaggggagaggaattgaggagcagaacagaataacacagaaagaaccaaccagagctggaccaaaaatcgaggccaggatgttgtagagtcttgggttcaaattctgcctcctcctgggaagtcccctgagcctgctacaaggtcttggcttgcaccctattgcctctggcagatcctccaaccagcaccaatgaagcacctaccccatgcagggtccttcagaaacaaagagtgagatagcttccagtctcaggtggggaatatttagacttgtgaacaggggcaaagaaggagaggatgttcctgttccttccccaccaccaagaccttatttcccgcatttcggacctgaggccacggttttgcccagggtttaaggggccacggcnaaggaaggttggccgaacgnggtttgaacccaacgccttgggcccaacgttggggacgacntggccccaacgngttgttccg

SEQ ID NO: 429070 - DNA, 1759 bp, Homo sapiens
gggagaggagggggaggggaggggagaggaattgaggagcagaacagaataacacagaaagaaccaaccagagctggaccaaaaatcgaggccaggatgttgtagagtcttgggttcaaattctgcctcctcctgggaagtcccctgagcctgctacaaggtcttggcttgcaccctattgcctctggcagatcctccaaccagcaccaatgaagcacctaccccatgcagggtccttcagaaacaaagagtgagatagcttccagtctcaggtggggaatatttagacttgtgaacaggggcaaagaaggagagaaacaaccaggaagtaacctccaatttgcagatggggaaaattaagtttcatcaggaggaaatgactttgcctcaggcttctcttgggatcccagatttctagaggatggggggaatgtccctgctttgggcatgtttttaagagcactggaacagccagagctgctgcccacagtctgaagtcaggaggggaactccatgtcagataaaagctttggaatccagatggagtaaggtttcattttctctgcctgcatttggtttcctaacatcacaatgtgagccttggctagcagccagcttagctttggaaaagagtgaatgatggggaaaaaaaaaaaaaaagactgtgccaggaagggaggggaggagaggggctacactaggctggaggggatatgggcctggctttagaggattatgctaggaaaaggggtgccagaggttgaaagctgataggaacaagccctgtggatcaagaggcccatcagtgagcctgcagggtctatgaactccttacatgcaaaattacatgtgtctgtctgtgtaggtctctacagattggtggaagtgttcacagctttcatgagattattatttttttttttttaagaaaggcacactgccgcatgcaacacctcatttggatgtgtctggagtcttggaagttttgactaccctacattctcctacaaatggaccttgagagcttgtttggaggttctagcaggggagcgcactacttcgtatacccttgaccaaagaacagtcctcctctattggggaaggttgtcctcttctgaaactacctttgcaaaaattatagcagtgagaaaattatgacagtgaaagaaatctgacctaattgactccatcttgcttctaacctcccagctgcccttgttcattcctgggcatagggagcactaactttgggaggatttagtttatagtttaactttgaaacaaagatgataacagcccctccctgagaccaacccactccttgcctggggaccagaaagcctttgtaaaactaacacattggccacaagattagaaatgacggctcaggagtcatgcagccaaaggcctcgagatcatgaacctccccaattgctcctgtagataatattattattgtaaaacctaacatgggtgtttgaggtatttttcagaccctgccttctgatggatcagctggcaccacccagaccagtaaactggctcatctggtcttctggcccccacccaggaaccaactcagtgcaagaggatagcttcaactccttatgatttcatccccgacccaaccaatcagcattcccgcttcccgagccccctgcccgccaaactacctttaaaaaaccctagcctccaaattttcagggaggctgatttgagtaataataaaacccctgtctcctgtttaaaaaactctact

SEQ ID NO: 429071 - DNA, 1812 bp, Homo sapiens
ggtatggctgttcctccatctctccgaacctggcttcgcctgtccctttcactccacaccctctgcgccttctgccttgagctgggactgcttgctgtctgtccggcctgcacccagcccctgcccacaaaaccccaggtacagcggtctccccagcctgccctgctcaggccttgcccccagacctgagcaagccaggcctggcttgctcaggtcttggcttgcaccctattgcctctggcagatcctccaaccagcaccaatgaagcacctaccccatgcagggtccttcagaaacaaagagtgagatagcttccagtctcaggtggggaatatttagacttgtgaacaggggcaaagaaggagagaaacaaccaggaagtaacctccaatttgcagatggggaaaattaagtttcatcaggaggaaatgactttgcctcaggcttctcttgggatcccagatttctagaggatggggggaatgtccctgctttgggcatgtttttaagagcactggaacagccagagctgctgcccacagtctgaagtcaggaggggaactccatgtcagataaaagctttggaatccagatggagtaaggtttcattttctctgcctgcatttggtttcctaacatcacaatgtgagccttggctagcagccagcttagctttggaaaagagtgaatgatggggaaaaaaaaaaaaaaagactgtgccaggaagggaggggaggagaggggctacactaggctggaggggatatgggcctggctttagaggattatgctaggaaaaggggtgccagaggttgaaagctgataggaacaagccctgtggatcaagaggcccatcagtgagcctgcagggtctatgaactccttacatgcaaaattacatgtgtctgtctgtgtaggtctctacagattggtggaagtgttcacagctttcatgagattattatttttttttttttaagaaaggcacactgccgcatgcaacacctcatttggatgtgtctggagtcttggaagttttgactaccctacattctcctacaaatggaccttgagagcttgtttggaggttctagcaggggagcgcactacttcgtatacccttgaccaaagaacagtcctcctctattggggaaggttgtcctcttctgaaactacctttgcaaaaattatagcagtgagaaaattatgacagtgaaagaaatctgacctaattgactccatcttgcttctaacctcccagctgcccttgttcattcctgggcatagggagcactaactttgggaggatttagtttatagtttaactttgaaacaaagatgataacagcccctccctgagaccaacccactccttgcctggggaccagaaagcctttgtaaaactaacacattggccacaagattagaaatgacggctcaggagtcatgcagccaaaggcctcgagatcatgaacctccccaattgctcctgtagataatattattattgtaaaacctaacatgggtgtttgaggtatttttcagaccctgccttctgatggatcagctggcaccacccagaccagtaaactggctcatctggtcttctggcccccacccaggaaccaactcagtgcaagaggatagcttcaactccttatgatttcatccccgacccaaccaatcagcattcccgcttcccgagccccctgcccgccaaactacctttaaaaaaccctagcctccaaattttcagggaggctgatttgagtaataataaaacccctgtctcctgtttaaaaaactctact

SEQ ID NO: 429072 - DNA, 929 bp, Homo sapiens
gggagaggagggggaggggaggggagaggaattgaggagcagaacagaataacacagaaagaaccaaccagagctggaccaaaaatcgaggccaggatgttgtagagtcttgggttcaaattctgcctcctcctgggaagtcccctgagcctgctacaaggtcttggcttgcaccctattgcctctggcagatcctccaaccagcaccaatgaagcacctaccccatgcagggtccttcagaaacaaagagtgagatagcttccagtctcaggtggggaatatttagacttgtgaacaggggcaaagaaggagagaaacaaccaggaagtaacctccaatttgcagatggggaaaattaagtttcatcaggaggaaatgactttgcctcaggcttctcttgggatcccagatttctagaggatggggggaatgtccctgctttgggcatgtttttaagagcactggaacagccagagctgctgcccacagtctgaagtcaggaggggaactccatgtcagataaaagctttggaatccagatggagtaaggtttcattttctctgcctgcatttggtttcctaacatcacaatgtgagccttggctagcagccagcttagctttggaaaagagtgaatgatggggaaaaaaaaaaaaaaagactgtgccaggaagggaggggaggagaggggctacactaggctggaggggatatgggcctggcttttgggggtttttcctacagggcctgggttggcccctttttgcctttggcggttcctccacccggccccattgaggcccttcccccttgcggggtccttcagaaacaaagagggagatggcttccggtctcagggggggattttttagccttgggaccgggggcaaggagggggggaaccacccgggaggtaccctccatttgg

SEQ ID NO: 429073 - DNA, 513 bp, Homo sapiens
gggagaggagggggaggggaggggagaggaattgaggagcagaacagaataacacagaaagaaccaacccactccttgcctggggaccagaaagcctttgtaaaactaacacattggccacaagattagaaatgacggctcaggagtcatgcagccaaaggcctcgagatcatgaacctccccaattgctcctgtagataatattattattgtaaaacctaacatgggtgtttgaggtatttttcagaccctgccttctgatggatcagctggcaccacccagaccagtaaactggctcatctggtcttctggcccccacccaggaaccaactcagtgcaagaggatagcttcaactccttatgatttcatccccgacccaaccaatcagcattcccgcttcccgagccccctgcccgccaaactacctttaaaaaaccctagcctccaaattttcagggaggctgatttgagtaataataaaacccctgtctcctgtttaaaaaactctact

SEQ ID NO: 429074 - DNA, 2138 bp, Homo sapiens
gcggcgcgcgccgggcacgcgcgccggcgaccatggcgttcgccgggctggagcgagtacattaacccctggaggcggcggcggcggcgagggagcgagcctcgagcgggcgggccccagcctgagggaagggaggaaggggcggggagagcgccagagggaggccggtcggccgcgggcgggcgggcagcgcagcgccgagcggggcccgcgggcccatgaggaggcctggggaccatgggctccaggatcaagcagaatccagagaccacatttgaagtatatgttgaagtggcctatcccaggacaggtggcactctttcagatcctgaggtgcagaggcaattcccggaggactacagtgaccaggaagttctacagactttgaccaagttttgtttccccttctatgtggacagcctcacagttagccaagttggccagaacttcacattcgtgctcactgacattgacagcaaacagagattcgggttctgccgcttatcttcaggagcgaagagctgcttctgtatcttaagctatctcccctggttcgaggtattttataagctgcttaacatcctggcagattacacgacaaaaagacaggaaaatcagtggaatgagcttcttgaaactctgcacaaacttcccatccctgacccaggagtgtctgtccatctcagcgtgcattcttattttactgtgcctgataccagagaacttcccagcatacctgagaatagaaatctgacagaatattttgtggctgtggatgttaacaacatgttgcatctgtacgccagtatgctgtacgaacgccggatactcatcatttgcagcaaactcagcactctgactgcctgcatccacgggtctgcggcgatgctctaccccatgtactggcagcacgtgtacatccccgtgctgccgccgcatctgctggactactgctgtgctcccatgccctacctcataggaatccatttaagtttaatggagaaagtcagaaacatggccctggatgatgtcgtgatcctgaatgtggacaccaacaccctggaaacccccttcgatgacctccagagcctcccaaacgacgtgatctcttccctgaagaacaggctgaaaaaggtctccacaaccactggggatggtgtggccagagcgttcctcaaggcccaggctgctttcttcggtagctaccgaaacgctctgaaaatcgagccggaggagccgatcactttctgtgaggaagccttcgtgtcccactaccgctccggagccatgaggcagttcctgcagaacgccacacagctgcagctcttcaagcagtttattgatggtcgattagatcttctcaattccggcgaaggtttcagtgatgtttttgaagaggaaatcaacatgggcgagtacgctggcagtgacaaactgtaccatcagtggctctccactgtccggaaaggaagtggagcaattctgaatactgtaaagaccaaagcaaatccggccatgaagactgtctacaagttcgcaaaagatcatgcaaaaatgggaataaaagaggtgaaaaaccgcttgaagcaaaaggacattgccgagaatggctgcgcccccaccccagaagagcagctgccaaagactgcaccgtccccactggtggaggccaaggaccccaagctccgagaagaccggcggccaatcacagtccactttggacaggtgcgcccacctcgtccacatgttgttaagagaccaaagagcaacatcgcagtggaaggccggaggacgtctgtgccgagccctgagcaaaacaccattgcaacaccagctacactccacatcctacagaaaagcattacccattttgcggccaagttcccgacgagaggctggacctcttcatcacattgacttacgccgttgcttttccagactgggcagaggggctgacttcgcagtgtgtgccaaagagccggtgtctgataatcccattttcctgcttatcacctgaactgtgtcagtatcacttttagttttgttggttggttggtttgttgtttgtttaatatgccctgttttctacttctgttggaaaatatttggggttgaaataaaccagtgggagcatggga

SEQ ID NO: 429075 - DNA, 1191 bp, Homo sapiens
agagtatgtgtgtgtgcacgggtgggggataaacaattaaaaaagccaccccaaactctgttgaaataagagctgtctgtgccttcacaggtctgcaaactggagaggatgaaagtggctttttttccctgtttgtcacttccctcacgtggctgccagcattatgcaagtgtacaggaaggcaggatttttttttttaatgcatgcatgcggattaaggtcaagcccctagtatcagccatgcagcgggctctcccttccagctgcagccgcagagcctacccacagccgcgagatgccttaattgagacgtgctgtcaaagtgacaaacacatttgcatacagtctacactctatttattttctctggaaaggtctacagtctgctgttggttgaacattcttaatcagtttgctgtaagtgaactgccagctagctcacttatgccggccccttcttcattaggtgacagattagctgcaagagggaggggggcttgagccaggggaaaccacagacccctttcttttaactctttccagctttgcccttatggtaggttgtccttgagtcttttcccgggtccctggtttgatgggctgttgaccgtaagaagtacggtttctagagcacctactaccggcaggcatgagttttaaggacttgatattcttcccaaagaacagtctcttgagtttcatttcagaagtttttaccacactctcttaccatctatactattttctttacttgatagttttctttaaataagactcagacctgacatctatagcatcttagcctcatcttcagagatgccattggtaaaattataggcttgatatactagtcccagttttttctaacatataaaacaattttaagtgttcatctatgaatcacctaatgcactcacgtagccctaatggtatatattctctttttttggaaaccaacagactccttggtatcttttttgttgtctccaccacatccctttgaggaagggaccattagccccattttattgacccagagctggagctcagagacgtgagagaacctgcccagggccgcttcaccagcttggaaacccaagcccagacacctcctctcgagcccacaccagctctcaaacaagcagggactgcagccatgtgatatgtctgttaaagctactgtaccctgcc

SEQ ID NO: 429076 - DNA, 844 bp, Homo sapiens
tccaggccgcagcccgaagtgtccacttatcatgttttctgacctgccgccctggagaatttgccgtttcctctttggactcctgtggacactttaccccccaccccaccccaccctggaggagccgatcactttctgtgaggaagccttcgtgtcccactaccgctccggagccatgaggcagttcctgcagaacgccacacagctgcagctcttcaagcagtttattgatggtcgattagatcttctcaattccggcgaaggtttcagtgatgtttttgaagaggaaatcaacatgggcgagtacgctggcagtgacaaactgtaccatcagtggctctccactgtccggaaaggaagtggagcaattctgaatactgtaaagaccaaagcaaatccggccatgaagactgtctacaagttcgcaaaagatcatgcaaaaatgggaataaaagaggtgaaaaaccgcttgaagcaaaaggacattgccgagaatggctgcgcccccaccccagaagagcagctgccaaagactgcaccgtccccactggtggaggccaaggaccccaagctccgagaagaccggcggccaatcacagtccactttggacagactccttggtatcttttttgttgtctccaccacatccctttgaggaagggaccattagccccattttattgacccagagctggagctcagagacgtgagagaacctgcccagggccgcttcaccagcttggaaacccaagcccagacacctcctctcgagcccacaccagctctcaaacaagcagggactgcagccatgtgatatgtctgttaaagctactgtaccctgcc

SEQ ID NO: 429077 - DNA, 5864 bp, Homo sapiens
gcggcgcgcgccgggcacgcgcgccggcgaccatggcgttcgccgggctggagcgagtacattaacccctggaggcggcggcggcggcgagggagcgagcctcgagcgggcgggccccagcctgagggaagggaggaaggggcggggagagcgccagagggaggccggtcggccgcgggcgggcgggcagcgcagcgccgagcggggcccgcgggcccatgaggaggcctggggaccatgggctccaggatcaagcagaatccagagaccacatttgaagtatatgttgaagtggcctatcccaggacaggtggcactctttcagatcctgaggtgcagaggcaattcccggaggactacagtgaccaggaagttctacagactttgaccaagttttgtttccccttctatgtggacagcctcacagttagccaagttggccagaacttcacattcgtgctcactgacattgacagcaaacagagattcgggttctgccgcttatcttcaggagcgaagagctgcttctgtatcttaagctatctcccctggttcgaggtattttataagctgcttaacatcctggcagattacacgacaaaaagacaggaaaatcagtggaatgagcttcttgaaactctgcacaaacttcccatccctgacccaggagtgtctgtccatctcagcgtgcattcttattttactgtgcctgataccagagaacttcccagcatacctgagaatagaaatctgacagaatattttgtggctgtggatgttaacaacatgttgcatctgtacgccagtatgctgtacgaacgccggatactcatcatttgcagcaaactcagcactctgactgcctgcatccacgggtctgcggcgatgctctaccccatgtactggcagcacgtgtacatccccgtgctgccgccgcatctgctggactactgctgtgctcccatgccctacctcataggaatccatttaagtttaatggagaaagtcagaaacatggccctggatgatgtcgtgatcctgaatgtggacaccaacaccctggaaacccccttcgatgacctccagagcctcccaaacgacgtgatctcttccctgaagaacaggctgaaaaaggtctccacaaccactggggatggtgtggccagagcgttcctcaaggcccaggctgctttcttcggtagctaccgaaacgctctgaaaatcgagccggaggagccgatcactttctgtgaggaagccttcgtgtcccactaccgctccggagccatgaggcagttcctgcagaacgccacacagctgcagctcttcaagcagtttattgatggtcgattagatcttctcaattccggcgaaggtttcagtgatgtttttgaagaggaaatcaacatgggcgagtacgctggattcctgttgagattaaatcagagtacatgaggaaaggtttgtgcagtcatccaggacagttcctggcatggggactgtgtgcagcagtgacaaactgtaccatcagtggctctccactgtccggaaaggaagtggagcaattctgaatactgtaaagaccaaagcaaatccggccatgaagactgtctacaagttcgcaaaagatcatgcaaaaatgggaataaaagaggtgaaaaaccgcttgaagcaaaaggacattgccgagaatggctgcgcccccaccccagaagagcagctgccaaagactgcaccgtccccactggtggaggccaaggaccccaagctccgagaagaccggcggccaatcacagtccactttggacaggtgcgcccacctcgtccacatgttgttaagagaccaaagagcaacatcgcagtggaaggccggaggacgtctgtgccgagccctgagcagccgcagccgtatcggacactcagggagtcagacagcgcggaaggcgacgaggcagagagtccagagcagcaagtgcggaagtccacaggccctgtcccagctccccctgaccgggctgccagcatcgaccttctggaagacgtcttcagcaacctggacatggaggccgcactgcagccactgggccaggccaagagcttagaggaccttcgtgcccccaaagacctgagggagcagccagggacctttgactatcagaggctggatctgggcgggagtgagaggagccgcggggtgacagtggccttgaagcttacccacccgtacaacaagctctggagcctgggccaggacgacatggccatccccagcaagcccccagctgcctcccctgagaagccctcggccctgctcgggaactccctggccctgcctcgaaggccccagaaccgggacagcatcctgaaccccagtgacaaggaggaggtgcccacccctactctgggcagcatcaccatcccccggccccaaggcaggaagaccccagagctgggcatcgtgcctccaccgcccattccccgcccggccaagctccaggctgccggcgccgcacttggtgacgtctcagagcggctgcagacggatcgggacaggcgagctgccctgagtccagggctcctgcctggtgttgtcccccaaggccccactgaactgctccagccgctcagccctggccccggggctgcaggcacgagcagtgacgccctgctcgccctcctggacccgctcagcacagcctggtcaggcagcaccctcccgtcacgccccgccaccccgaatgtagccaccccattcaccccccaattcagcttcccccctgcagggacacccaccccattcccacagccaccactcaacccctttgtcccatccatgccagcagccccacccaccctgcccctggtctccacaccagccgggcctttcggggcccctccagcttccctggggccggcttttgcgtccggcctcctgctgtccagtgctggcttctgtgcccctcacaggtctcagcccaacctctccgccctctccatgcccaacctctttggccagatgcccatgggcacccacacgagccccctacagccgctgggtcccccagcagttgccccgtcgaggatccgaacgttgcccctggcccgctcaagtgccagggctgctgagaccaagcaggggctggccctgaggcctggagaccccccgcttctgcctcccaggccccctcaaggcctggagccaacactgcagccctctgctcctcaacaggccagagacccctttgaggatttgttacagaaaaccaagcaagacgtgagcccgagtccggccctggccccggccccagactcggtggagcagctcaggaagcagtgggagaccttcgagtgagccgggccctgagggtgggggatgcaccgaggcccgagggtccgtccactgctgcggttccgaggctcccccgccactctctctctgcccaggttctgctggtgggaagggatgggacccctctctgctgccccctcctcccctccacactgcccatctctgatgtctggccctggggaatggcaccagttccagcctgggaatcaacccagttcctgagtgcccatcccaccccgcggttgcctctcctcggcacccttgattgggttttgcactaaagaggtcagctgggccaatgatattgctccagaccgagtcctacccaccttcccccggaagtgtcccaagaggctccgaaggcctcccctccgagcccagctctcctgtctcctccacagccaggccctgcacgcccacctcctcggacacaggtgacagggttaccctccagtttgagctcatctgcacgagacacaggtagcttggggttgaagttaggactcctcctgggctggaggatttacctggtggggcacttccagactgtttctagcaatatacacacacgttctttcctgtgtcttcaccccaaaacttcagttgattctgacctgggaggatctggggaccagggggtcttgggctgccttgtgatacacagccccagccaccctgcacgggggctgcgagcaccagcaactttgatttatagaaggaaaatggaaacccccatctgagtattttgggaggagcccccagccctcatccagctctggcacgctgatacctccaggtactcccctcactgtcaaagctggggctcagcctcttgtcatctggagctttgtgggcaaagctgagaagctgcaacccagatttcaacccaaaaaggtcaagctgaatgcctcagactgatgtggaaggcagctggccttcctgggttggaacgaggcagtggccctgagccccttctccagggccaggtagaaaggacaaacttggtctctgcctcggggaagcaggaggagggctagaagccagtccctccccacctgcccagagctccaggccagcacagaaattcctgaggccaacgtcaccaaagttagattgaatgtttattatctttctttttcctttttaccttattgatttgatgaatcttgaaatggattcatttccataaaccaagttaaagtatggcccgaccatttaagaaaacaaccatctgagacacgcaggaaattgtgagcatttcgacccgagctctcatttcctatttgtgaagggtcagacacagtctacccaggggtgtctgggggacaagggggtctctggagatgtcacccagggagccccctctatgtctgagaggctgccactgctgcacatgctcagtgaggcttggcggccatcctggcacatggctcttcctgggtcaaccgtgacctgtctggctcaggaatgggctctggctgctgggggagccgtgtcactcctgggccatgggggcacctcctgggcacttaggtgtttcagcatagattccagtttcgcaccctgggcagacccccaggccccatccgggatagggcagaggaggtgctggcggccccagggaaggagggtgtgtaccccaaggccccctggctgtgctgaggggctggggtgagcgctccatgttcacatgagcactgctgcctcttcacttgtgggactttttgcaaacccaaggatgaactttgtgtgcattcaataaaatcatcttggggaagaggctggcatccccgtgtccttgaagcttttgggtcggggaggccccacacgggcccggagccatcctcaccacctgctcctgtagaggcaggggccaggcgcagagcagttagggaaggagtcaactccccgcaccctcccaagccggtgcccactcagggctctaagccagctcatgctctgcccctcacagaccaggcacggggttgggctggcaacaggcctgctcagccctgcgggggccatggggcagactgcaggcctccaacgacgttgagggcacccaggagccaggaaagagttcaaggggacacctggcaagtcgcccccacaggtctctcattagcaagaacagagcctgggactctgcctctgttggacgctggtgtttgcggggaggcgggcgggggaatgcagaccaatcgaccaccccatagtgagcgtggaacatgcccagtcacaccacccaccccctccgactcgcccatcatctgaccatgcccccacttgcaggactgactgacaggctgaaaacgacaggcacgcgggccgggcgcggtggctcacacctgtcatcccacacctataatcccaacattttgggaggccggggcaggtggatcacgaggtcggtcaggagttcaagaccagcctggccaagatggtgaagccccgtctctactaaaagcaggcacctgtaatcccagctactccagaggctgaggcagggaattgc

SEQ ID NO: 429078 - DNA, 5076 bp, Homo sapiens
gcggcgcgcgccgggcacgcgcgccggcgaccatggcgttcgccgggctggagcgagtacattaacccctggaggcggcggcggcggcgagggagcgagcctcgagcgggcgggccccagcctgagggaagggaggaaggggcggggagagcgccagagggaggccggtcggccgcgggcgggcgggcagcgcagcgccgagcggggcccgcgggcccatgaggaggcctggggaccatgggctccaggatcaagcagaatccagagaccacatttgaagtatatgttgaagtggcctatcccaggacaggtggcactctttcagttctgcagattcagattcaactttgttctgccttcatgtgcagcctcacagttagccaagttggccagaacttcacattcgtgctcactgacattgacagcaaacagagattcgggttctgccgcttatcttcaggagcgaagagctgcttctgtatcttaagctatctcccctggttcgaggtattttataagctgcttaacatcctggcagattacacgacaaaaagacaggaaaatcagtggaatgagcttcttgaaactctgcacaaacttcccatccctgacccaggagtgtctgtccatctcagcgtgcattcttattttactgtgcctgataccagagaacttcccagcatacctgagaatagaaatctgacagaatattttgtggctgtggatgttaacaacatgttgcatctgtacgccagtatgctgtacgaacgccggatactcatcatttgcagcaaactcagcactctgactgcctgcatccacgggtctgcggcgatgctctaccccatgtactggcagcacgtgtacatccccgtgctgccgccgcatctgctggactactgctgtgctcccatgccctacctcataggaatccatttaagtttaatggagaaagtcagaaacatggccctggatgatgtcgtgatcctgaatgtggacaccaacaccctggaaacccccttcgatgacctccagagcctcccaaacgacgtgatctcttccctgaagaacaggctgaaaaaggtctccacaaccactggggatggtgtggccagagcgttcctcaaggcccaggctgctttcttcggtagctaccgaaacgctctgaaaatcgagccggaggagccgatcactttctgtgaggaagccttcgtgtcccactaccgctccggagccatgaggcagttcctgcagaacgccacacagctgcagctcttcaagcagtttattgatggtcgattagatcttctcaattccggcgaaggtttcagtgatgtttttgaagaggaaatcaacatgggcgagtacgctggattcctgttgagattaaatcagagtacatgaggaaaggtttgtgcagtcatccaggacagttcctggcatggggactgtgtgcagcagtgacaaactgtaccatcagtggctctccactgtccggaaaggaagtggagcaattctgaatactgtaaagaccaaagcaaatccggccatgaagactgtctacaagttcgcaaaagatcatgcaaaaatgggaataaaagaggtgaaaaaccgcttgaagcaaaaggacattgccgagaatggctgcgcccccaccccagaagagcagctgccaaagactgcaccgtccccactggtggaggccaaggaccccaagctccgagaagaccggcggccaatcacagtccactttggacaggtgcgcccacctcgtccacatgttgttaagagaccaaagagcaacatcgcagtggaaggccggaggacgtctgtgccgagccctgagcagccgcagccgtatcggacactcagggagtcagacagcgcggaaggcgacgaggcagagagtccagagcagcaagtgcggaagtccacaggccctgtcccagctccccctgaccgggctgccagcatcgaccttctggaagacgtcttcagcaacctggacatggaggccgcactgcagccactgggccaggccaagagcttagaggaccttcgtgcccccaaagacctgagggagcagccagggacctttgactatcagaggctggatctgggcgggagtgagaggagccgcggggtgacagtggccttgaagcttacccacccgtacaacaagctctggagcctgggccaggacgacatggccatccccagcaagcccccagctgcctcccctgagaagccctcggccctgctcgggaactccctggccctgcctcgaaggccccagaaccgggacagcatcctgaaccccagtgacaaggaggaggtgcccacccctactctgggcagcatcaccatcccccggccccaaggcaggaagaccccagagctgggcatcgtgcctccaccgcccattccccgcccggccaagctccaggctgccggcgccgcacttggtgacgtctcagagcggctgcagacggatcgggacaggcgagctgccctgagtccagggctcctgcctggtgttgtcccccaaggccccactgaactgctccagccgctcagccctggccccggggctgcaggcacgagcagtgacgccctgctcgccctcctggacccgctcagcacagcctggtcaggcagcaccctcccgtcacgccccgccaccccgaatgtagccaccccattcaccccccaattcagcttcccccctgcagggacacccaccccattcccacagccaccactcaacccctttgtcccatccatgccagcagccccacccaccctgcccctggtctccacaccagccgggcctttcggggcccctccagcttccctggggccggcttttgcgtccggcctcctgctgtccagtgctggcttctgtgcccctcacaggtctcagcccaacctctccgccctctccatgcccaacctctttggccagatgcccatgggcacccacacgagccccctacagccgctgggtcccccagcagttgccccgtcgaggatccgaacgttgcccctggcccgctcaagtgccagggctgctgagaccaagcaggggctggccctgaggcctggagaccccccgcttctgcctcccaggccccctcaaggcctggagccaacactgcagccctctgctcctcaacaggccagagacccctttgaggatttgttacagaaaaccaagcaagacgtgagcccgagtccggccctggccccggccccagactcggtggagcagctcaggaagcagtgggagaccttcgagtgagccgggccctgagggtgggggatgcaccgaggcccgagggtccgtccactgctgcggttccgaggctcccccgccactctctctctgcccaggttctgctggtgggaagggatgggacccctctctgctgccccctcctcccctccacactgcccatctctgatgtctggccctggggaatggcaccagttccagcctgggaatcaacccagttcctgagtgcccatcccaccccgcggttgcctctcctcggcacccttgattgggttttgcactaaagaggtcagctgggccaatgatattgctccagaccgagtcctacccaccttcccccggaagtgtcccaagaggctccgaaggcctcccctccgagcccagctctcctgtctcctccacagccaggccctgcacgcccacctcctcggacacaggtgacagggttaccctccagtttgagctcatctgcacgagacacaggtagcttggggttgaagttaggactcctcctgggctggaggatttacctggtggggcacttccagactgtttctagcaatatacacacacgttctttcctgtgtcttcaccccaaaacttcagttgattctgacctgggaggatctggggaccagggggtcttgggctgccttgtgatacacagccccagccaccctgcacgggggctgcgagcaccagcaactttgatttatagaaggaaaatggaaacccccatctgagtattttgggaggagcccccagccctcatccagctctggcacgctgatacctccaggtactcccctcactgtcaaagctggggctcagcctcttgtcatctggagctttgtgggcaaagctgagaagctgcaacccagatttcaacccaaaaaggtcaagctgaatgcctcagactgatgtggaaggcagctggccttcctgggttggaacgaggcagtggccctgagccccttctccagggccaggtagaaaggacaaacttggtctctgcctcggggaagcaggaggagggctagaagccagtccctccccacctgcccagagctccaggccagcacagaaattcctgaggccaacgtcaccaaagttagattgaatgtttattatctttctttttcctttttaccttattgatttgatgaatcttgaaatggattcatttccataaaccaagttaaagtatggcccgaccatttaagaaaacaaccatctgagacacgcaggaaattgtgagcatttcgacccgagctctcatttcctatttgtgaagggtcagacacagtctacccaggggtgtctgggggacaagggggtctctggagatgtcacccagggagccccctctatgtctgagaggctgccactgctgcacatgctcagtgaggcttggcggccatcctggcacatggctcttcctgggtcaaccgtgacctgtctggctcaggaatgggctctggctgctgggggagccgtgtcactcctgggccatgggggcacctcctgggcacttaggtgtttcagcatagattccagtttcgcaccctgggcagacccccaggccccatccgggatagggcagaggaggtgctggcggccccagggaaggagggtgtgtaccccaaggccccctggctgtgctgaggggctggggtgagcgctccatgttcacatgagcactgctgcctcttcacttgtgggactttttgcaaacccaaggatgaactttgtgtgcattcaataaaatcatcttggggaag

SEQ ID NO: 429079 - DNA, 4957 bp, Homo sapiens
gcggcgcgcgccgggcacgcgcgccggcgaccatggcgttcgccgggctggagcgagtacattaacccctggaggcggcggcggcggcgagggagcgagcctcgagcgggcgggccccagcctgagggaagggaggaaggggcggggagagcgccagagggaggccggtcggccgcgggcgggcgggcagcgcagcgccgagcggggcccgcgggcccatgaggaggcctggggaccatgggctccaggatcaagcagaatccagagaccacatttgaagtatatgttgaagtggcctatcccaggacaggtggcactctttcagatcctgaggtgcagaggcaattcccggaggactacagtgaccagctatctcccctggttcgaggtattttataagctgcttaacatcctggcagattacacgacaaaaagacaggaaaatcagtggaatgagcttcttgaaactctgcacaaacttcccatccctgacccaggagtgtctgtccatctcagcgtgcattcttattttactgtgcctgataccagagaacttcccagcatacctgagaatagaaatctgacagaatattttgtggctgtggatgttaacaacatgttgcatctgtacgccagtatgctgtacgaacgccggatactcatcatttgcagcaaactcagcactctgactgcctgcatccacgggtctgcggcgatgctctaccccatgtactggcagcacgtgtacatccccgtgctgccgccgcatctgctggactactgctgtgctcccatgccctacctcataggaatccatttaagtttaatggagaaagtcagaaacatggccctggatgatgtcgtgatcctgaatgtggacaccaacaccctggaaacccccttcgatgacctccagagcctcccaaacgacgtgatctcttccctgaagaacaggctgaaaaaggtctccacaaccactggggatggtgtggccagagcgttcctcaaggcccaggctgctttcttcggtagctaccgaaacgctctgaaaatcgagccggaggagccgatcactttctgtgaggaagccttcgtgtcccactaccgctccggagccatgaggcagttcctgcagaacgccacacagctgcagctcttcaagcagtttattgatggtcgattagatcttctcaattccggcgaaggtttcagtgatgtttttgaagaggaaatcaacatgggcgagtacgctggattcctgttgagattaaatcagagtacatgaggaaaggtttgtgcagtcatccaggacagttcctggcatggggactgtgtgcagcagtgacaaactgtaccatcagtggctctccactgtccggaaaggaagtggagcaattctgaatactgtaaagaccaaagcaaatccggccatgaagactgtctacaagttcgcaaaagatcatgcaaaaatgggaataaaagaggtgaaaaaccgcttgaagcaaaaggacattgccgagaatggctgcgcccccaccccagaagagcagctgccaaagactgcaccgtccccactggtggaggccaaggaccccaagctccgagaagaccggcggccaatcacagtccactttggacaggtgcgcccacctcgtccacatgttgttaagagaccaaagagcaacatcgcagtggaaggccggaggacgtctgtgccgagccctgagcagccgcagccgtatcggacactcagggagtcagacagcgcggaaggcgacgaggcagagagtccagagcagcaagtgcggaagtccacaggccctgtcccagctccccctgaccgggctgccagcatcgaccttctggaagacgtcttcagcaacctggacatggaggccgcactgcagccactgggccaggccaagagcttagaggaccttcgtgcccccaaagacctgagggagcagccagggacctttgactatcagaggctggatctgggcgggagtgagaggagccgcggggtgacagtggccttgaagcttacccacccgtacaacaagctctggagcctgggccaggacgacatggccatccccagcaagcccccagctgcctcccctgagaagccctcggccctgctcgggaactccctggccctgcctcgaaggccccagaaccgggacagcatcctgaaccccagtgacaaggaggaggtgcccacccctactctgggcagcatcaccatcccccggccccaaggcaggaagaccccagagctgggcatcgtgcctccaccgcccattccccgcccggccaagctccaggctgccggcgccgcacttggtgacgtctcagagcggctgcagacggatcgggacaggcgagctgccctgagtccagggctcctgcctggtgttgtcccccaaggccccactgaactgctccagccgctcagccctggccccggggctgcaggcacgagcagtgacgccctgctcgccctcctggacccgctcagcacagcctggtcaggcagcaccctcccgtcacgccccgccaccccgaatgtagccaccccattcaccccccaattcagcttcccccctgcagggacacccaccccattcccacagccaccactcaacccctttgtcccatccatgccagcagccccacccaccctgcccctggtctccacaccagccgggcctttcggggcccctccagcttccctggggccggcttttgcgtccggcctcctgctgtccagtgctggcttctgtgcccctcacaggtctcagcccaacctctccgccctctccatgcccaacctctttggccagatgcccatgggcacccacacgagccccctacagccgctgggtcccccagcagttgccccgtcgaggatccgaacgttgcccctggcccgctcaagtgccagggctgctgagaccaagcaggggctggccctgaggcctggagaccccccgcttctgcctcccaggccccctcaaggcctggagccaacactgcagccctctgctcctcaacaggccagagacccctttgaggatttgttacagaaaaccaagcaagacgtgagcccgagtccggccctggccccggccccagactcggtggagcagctcaggaagcagtgggagaccttcgagtgagccgggccctgagggtgggggatgcaccgaggcccgagggtccgtccactgctgcggttccgaggctcccccgccactctctctctgcccaggttctgctggtgggaagggatgggacccctctctgctgccccctcctcccctccacactgcccatctctgatgtctggccctggggaatggcaccagttccagcctgggaatcaacccagttcctgagtgcccatcccaccccgcggttgcctctcctcggcacccttgattgggttttgcactaaagaggtcagctgggccaatgatattgctccagaccgagtcctacccaccttcccccggaagtgtcccaagaggctccgaaggcctcccctccgagcccagctctcctgtctcctccacagccaggccctgcacgcccacctcctcggacacaggtgacagggttaccctccagtttgagctcatctgcacgagacacaggtagcttggggttgaagttaggactcctcctgggctggaggatttacctggtggggcacttccagactgtttctagcaatatacacacacgttctttcctgtgtcttcaccccaaaacttcagttgattctgacctgggaggatctggggaccagggggtcttgggctgccttgtgatacacagccccagccaccctgcacgggggctgcgagcaccagcaactttgatttatagaaggaaaatggaaacccccatctgagtattttgggaggagcccccagccctcatccagctctggcacgctgatacctccaggtactcccctcactgtcaaagctggggctcagcctcttgtcatctggagctttgtgggcaaagctgagaagctgcaacccagatttcaacccaaaaaggtcaagctgaatgcctcagactgatgtggaaggcagctggccttcctgggttggaacgaggcagtggccctgagccccttctccagggccaggtagaaaggacaaacttggtctctgcctcggggaagcaggaggagggctagaagccagtccctccccacctgcccagagctccaggccagcacagaaattcctgaggccaacgtcaccaaagttagattgaatgtttattatctttctttttcctttttaccttattgatttgatgaatcttgaaatggattcatttccataaaccaagttaaagtatggcccgaccatttaagaaaacaaccatctgagacacgcaggaaattgtgagcatttcgacccgagctctcatttcctatttgtgaagggtcagacacagtctacccaggggtgtctgggggacaagggggtctctggagatgtcacccagggagccccctctatgtctgagaggctgccactgctgcacatgctcagtgaggcttggcggccatcctggcacatggctcttcctgggtcaaccgtgacctgtctggctcaggaatgggctctggctgctgggggagccgtgtcactcctgggccatgggggcacctcctgggcacttaggtgtttcagcatagattccagtttcgcaccctgggcagacccccaggccccatccgggatagggcagaggaggtgctggcggccccagggaaggagggtgtgtaccccaaggccccctggctgtgctgaggggctggggtgagcgctccatgttcacatgagcactgctgcctcttcacttgtgggactttttgcaaacccaaggatgaactttgtgtgcattcaataaaatcatcttggggaag

SEQ ID NO: 429080 - DNA, 5490 bp, Homo sapiens
gcggcgcgcgccgggcacgcgcgccggcgaccatggcgttcgccgggctggagcgagtacattaacccctggaggcggcggcggcggcgagggagcgagcctcgagcgggcgggccccagcctgagggaagggaggaaggggcggggagagcgccagagggaggccggtcggccgcgggcgggcgggcagcgcagcgccgagcggggcccgcgggcccatgaggaggcctggggaccatgggctccaggatcaagcagaatccagagaccacatttgaagtatatgttgaagtggcctatcccaggacaggtggcactctttcagatcctgaggtgcagaggcaattcccggaggactacagtgaccaggaagttctacagactttgaccaagttttgtttccccttctatgtggacagcctcacagttagccaagttggccagaacttcacattcgtgctcactgacattgacagcaaacagagattcgggttctgccgcttatcttcaggagcgaagagctgcttctgtatcttaagctatctcccctggttcgaggtattttataagctgcttaacatcctggcagattacacgacaaaaagacaggaaaatcagtggaatgagcttcttgaaactctgcacaaacttcccatccctgacccaggagtgtctgtccatctcagcgtgcattcttattttactgtgcctgataccagagaacttcccagcatacctgagaatagaaatctgacagaatattttgtggctgtggatgttaacaacatgttgcatctgtacgccagtatgctgtacgaacgccggatactcatcatttgcagcaaactcagcactctgactgcctgcatccacgggtctgcggcgatgctctaccccatgtactggcagcacgtgtacatccccgtgctgccgccgcatctgctggactactgctgtgctcccatgccctacctcataggaatccatttaagtttaatggagaaagtcagaaacatggccctggatgatgtcgtgatcctgaatgtggacaccaacaccctggaaacccccttcgatgacctccagagcctcccaaacgacgtgatctcttccctgaagaacaggctgaaaaaggtctccacaaccactggggatggtgtggccagagcgttcctcaaggcccaggctgctttcttcggtagctaccgaaacgctctgaaaatcgagccggaggagccgatcactttctgtgaggaagccttcgtgtcccactaccgctccggagccatgaggcagttcctgcagaacgccacacagctgcagctcttcaagcagtttattgatggtcgattagatcttctcaattccggcgaaggtttcagtgatgtttttgaagaggaaatcaacatgggcgagtacgctggattcctgttgagattaaatcagagtacatgaggaaaggtttgtgcagtcatccaggacagttcctggcatggggactgtgtgcagcagtgacaaactgtaccatcagtggctctccactgtccggaaaggaagtggagcaattctgaatactgtaaagaccaaagcaaatccggccatgaagactgtctacaagttcgcaaaagatcatgcaaaaatgggaataaaagaggtgaaaaaccgcttgaagcaaaaggacattgccgagaatggctgcgcccccaccccagaagagcagctgccaaagactgcaccgtccccactggtggaggccaaggaccccaagctccgagaagaccggcggccaatcacagtccactttggacaggtgcgcccacctcgtccacatgttgttaagagaccaaagagcaacatcgcagtggaaggccggaggacgtctgtgccgagccctgagcagccgcagccgtatcggacactcagggagtcagacagcgcggaaggcgacgaggcagagagtccagagcagcaagtgcggaagtccacaggccctgtcccagctccccctgaccgggctgccagcatcgaccttctggaagacgtcttcagcaacctggacatggaggccgcactgcagccactgggccaggccaagagcttagaggaccttcgtgcccccaaagacctgagggagcagccagggacctttgactatcagaggctggatctgggcgggagtgagaggagccgcggggtgacagtggccttgaagcttacccacccgtacaacaagctctggagcctgggccaggacgacatggccatccccagcaagcccccagctgcctcccctgagaagccctcggccctgctcgggaactccctggccctgcctcgaaggccccagaaccgggacagcatcctgaaccccagtgacaaggaggaggtgcccacccctactctgggcagcatcaccatcccccggccccaaggcaggaagaccccagagctgggcatcgtgcctccaccgcccattccccgcccggccaagctccaggctgccggcgccgcacttggtgacgtctcagagcggctgcagacggatcgggacaggcgagctgccctgagtccagggctcctgcctggtgttgtcccccaaggccccactgaactgctccagccgctcagccctggccccggggctgcaggcacgagcagtgacgccctgctcgccctcctggacccgctcagcacagcctggtcaggcagcaccctcccgtcacgccccgccaccccgaatgtagccaccccattcaccccccaattcagcttcccccctgcagggacacccaccccattcccacagccaccactcaacccctttgtcccatccatgccagcagccccacccaccctgcccctggtctccacaccagccgggcctttcggggcccctccagcttccctggggccggcttttgcgtccggcctcctgctgtccagtgctggcttctgtgcccctcacaggtctcagcccaacctctccgccctctccatgcccaacctctttggccagatgcccatgggcacccacacgagccccctacagccgctgggtcccccagcagttgccccgtcgaggatccgaacgttgcccctggcccgctcaagtgccagggctgctgagaccaagcaggggctggccctgaggcctggagaccccccgcttctgcctcccaggccccctcaaggcctggagccaacactgcagccctctgctcctcaacaggccagagacccctttgaggatttgttacagaaaaccaagcaagacgtgagcccgagtccggccctggccccggccccagactcggtggagcagctcaggaagcagtgggagaccttcgagtgagccgggccctgagggtgggggatgcaccgaggcccgagggtccgtccactgctgcggttccgaggctcccccgccactctctctctgcccaggttctgctggtgggaagggatgggacccctctctgctgccccctcctcccctccacactgcccatctctgatgtctggccctggggaatggcaccagttccagcctgggaatcaacccagttcctgagtgcccatcccaccccgcggttgcctctcctcggcacccttgattgggttttgcactaaagaggtcagctgggccaatgatattgctccagaccgagtcctacccaccttcccccggaagtgtcccaagaggctccgaaggcctcccctccgagcccagctctcctgtctcctccacagccaggccctgcacgcccacctcctcggacacaggtgacagggttaccctccagtttgagctcatctgcacgagacacaggtagcttggggttgaagttaggactcctcctgggctggaggatttacctggtggggcacttccagactgtttctagcaatatacacacacgttctttcctgtgtcttcaccccaaaacttcagttgattctgacctgggaggatctggggaccagggggtcttgggctgccttgtgatacacagccccagccaccctgcacgggggctgcgagcaccagcaactttgatttatagaaggaaaatggaaacccccatctgagtattttgggaggagcccccagccctcatccagctctggcacgctgatacctccaggtactcccctcactgtcaaagctggggctcagcctcttgtcatctggagctttgtgggcaaagctgagaagctgcaacccagatttcaacccaaaaaggtcaagctgaatgcctcagactgatgtggaaggcagctggccttcctgggttggaacgaggcagtggccctgagccccttctccagggccaggtagaaaggacaaacttggtctctgcctcggggaagcaggaggagggctagaagccagtccctccccacctgcccagagctccaggccagcacagaaattcctgaggccaacgtcaccaaagttagattgaatgtttattatctttctttttcctttttaccttattgatttgatgaatcttgaaatggattcatttccataaaccaagttaaagtatggcccgaccatttaagaaaacaaccatctgagacacgcaggaaattgtgagcatttcgacccgagctctcatttcctatttgtgaagggtcagacacagtctacccaggggtgtctgggggacaagggggtctctggagatgtcacccagggagccccctctatgtctgagaggctgccactgctgcacatgctcagtgaggcttggcggccatcctggcacatggctcttcctgggtcaaccgtgacctgtctggctcaggaatgggctctggctgctgggggagccgtgtcactcctgggccatgggggcacctcctgggcacttaggtgtttcagcatagattccagtttcgcaccctgggcagacccccaggccccatccgggatagggcagaggaggtgctggcggccccagggaaggagggtgtgtaccccaaggccccctggctgtgctgaggggctggggtgagcgctccatgttcacatgagcactgctgcctcttcacttgtgggactttttgcaaacccaaggatgaactttgtgtgcattcaataaaatcatcttggggaagaaaaaaaaaaaaaaaaaaaaaaaaaaaaaaaaaaaaaagggggggggggcaaaaaatttctcctgtcagggggggcaagtgttttagcggttaccccagtttttttgggtaaaagggggccccaaaagaggaggcgctgttttataaaagagcagaggaagaggggccgggtttaaaacgcgcgcgttggcgggggaaacagggctcacggggagaattttgtggaaaaaaacccctttttggggggggggcctattggggcccacacttcctaacgaaattaaggctggagcaaaataaacatttccagggttagggtagcagcaggatagttgccgtgaaattggtaggatgttggaattg

SEQ ID NO: 429081 - DNA, 2989 bp, Homo sapiens
gcggcgcgcgccgggcacgcgcgccggcgaccatggcgttcgccgggctggagcgagtacattaacccctggaggcggcggcggcggcgagggagcgagcctcgagcgggcgggccccagcctgagggaagggaggaaggggcggggagagcgccagagggaggccggtcggccgcgggcgggcgggcagcgcagcgccgagcggggcccgcgggcccatgaggaggcctggggaccatgggctccaggatcaagcagaatccagagaccacatttgaagtatatgttgaagtggcctatcccaggacaggtggcactctttcagatcctgaggtgcagaggcaattcccggaggactacagtgaccaggaagttctacagactttgaccaagttttgtttccccttctatgtggacagcctcacagttagccaagttggccagaacttcacattcgtgctcactgacattgacagcaaacagagattcgggttctgccgcttatcttcaggagcgaagagctgcttctgtatcttaagctatctcccctggttcgaggtattttataagctgcttaacatcctggcagattacacgacaaaaagacaggaaaatcagtggaatgagcttcttgaaactctgcacaaacttcccatccctgacccaggagtgtctgtccatctcagcgtgcattcttattttactgtgcctgataccagagaacttcccagcatacctgagaatagaaatctgacagaatattttgtggctgtggatgttaacaacatgttgcatctgtacgccagtatgctgtacgaacgccggatactcatcatttgcagcaaactcagcactctgactgcctgcatccacgggtctgcggcgatgctctaccccatgtactggcagcacgtgtacatccccgtgctgccgccgcatctgctggactactgctgtgctcccatgccctacctcataggaatccatttaagtttaatggagaaagtcagaaacatggccctggatgatgtcgtgatcctgaatgtggacaccaacaccctggaaacccccttcgatgacctccagagcctcccaaacgacgtgatctcttccctgaagaacaggctgaaaaaggtctccacaaccactggggatggtgtggccagagcgttcctcaaggcccaggctgctttcttcggtagctaccgaaacgctctgaaaatcgagccggaggagccgatcactttctgtgaggaagccttcgtgtcccactaccgctccggagccatgaggcagttcctgcagaacgccacacagctgcagctcttcaagcagtttattgatggtcgattagatcttctcaattccggcgaaggtttcagtgatgtttttgaagaggaaatcaacatgggcgagtacgctggattcctgttgagattaaatcagagtacatgaggaaaggtttgtgcagtcatccaggacagttcctggcatggggactgtgtgcagcagtgacaaactgtaccatcagtggctctccactgtccggaaaggaagtggagcaattctgaatactgtaaagaccaaagcaaatccggccatgaagactgtctacaagttcgcaaaagatcatgcaaaaatgggaataaaagaggtgaaaaaccgcttgaagcaaaaggacattgccgagaatggctgcgcccccaccccagaagagcagctgccaaagactgcaccgtccccactggtggaggccaaggaccccaagctccgagaagaccggcggccaatcacagtccactttggacaggtgcgcccacctcgtccacatgttgttaagagaccaaagagcaacatcgcagtggaaggccggaggacgtctgtgccgagccctgagcagccgcagccgtatcggacactcagggagtcagacagcgcggaaggcgacgaggcagagagtccagagcagcaagtgcggaagtccacaggccctgtcccagctccccctgaccgggctgccagcatcgaccttctggaagacgtcttcagcaacctggacatggaggccgcactgcagccactgggccaggccaagagcttagaggaccttcgtgcccccaaagacctgagggagcagccagggacctttgactatcagaggctggatctgggcgggagtgagaggagccgcggggtgacagtggccttgaagcttacccacccgtacaacaagctctggagcctgggccaggacgacatggccatccccagcaagcccccagctgcctcccctgagaagccctcggccctgctcgggaactccctggccctgcctcgaaggccccagaaccgggacagcatcctgaaccccagtgacaaggaggaggtgcccacccctactctgggcagcatcaccatcccccggccccaaggcaggaagaccccagagctgggcatcgtgcctccaccgcccattccccgcccggccaagctccaggctgccggcgccgcacttggtgacgtctcagagcggctgcagacggatcgggacaggcgagctgccctgagtccagggctcctgcctggtgttgtcccccaaggccccactgaactgctccagccgctcagccctggccccggggctgcaggcacgagcagtgacgccctgctcgccctcctggacccgctcagcacagcctggtcaggcagcaccctcccgtcacgccccgccaccccgaatgtagccaccccattcaccccccaattcagcttcccccctgcagggacacccaccccattcccacagccaccactcaacccctttgtcccatccatgccagcagccccacccaccctgcccctggctgtgctgaggggctggggtgagcgctccatgttcacatgagcactgctgcctcttcacttgtgggactttttgcaaacccaaggatgaactttgtgtgcattcaataaaatcatcttggggaag

SEQ ID NO: 429082 - DNA, 3012 bp, Homo sapiens
gcggcgcgcgccgggcacgcgcgccggcgaccatggcgttcgccgggctggagcgagtacattaacccctggaggcggcggcggcggcgagggagcgagcctcgagcgggcgggccccagcctgagggaagggaggaaggggcggggagagcgccagagggaggccggtcggccgcgggcgggcgggcagcgcagcgccgagcggggcccgcgggcccatgaggaggcctggggaccatgggctccaggatcaagcagaatccagagaccacatttgaagtatatgttgaagtggcctatcccaggacaggtggcactctttcagatcctgaggtgcagaggcaattcccggaggactacagtgaccaggaagttctacagactttgaccaagttttgtttccccttctatgtggacagcctcacagttagccaagttggccagaacttcacattcgtgctcactgacattgacagcaaacagagattcgggttctgccgcttatcttcaggagcgaagagctgcttctgtatcttaagctatctcccctggttcgaggtattttataagctgcttaacatcctggcagattacacgacaaaaagacaggaaaatcagtggaatgagcttcttgaaactctgcacaaacttcccatccctgacccaggagtgtctgtccatctcagcgtgcattcttattttactgtgcctgataccagagaacttcccagcatacctgagaatagaaatctgacagaatattttgtggctgtggatgttaacaacatgttgcatctgtacgccagtatgctgtacgaacgccggatactcatcatttgcagcaaactcagcactctgactgcctgcatccacgggtctgcggcgatgctctaccccatgtactggcagcacgtgtacatccccgtgctgccgccgcatctgctggactactgctgtgctcccatgccctacctcataggaatccatttaagtttaatggagaaagtcagaaacatggccctggatgatgtcgtgatcctgaatgtggacaccaacaccctggaaacccccttcgatgacctccagagcctcccaaacgacgtgatctcttccctgaagaacaggctgaaaaaggtctccacaaccactggggatggtgtggccagagcgttcctcaaggcccaggctgctttcttcggtagctaccgaaacgctctgaaaatcgagccggaggagccgatcactttctgtgaggaagccttcgtgtcccactaccgctccggagccatgaggcagttcctgcagaacgccacacagctgcagctcttcaagcagtttattgatggtcgattagatcttctcaattccggcgaaggtttcagtgatgtttttgaagaggaaatcaacatgggcgagtacgctggattcctgttgagattaaatcagagtacatgaggaaaggtttgtgcagtcatccaggacagttcctggcatggggactgtgtgcagcagtgacaaactgtaccatcagtggctctccactgtccggaaaggaagtggagcaattctgaatactgtaaagaccaaagcaaatccggccatgaagactgtctacaagttcgcaaaagatcatgcaaaaatgggaataaaagaggtgaaaaaccgcttgaagcaaaaggacattgccgagaatggctgcgcccccaccccagaagagcagctgccaaagactgcaccgtccccactggtggaggccaaggaccccaagctccgagaagaccggcggccaatcacagtccactttggacaggtgcgcccacctcgtccacatgttgttaagagaccaaagagcaacatcgcagtggaaggccggaggacgtctgtgccgagccctgagcagccgcagccgtatcggacactcagggagtcagacagcgcggaaggcgacgaggcagagagtccagagcagcaagtgcggaagtccacaggccctgtcccagctccccctgaccgggctgccagcatcgaccttctggaagacgtcttcagcaacctggacatggaggccgcactgcagccactgggccaggccaagagcttagaggaccttcgtgcccccaaagacctgagggagcagccagggacctttgactatcagaggctggatctgggcgggagtgagaggagccgcggggtgacagtggccttgaagcttacccacccgtacaacaagctctggagcctgggccaggacgacatggccatccccagcaagcccccagctgcctcccctgagaagccctcggccctgctcgggaactccctggccctgcctcgaaggccccagaaccgggacagcatcctgaaccccagtgacaaggaggaggtgcccacccctactctgggcagcatcaccatcccccggccccaaggcaggaagaccccagagctgggcatcgtgcctccaccgcccattccccgcccggccaagctccaggctgccggcgccgcacttggtgacgtctcagagcggctgcagacggatcgggacaggcgagctgccctgagtccagggctcctgcctggtgttgtcccccaaggccccactgaactgctccagccgctcagccctggccccggggctgcaggcacgagcagtgacgccctgctcgccctcctggacccgctcagcacagcctggtcaggcagcaccctcccgtcacgccccgccaccccgaatgtagccaccccattcaccccccaattcagcttcccccctgcagggacacccaccccattcccacagccaccactcaacccctttgtcccatccatgccagcagccccacccaccctgcccctggctgtgctgaggggctggggtgagcgctccatgttcacatgagcactgctgcctcttcacttgtgggactttttgcaaacccaaggatgaactttgtgtgcattcaataaaatcatcttggggaagaaaaaaaaaaagtcgacgcggcc

SEQ ID NO: 429083 - DNA, 2286 bp, Homo sapiens
gcggcgcgcgccgggcacgcgcgccggcgaccatggcgttcgccgggctggagcgagtacattaacccctggaggcggcggcggcggcgagggagcgagcctcgagcgggcgggccccagcctgagggaagggaggaaggggcggggagagcgccagagggaggccggtcggccgcgggcgggcgggcagcgcagcgccgagcggggcccgcgggcccatgaggaggcctggggaccatgggctccaggatcaagcagaatccagagaccacatttgaagtatatgttgaagtggcctatcccaggacaggtggcactctttcagatcctgaggtgcagaggcaattcccggaggactacagtgaccaggaagttctacagactttgaccaagttttgtttccccttctatgtggacagcctcacagttagccaagttggccagaacttcacattcgtgctcactgacattgacagcaaacagagattcgggttctgccgcttatcttcaggagcgaagagctgcttctgtatcttaagctatctcccctggttcgaggtattttataagctgcttaacatcctggcagattacacgacaaaaagacaggaaaatcagtggaatgagcttcttgaaactctgcacaaacttcccatccctgacccaggagtgtctgtccatctcagcgtgcattcttattttactgtgcctgataccagagaacttcccagcatacctgagaatagaaatctgacagaatattttgtggctgtggatgttaacaacatgttgcatctgtacgccagtatgctgtacgaacgccggatactcatcatttgcagcaaactcagcactctgactgcctgcatccacgggtctgcggcgatgctctaccccatgtactggcagcacgtgtacatccccgtgctgccgccgcatctgctggactactgctgtgctcccatgccctacctcataggaatccatttaagtttaatggagaaagtcagaaacatggccctggatgatgtcgtgatcctgaatgtggacaccaacaccctggaaacccccttcgatgacctccagagcctcccaaacgacgtgatctcttccctgaagaacaggctgaaaaaggtctccacaaccactggggatggtgtggccagagcgttcctcaaggcccaggctgctttcttcggtagctaccgaaacgctctgaaaatcgagccggaggagccgatcactttctgtgaggaagccttcgtgtcccactaccgctccggagccatgaggcagttcctgcagaacgccacacagctgcagctcttcaagcagtttattgatggtcgattagatcttctcaattccggcgaaggtttcagtgatgtttttgaagaggaaatcaacatgggcgagtacgctggattcctgttgagattaaatcagagtacatgaggaaaggtttgtgcagtcatccaggacagttcctggcatggggactgtgtgcagcagtgacaaactgtaccatcagtggctctccactgtccggaaaggaagtggagcaattctgaatactgtaaagaccaaagcaaatccggccatgaagactgtctacaagttcgcaaaagatcatgcaaaaatgggaataaaagaggtgaaaaaccgcttgaagcaaaaggacattgccgagaatggctgcgcccccaccccagaagagcagctgccaaagactgcaccgtccccactggtggaggccaaggaccccaagctccgagaagaccggcggccaatcacagtccactttggacaggcaaattttcaaaaattttgaggagacagcacggctgaggtcataaatgagcgggactgttgaatgaagtcattaaatgcactgctgcctcccgtactccaaggcactctgcttaaggtgcctctgttagctaagcatctcattagaacactttagcatcccgggcccttctttgcaccttcaaataaaaggcaacaagcgaagtcttaaaaaaaaaatcaattaggagttctttattaatgtacttcctgaaaatcaatatcaggagtcgtgcttctgagagtaaacacccgtgctacaattctagagattcaattttttaagcaactgttttcaactacctgagcattagaaaaattgtctatttaattttttttcccttaagtaaaacattccactctgtatagaaactaaaattttgtatccccttcctacttgtaattatatttttggttaaaaaagattatgtacccttt

SEQ ID NO: 429084 - DNA, 2144 bp, Homo sapiens
gcggcgcgcgccgggcacgcgcgccggcgaccatggcgttcgccgggctggagcgagtacattaacccctggaggcggcggcggcggcgagggagcgagcctcgagcgggcgggccccagcctgagggaagggaggaaggggcggggagagcgccagagggaggccggtcggccgcgggcgggcgggcagcgcagcgccgagcggggcccgcgggcccatgaggaggcctggggaccatgggctccaggatcaagcagaatccagagaccacatttgaagtatatgttgaagtggcctatcccaggacaggtggcactctttcagatcctgaggtgcagaggcaattcccggaggactacagtgaccaggaagttctacagactttgaccaagttttgtttccccttctatgtggacagcctcacagttagccaagttggccagaacttcacattcgtgctcactgacattgacagcaaacagagattcgggttctgccgcttatcttcaggagcgaagagctgcttctgtatcttaagctatctcccctggttcgaggtattttataagctgcttaacatcctggcagattacacgacaaaaagacaggaaaatcagtggaatgagcttcttgaaactctgcacaaacttcccatccctgacccaggagtgtctgtccatctcagcgtgcattcttattttactgtgcctgataccagagaacttcccagcatacctgagaatagaaatctgacagaatattttgtggctgtggatgttaacaacatgttgcatctgtacgccagtatgctgtacgaacgccggatactcatcatttgcagcaaactcagcactctgactgcctgcatccacgggtctgcggcgatgctctaccccatgtactggcagcacgtgtacatccccgtgctgccgccgcatctgctggactactgctgtgctcccatgccctacctcataggaatccatttaagtttaatggagaaagtcagaaacatggccctggatgatgtcgtgatcctgaatgtggacaccaacaccctggaaacccccttcgatgacctccagagcctcccaaacgacgtgatctcttccctgaagaacaggctgaaaaaggtctccacaaccactggggatggtgtggccagagcgttcctcaaggcccaggctgctttcttcggtagctaccgaaacgctctgaaaatcgagccggaggagccgatcactttctgtgaggaagccttcgtgtcccactaccgctccggagccatgaggcagttcctgcagaacgccacacagctgcagctcttcaagcagtttattgatggtcgattagatcttctcaattccggcgaaggtttcagtgatgtttttgaagaggaaatcaacatgggcgagtacgctggcagtgacaaactgtaccatcagtggctctccactgtccggaaaggaagtggagcaattctgaatactgtaaagaccaaagcaaatccggccatgaagactgtctacaagttcgacattgccgagaatggctgcgcccccaccccagaagagcagctgccaaagactgcaccgtccccactggtggaggccaaggaccccaagctccgagaagaccggcggccaatcacagtccactttggacaggcaaattttcaaaaattttgaggagacagcacggctgaggtcataaatgagcgggactgttgaatgaagtcattaaatgcactgctgcctcccgtactccaaggcactctgcttaaggtgcctctgttagctaagcatctcattagaacactttagcatcccgggcccttctttgcaccttcaaataaaaggcaacaagcgaagtcttaaaaaaaaaatcaattaggagttctttattaatgtacttcctgaaaatcaatatcaggagtcgtgcttctgagagtaaacacccgtgctacaattctagagattcaattttttaagcaactgttttcaactacctgagcattagaaaaattgtctatttaattttttttcccttaagtaaaacattccactctgtatagaaactaaaattttgtatccccttcctacttgtaattatatttttggttaaaaaagattatgtacccttt

SEQ ID NO: 429085 - DNA, 1156 bp, Homo sapiens
gcggcgcgcgccgggcacgcgcgccggcgaccatggcgttcgccgggctggagcgagtacattaacccctggaggcggcggcggcggcgagggagcgagcctcgagcgggcgggccccagcctgagggaagggaggaaggggcggggagagcgccagagggaggccggtcggccgcgggcgggcgggcagcgcagcgccgagcggggcccgcgggcccatgaggaggcctggggaccatgggctccaggatcaagcagaatccagagaccacatttgaagtatatgttgaagtggcctatcccaggacaggtggcactctttcagatcctgaggtgcagaggcaattcccggaggactacagtgaccaggaagttctacagactttgaccaagttttgtttccccttctatgtggacagcctcacagttagccaagttggccagaacttcacattcgtgctcactgacattgacagcaaacagagattcgggttctgccgcttatcttcaggagcgaagagctgcttctgtatcttaagctatctcccctggttcgaggtattttataagctgcttaacatcctggcagattacacgacaaaaagacaggaaaatcagtggaatgagcttcttgaaactctgcacaaacttcccatccctgacccaggagtgtctgtccatctcagcgtgcattcttattttactgtgcctgataccagagaacttcccagcatacctgagaatagaaatctgacagaatattttgtggctgtggatgttaacaacatgttgcatctgtacgccagtatgctgtacgaacgccggatactcatcatttgcagcaaactcagcactctgactgcctgcatccacgggtctgcggcgatgctctaccccatgtactggcagcacgtgtacatccccgtgctgccgccgcatctgctggactactgctgtgctcccatgccctacctcataggaatccatttaagtttaatggagaaagtcagaaacatggccctggatgatgtcgtgatcctgaatgtggacaccaacaccctggaaacccccttcgatgacctccagagcctcccaaacgacgtggaagagagcatcgtgatccagtgagccttgccctaagcgtgtgtgtatgatt

SEQ ID NO: 429086 - DNA, 447 bp, Homo sapiens
cctggtgggaacatgagggatggattatgattgcccccttatggagagaacgctgcatggcacctgagtgcctcggactaaagattcctccttaaggggatgaaatttgtcacatttctttgaagtcccctctttaaaactggactaaaccttttagacactgtaccaggatacagggtcacaggcctgttgatattgagatgtaaacccagaatattcttgcattacacagaaacaccattgcaacaccagctacactccacatcctacagaaaagcattacccattttgcggccaagttcccgacgagaggctggacctcttcatcacattgacttacgccgttgcttttccagactgggcagaggggctgacttcgcagtgtgtgccaaagagccggtgtctgataatcccattttcctgcttatcacctgaactgtgtcagta

SEQ ID NO: 429087 - DNA, 312 bp, Homo sapiens
ccgagtccttccttgtgctcatcaacatagcagcctcagctgccccccttggatcccctgccagggctgctatcatcttctgatcaaatattaatgtgtgatcctctgcttgctcactaatccaaagccaattaatattatctgtcaattatttacagatcctgaggtgcagaggcaattcccggaggactacagtgaccaggttcggaatgcgtaattaattttttacatgacaaaatttatttcagagttgttcaacatattattactgttctttttactgaaagagataaatgaatttttagaagggaa

SEQ ID NO: 429088 - DNA, 3677 bp, Homo sapiens
tctagcagttccccaggatcaacgtccaacgaaaatcatcagggagagtacgctgagaagatgacaaaatgtaccatcagatggctctccactgtccggaaaggaagtggagcaattctgaatactgtaaagaccaaagcaaatccggccatgaagactgtctacaagttcgcaaaagatcatgcaaaaatgggaataaaagaggtgaaaaaccgcttgaagcaaaaggacattgccgagaatggctgcgcccccaccccagaagagcagctgccaaagactgcaccgtccccactggtggaggccaaggaccccaagctccgagaagaccggcggccaatcacagtccactttggacaggtgcgcccacctcgtccacatgttgttaagagaccaaagagcaacatcgcagtggaaggccggaggacgtctgtgccgagccctgagcagccgcagccgtatcggacactcagggagtcagacagcgcggaaggcgacgaggcagagagtccagagcagcaagtgcggaagtccacaggccctgtcccagctccccctgaccgggctgccagcatcgaccttctggaagacgtcttcagcaacctggacatggaggccgcactgcagccactgggccaggccaagagcttagaggaccttcgtgcccccaaagacctgagggagcagccagggacctttgactatcagaggctggatctgggcgggagtgagaggagccgcggggtgacagtggccttgaagcttacccacccgtacaacaagctctggagcctgggccaggacgacatggccatccccagcaagcccccagctgcctcccctgagaagccctcggccctgctcgggaactccctggccctgcctcgaaggccccagaaccgggacagcatcctgaaccccagtgacaaggaggaggtgcccacccctactctgggcagcatcaccatcccccggccccaaggcaggaagaccccagagctgggcatcgtgcctccaccgcccattccccgcccggccaagctccaggctgccggcgccgcacttggtgacgtctcagagcggctgcagacggatcgggacaggcgagctgccctgagtccagggctcctgcctggtgttgtcccccaaggccccactgaactgctccagccgctcagccctggccccggggctgcaggcacgagcagtgacgccctgctcgccctcctggacccgctcagcacagcctggtcaggcagcaccctcccgtcacgccccgccaccccgaatgtagccaccccattcaccccccaattcagcttcccccctgcagggacacccaccccattcccacagccaccactcaacccctttgtcccatccatgccagcagccccacccaccctgcccctggtctccacaccagccgggcctttcggggcccctccagcttccctggggccggcttttgcgtccggcctcctgctgtccagtgctggcttctgtgcccctcacaggtctcagcccaacctctccgccctctccatgcccaacctctttggccagatgcccatgggcacccacacgagccccctacagccgctgggtcccccagcagttgccccgtcgaggatccgaacgttgcccctggcccgctcaagtgccagggctgctgagaccaagcaggggctggccctgaggcctggagaccccccgcttctgcctcccaggccccctcaaggcctggagccaacactgcagccctctgctcctcaacaggccagagacccctttgaggatttgttacagaaaaccaagcaagacgtgagcccgagtccggccctggccccggccccagactcggtggagcagctcaggaagcagtgggagaccttcgagtgagccgggccctgagggtgggggatgcaccgaggcccgagggtccgtccactgctgcggttccgaggctcccccgccactctctctctgcccaggttctgctggtgggaagggatgggacccctctctgctgccccctcctcccctccacactgcccatctctgatgtctggccctggggaatggcaccagttccagcctgggaatcaacccagttcctgagtgcccatcccaccccgcggttgcctctcctcggcacccttgattgggttttgcactaaagaggtcagctgggccaatgatattgctccagaccgagtcctacccaccttcccccggaagtgtcccaagaggctccgaaggcctcccctccgagcccagctctcctgtctcctccacagccaggccctgcacgcccacctcctcggacacaggtgacagggttaccctccagtttgagctcatctgcacgagacacaggtagcttggggttgaagttaggactcctcctgggctggaggatttacctggtggggcacttccagactgtttctagcaatatacacacacgttctttcctgtgtcttcaccccaaaacttcagttgattctgacctgggaggatctggggaccagggggtcttgggctgccttgtgatacacagccccagccaccctgcacgggggctgcgagcaccagcaactttgatttatagaaggaaaatggaaacccccatctgagtattttgggaggagcccccagccctcatccagctctggcacgctgatacctccaggtactcccctcactgtcaaagctggggctcagcctcttgtcatctggagctttgtgggcaaagctgagaagctgcaacccagatttcaacccaaaaaggtcaagctgaatgcctcagactgatgtggaaggcagctggccttcctgggttggaacgaggcagtggccctgagccccttctccagggccaggtagaaaggacaaacttggtctctgcctcggggaagcaggaggagggctagaagccagtccctccccacctgcccagagctccaggccagcacagaaattcctgaggccaacgtcaccaaagttagattgaatgtttattatctttctttttcctttttaccttattgatttgatgaatcttgaaatggattcatttccataaaccaagttaaagtatggcccgaccatttaagaaaacaaccatctgagacacgcaggaaattgtgagcatttcgacccgagctctcatttcctatttgtgaagggtcagacacagtctacccaggggtgtctgggggacaagggggtctctggagatgtcacccagggagccccctctatgtctgagaggctgccactgctgcacatgctcagtgaggcttggcggccatcctggcacatggctcttcctgggtcaaccgtgacctgtctggctcaggaatgggctctggctgctgggggagccgtgtcactcctgggccatgggggcacctcctgggcacttaggtgtttcagcatagattccagtttcgcaccctgggcagacccccaggccccatccgggatagggcagaggaggtgctggcggccccagggaaggagggtgtgtaccccaaggccccctggctgtgctgaggggctggggtgagcgctccatgttcacatgagcactgctgcctcttcacttgtgggactttttgcaaacccaaggatgaactttgtgtgcattcaataaaatcatcttggggaag

SEQ ID NO: 429089 - DNA, 5127 bp, Homo sapiens
gcggcgcgcgccgggcacgcgcgccggcgaccatggcgttcgccgggctggagcgagtacattaacccctggaggcggcggcggcggcgagggagcgagcctcgagcgggcgggccccagcctgagggaagggaggaaggggcggggagagcgccagagggaggccggtcggccgcgggcgggcgggcagcgcagcgccgagcggggcccgcgggcccatgaggaggcctggggaccatgggctccaggatcaagcagaatccagagaccacatttgaagtatatgttgaagtggcctatcccaggacaggtggcactctttcagatcctgaggtgcagaggcaattcccggaggactacagtgaccaggaagttctacagactttgaccaagttttgtttccccttctatgtggacagcctcacagttagccaagttggccagaacttcacattcgtgctcactgacattgacagcaaacagagattcgggttctgccgcttatcttcaggagcgaagagctgcttctgtatcttaagctatctcccctggttcgaggtattttataagctgcttaacatcctggcagattacacgacaaaaagacaggaaaatcagtggaatgagcttcttgaaactctgcacaaacttcccatccctgacccaggagtgtctgtccatctcagcgtgcattcttattttactgtgcctgataccagagaacttcccagcatacctgagaatagaaatctgacagaatattttgtggctgtggatgttaacaacatgttgcatctgtacgccagtatgctgtacgaacgccggatactcatcatttgcagcaaactcagcactctgactgcctgcatccacgggtctgcggcgatgctctaccccatgtactggcagcacgtgtacatccccgtgctgccgccgcatctgctggactactgctgtgctcccatgccctacctcataggaatccatttaagtttaatggagaaagtcagaaacatggccctggatgatgtcgtgatcctgaatgtggacaccaacaccctggaaacccccttcgatgacctccagagcctcccaaacgacgtgatctcttccctgaagaacaggctgaaaaaggtctccacaaccactggggatggtgtggccagagcgttcctcaaggcccaggctgctttcttcggtagctaccgaaacgctctgaaaatcgagccggaggagccgatcactttctgtgaggaagccttcgtgtcccactaccgctccggagccatgaggcagttcctgcagaacgccacacagctgcagctcttcaagcagtttattgatggtcgattagatcttctcaattccggcgaaggtttcagtgatgtttttgaagaggaaatcaacatgggcgagtacgctggattcctgttgagattaaatcagagtacatgaggaaaggtttgtgcagtcatccaggacagttcctggcatggggactgtgtgcagcagtgacaaactgtaccatcagtggctctccactgtccggaaaggaagtggagcaattctgaatactgtaaagaccaaagcaaatccggccatgaagactgtctacaagttcgcaaaagatcatgcaaaaatgggaataaaagaggtgaaaaaccgcttgaagcaaaaggacattgccgagaatggctgcgcccccaccccagaagagcagctgccaaagactgcaccgtccccactggtggaggccaaggaccccaagctccgagaagaccggcggccaatcacagtccactttggacaggtgcgcccacctcgtccacatgttgttaagagaccaaagagcaacatcgcagtggaaggccggaggacgtctgtgccgagccctgagcagccgcagccgtatcggacactcagggagtcagacagcgcggaaggcgacgaggcagagagtccagagcagcaagtgcggaagtccacaggccctgtcccagctccccctgaccgggctgccagcatcgaccttctggaagacgtcttcagcaacctggacatggaggccgcactgcagccactgggccaggccaagagcttagaggaccttcgtgcccccaaagacctgagggagcagccagggacctttgactatcagaggctggatctgggcgggagtgagaggagccgcggggtgacagtggccttgaagcttacccacccgtacaacaagctctggagcctgggccaggacgacatggccatccccagcaagcccccagctgcctcccctgagaagccctcggccctgctcgggaactccctggccctgcctcgaaggccccagaaccgggacagcatcctgaaccccagtgacaaggaggaggtgcccacccctactctgggcagcatcaccatcccccggccccaaggcaggaagaccccagagctgggcatcgtgcctccaccgcccattccccgcccggccaagctccaggctgccggcgccgcacttggtgacgtctcagagcggctgcagacggatcgggacaggcgagctgccctgagtccagggctcctgcctggtgttgtcccccaaggccccactgaactgctccagccgctcagccctggccccggggctgcaggcacgagcagtgacgccctgctcgccctcctggacccgctcagcacagcctggtcaggcagcaccctcccgtcacgccccgccaccccgaatgtagccaccccattcaccccccaattcagcttcccccctgcagggacacccaccccattcccacagccaccactcaacccctttgtcccatccatgccagcagccccacccaccctgcccctggtctccacaccagccgggcctttcggggcccctccagcttccctggggccggcttttgcgtccggcctcctgctgtccagtgctggcttctgtgcccctcacaggtctcagcccaacctctccgccctctccatgcccaacctctttggccagatgcccatgggcacccacacgagccccctacagccgctgggtcccccagcagttgccccgtcgaggatccgaacgttgcccctggcccgctcaagtgccagggctgctgagaccaagcaggggctggccctgaggcctggagaccccccgcttctgcctcccaggccccctcaaggcctggagccaacactgcagccctctgctcctcaacaggccagagacccctttgaggatttgttacagaaaaccaagcaagacgtgagcccgagtccggccctggccccggccccagactcggtggagcagctcaggaagcagtgggagaccttcgagtgagccgggccctgagggtgggggatgcaccgaggcccgagggtccgtccactgctgcggttccgaggctcccccgccactctctctctgcccaggttctgctggtgggaagggatgggacccctctctgctgccccctcctcccctccacactgcccatctctgatgtctggccctggggaatggcaccagttccagcctgggaatcaacccagttcctgagtgcccatcccaccccgcggttgcctctcctcggcacccttgattgggttttgcactaaagaggtcagctgggccaatgatattgctccagaccgagtcctacccaccttcccccggaagtgtcccaagaggctccgaaggcctcccctccgagcccagctctcctgtctcctccacagccaggccctgcacgcccacctcctcggacacaggtgacagggttaccctccagtttgagctcatctgcacgagacacaggtagcttggggttgaagttaggactcctcctgggctggaggatttacctggtggggcacttccagactgtttctagcaatatacacacacgttctttcctgtgtcttcaccccaaaacttcagttgattctgacctgggaggatctggggaccagggggtcttgggctgccttgtgatacacagccccagccaccctgcacgggggctgcgagcaccagcaactttgatttatagaaggaaaatggaaacccccatctgagtattttgggaggagcccccagccctcatccagctctggcacgctgatacctccaggtactcccctcactgtcaaagctggggctcagcctcttgtcatctggagctttgtgggcaaagctgagaagctgcaacccagatttcaacccaaaaaggtcaagctgaatgcctcagactgatgtggaaggcagctggccttcctgggttggaacgaggcagtggccctgagccccttctccagggccaggtagaaaggacaaacttggtctctgcctcggggaagcaggaggagggctagaagccagtccctccccacctgcccagagctccaggccagcacagaaattcctgaggccaacgtcaccaaagttagattgaatgtttattatctttctttttcctttttaccttattgatttgatgaatcttgaaatggattcatttccataaaccaagttaaagtatggcccgaccatttaagaaaacaaccatctgagacacgcaggaaattgtgagcatttcgacccgagctctcatttcctatttgtgaagggtcagacacagtctacccaggggtgtctgggggacaagggggtctctggagatgtcacccagggagccccctctatgtctgagaggctgccactgctgcacatgctcagtgaggcttggcggccatcctggcacatggctcttcctgggtcaaccgtgacctgtctggctcaggaatgggctctggctgctgggggagccgtgtcactcctgggccatgggggcacctcctgggcacttaggtgtttcagcatagattccagtttcgcaccctgggcagacccccaggccccatccgggatagggcagaggaggtgctggcggccccagggaaggagggtgtgtaccccaaggccccctggctgtgctgaggggctggggtgagcgctccatgttcacatgagcactgctgcctcttcacttgtgggactttttgcaaacccaaggatgaactttgtgtgcattcaataaaatcatcttggggaag

SEQ ID NO: 429090 - DNA, 5000 bp, Homo sapiens
gcggcgcgcgccgggcacgcgcgccggcgaccatggcgttcgccgggctggagcgagtacattaacccctggaggcggcggcggcggcgagggagcgagcctcgagcgggcgggccccagcctgagggcagaatccagagaccacatttgaagtatatgttgaagtggcctatcccaggacaggtggcactctttcagatcctgaggtgcagaggcaattcccggaggactacagtgaccaggaagttctacagactttgaccaagttttgtttccccttctatgtggacagcctcacagttagccaagttggccagaacttcacattcgtgctcactgacattgacagcaaacagagattcgggttctgccgcttatcttcaggagcgaagagctgcttctgtatcttaagctatctcccctggttcgaggtattttataagctgcttaacatcctggcagattacacgacaaaaagacaggaaaatcagtggaatgagcttcttgaaactctgcacaaacttcccatccctgacccaggagtgtctgtccatctcagcgtgcattcttattttactgtgcctgataccagagaacttcccagcatacctgagaatagaaatctgacagaatattttgtggctgtggatgttaacaacatgttgcatctgtacgccagtatgctgtacgaacgccggatactcatcatttgcagcaaactcagcactctgactgcctgcatccacgggtctgcggcgatgctctaccccatgtactggcagcacgtgtacatccccgtgctgccgccgcatctgctggactactgctgtgctcccatgccctacctcataggaatccatttaagtttaatggagaaagtcagaaacatggccctggatgatgtcgtgatcctgaatgtggacaccaacaccctggaaacccccttcgatgacctccagagcctcccaaacgacgtgatctcttccctgaagaacaggctgaaaaaggtctccacaaccactggggatggtgtggccagagcgttcctcaaggcccaggctgctttcttcggtagctaccgaaacgctctgaaaatcgagccggaggagccgatcactttctgtgaggaagccttcgtgtcccactaccgctccggagccatgaggcagttcctgcagaacgccacacagctgcagctcttcaagcagtttattgatggtcgattagatcttctcaattccggcgaaggtttcagtgatgtttttgaagaggaaatcaacatgggcgagtacgctggattcctgttgagattaaatcagagtacatgaggaaaggtttgtgcagtcatccaggacagttcctggcatggggactgtgtgcagcagtgacaaactgtaccatcagtggctctccactgtccggaaaggaagtggagcaattctgaatactgtaaagaccaaagcaaatccggccatgaagactgtctacaagttcgcaaaagatcatgcaaaaatgggaataaaagaggtgaaaaaccgcttgaagcaaaaggacattgccgagaatggctgcgcccccaccccagaagagcagctgccaaagactgcaccgtccccactggtggaggccaaggaccccaagctccgagaagaccggcggccaatcacagtccactttggacaggtgcgcccacctcgtccacatgttgttaagagaccaaagagcaacatcgcagtggaaggccggaggacgtctgtgccgagccctgagcagccgcagccgtatcggacactcagggagtcagacagcgcggaaggcgacgaggcagagagtccagagcagcaagtgcggaagtccacaggccctgtcccagctccccctgaccgggctgccagcatcgaccttctggaagacgtcttcagcaacctggacatggaggccgcactgcagccactgggccaggccaagagcttagaggaccttcgtgcccccaaagacctgagggagcagccagggacctttgactatcagaggctggatctgggcgggagtgagaggagccgcggggtgacagtggccttgaagcttacccacccgtacaacaagctctggagcctgggccaggacgacatggccatccccagcaagcccccagctgcctcccctgagaagccctcggccctgctcgggaactccctggccctgcctcgaaggccccagaaccgggacagcatcctgaaccccagtgacaaggaggaggtgcccacccctactctgggcagcatcaccatcccccggccccaaggcaggaagaccccagagctgggcatcgtgcctccaccgcccattccccgcccggccaagctccaggctgccggcgccgcacttggtgacgtctcagagcggctgcagacggatcgggacaggcgagctgccctgagtccagggctcctgcctggtgttgtcccccaaggccccactgaactgctccagccgctcagccctggccccggggctgcaggcacgagcagtgacgccctgctcgccctcctggacccgctcagcacagcctggtcaggcagcaccctcccgtcacgccccgccaccccgaatgtagccaccccattcaccccccaattcagcttcccccctgcagggacacccaccccattcccacagccaccactcaacccctttgtcccatccatgccagcagccccacccaccctgcccctggtctccacaccagccgggcctttcggggcccctccagcttccctggggccggcttttgcgtccggcctcctgctgtccagtgctggcttctgtgcccctcacaggtctcagcccaacctctccgccctctccatgcccaacctctttggccagatgcccatgggcacccacacgagccccctacagccgctgggtcccccagcagttgccccgtcgaggatccgaacgttgcccctggcccgctcaagtgccagggctgctgagaccaagcaggggctggccctgaggcctggagaccccccgcttctgcctcccaggccccctcaaggcctggagccaacactgcagccctctgctcctcaacaggccagagacccctttgaggatttgttacagaaaaccaagcaagacgtgagcccgagtccggccctggccccggccccagactcggtggagcagctcaggaagcagtgggagaccttcgagtgagccgggccctgagggtgggggatgcaccgaggcccgagggtccgtccactgctgcggttccgaggctcccccgccactctctctctgcccaggttctgctggtgggaagggatgggacccctctctgctgccccctcctcccctccacactgcccatctctgatgtctggccctggggaatggcaccagttccagcctgggaatcaacccagttcctgagtgcccatcccaccccgcggttgcctctcctcggcacccttgattgggttttgcactaaagaggtcagctgggccaatgatattgctccagaccgagtcctacccaccttcccccggaagtgtcccaagaggctccgaaggcctcccctccgagcccagctctcctgtctcctccacagccaggccctgcacgcccacctcctcggacacaggtgacagggttaccctccagtttgagctcatctgcacgagacacaggtagcttggggttgaagttaggactcctcctgggctggaggatttacctggtggggcacttccagactgtttctagcaatatacacacacgttctttcctgtgtcttcaccccaaaacttcagttgattctgacctgggaggatctggggaccagggggtcttgggctgccttgtgatacacagccccagccaccctgcacgggggctgcgagcaccagcaactttgatttatagaaggaaaatggaaacccccatctgagtattttgggaggagcccccagccctcatccagctctggcacgctgatacctccaggtactcccctcactgtcaaagctggggctcagcctcttgtcatctggagctttgtgggcaaagctgagaagctgcaacccagatttcaacccaaaaaggtcaagctgaatgcctcagactgatgtggaaggcagctggccttcctgggttggaacgaggcagtggccctgagccccttctccagggccaggtagaaaggacaaacttggtctctgcctcggggaagcaggaggagggctagaagccagtccctccccacctgcccagagctccaggccagcacagaaattcctgaggccaacgtcaccaaagttagattgaatgtttattatctttctttttcctttttaccttattgatttgatgaatcttgaaatggattcatttccataaaccaagttaaagtatggcccgaccatttaagaaaacaaccatctgagacacgcaggaaattgtgagcatttcgacccgagctctcatttcctatttgtgaagggtcagacacagtctacccaggggtgtctgggggacaagggggtctctggagatgtcacccagggagccccctctatgtctgagaggctgccactgctgcacatgctcagtgaggcttggcggccatcctggcacatggctcttcctgggtcaaccgtgacctgtctggctcaggaatgggctctggctgctgggggagccgtgtcactcctgggccatgggggcacctcctgggcacttaggtgtttcagcatagattccagtttcgcaccctgggcagacccccaggccccatccgggatagggcagaggaggtgctggcggccccagggaaggagggtgtgtaccccaaggccccctggctgtgctgaggggctggggtgagcgctccatgttcacatgagcactgctgcctcttcacttgtgggactttttgcaaacccaaggatgaactttgtgtgcattcaataaaatcatcttggggaag

SEQ ID NO: 429091 - DNA, 5073 bp, Homo sapiens
gcggcgcgcgccgggcacgcgcgccggcgaccatggcgttcgccgggctggagcgagtacattaacccctggaggcggcggcggcggcgagggagcgagcctcgagcgggcgggccccagcctgagggaagggaggaaggggcggggagagcgccagagggaggccggtcggccgcgggcgggcgggcagcgcagcgccgagcggggcccgcgggcccatgaggaggcctggggaccatgggctccaggatcaagcagaatccagagaccacatttgaagtatatgttgaagtggcctatcccaggacaggtggcactctttcagatcctgaggtgcagaggcaattcccggaggactacagtgaccaggaagttctacagactttgaccaagttttgtttccccttctatgtggacagcctcacagttagccaagttggccagaacttcacattcgtgctcactgacattgacagcaaacagagattcgggttctgccgcttatcttcaggagcgaagagctgcttctgtatcttaagctatctcccctggttcgaggtattttataagctgcttaacatcctggcagattacacgacaaaaagacaggaaaatcagtggaatgagcttcttgaaactctgcacaaacttcccatccctgacccaggagtgtctgtccatctcagcgtgcattcttattttactgtgcctgataccagagaacttcccagcatacctgagaatagaaatctgacagaatattttgtggctgtggatgttaacaacatgttgcatctgtacgccagtatgctgtacgaacgccggatactcatcatttgcagcaaactcagcactctgactgcctgcatccacgggtctgcggcgatgctctaccccatgtactggcagcacgtgtacatccccgtgctgccgccgcatctgctggactactgctgtgctcccatgccctacctcataggaatccatttaagtttaatggagaaagtcagaaacatggccctggatgatgtcgtgatcctgaatgtggacaccaacaccctggaaacccccttcgatgacctccagagcctcccaaacgacgtgatctcttccctgaagaacaggctgaaaaaggtctccacaaccactggggatggtgtggccagagcgttcctcaaggcccaggctgctttcttcggtagctaccgaaacgctctgaaaatcgagccggaggagccgatcactttctgtgaggaagccttcgtgtcccactaccgctccggagccatgaggcagttcctgcagaacgccacacagctgcagctcttcaagcagtttattgatggtcgattagatcttctcaattccggcgaaggtttcagtgatgtttttgaagaggaaatcaacatgggcgagtacgctggattcctgttgagattaaatcagagtacatgaggaaaggtttgtgcagtcatccaggacagttcctggcatggggactgtgtgcagcagtgacaaactgtaccatcagtggctctccactgtccggaaaggaagtggagcaattctgaatactgtaaagaccaaagcaaatccggccatgaagactgtctacaagttcgcaaaagatcatgcaaaaatgggaataaaagaggtgaaaaaccgcttgaagcaaaaggacattgccgagaatggctgcgcccccaccccagaagagcagctgccaaagactgcaccgtccccactggtggaggccaaggaccccaagctccgagaagaccggcggccaatcacagtccactttggacaggtgcgcccacctcgtccacatgttgttaagagaccaaagagcaacatcgcagtggaaggccggaggacgtctgtgccgagccctgagcagccgcagccgtatcggacactcagggagtcagacagcgcggaaggcgacgaggcagagagtccagagcagcaagtgcggaagtccacaggccctgtcccagctccccctgaccgggctgccagcatcgaccttctggaagacgtcttcagcaacctggacatggaggccgcactgcagccactgggccaggccaagagcttagaggaccttcgtgcccccaaagacctgagggagcagccagggacctttgactatcagaggctggatctgggcgggagtgagaggagccgcggggtgacagtggccttgaagcttacccacccgtacaacaagctctggagcctgggccaggacgacatggccatccccagcaagcccccagctgcctcccctgagaagccctcggccctgctcgggaactccctggccctgcctcgaaggccccagaaccgggacagcatcctgaaccccagtgacaaggaggaggtgcccacccctactctgggcagcatcaccatcccccggccccaaggcaggaagaccccagagctgggcatcgtgcctccaccgcccattccccgcccggccaagctccaggctgccggcgccgcacttggtgacgtctcagagcggctgcagacggatcgggacaggcgagctgccctgagtccagggctcctgcctggtgttgtcccccaaggccccactgaactgctccagccgctcagccctggccccggggctgcaggcacgagcagtgacgccctgctcgccctcctggacccgctcagcacagcctggtcaggcagcaccctcccgtcacgccccgccaccccgaatgtagccaccccattcaccccccaattcagcttcccccctgcagggacacccaccccattcccacagccaccactcaacccctttgtcccatccatgccagcagccccacccaccctgcccctggtctccacaccagccgggcctttcggggcccctccagcttccctggggccggcttttgcgtccggcctcctgctgtccagtgctggcttctgtgcccctcacaggtctcagcccaacctctccgccctctccatgcccaacctctttggccagatgcccatgggcacccacacgagccccctacagccgctgggtcccccagcagttgccccgtcgaggatccgaacgttgcccctggcccgctcaagtgccagggctgctgagaccaagcaggggctggccctgaggcctggagaccccccgcttctgcctcccaggccccctcaaggcctggagccaacactgcagccctctgctcctcaacaggccagagacccctttgaggatttgttacagaaaaccaagcaagacgtgagcccgagtccggccctggccccggccccagactcggtggagcagctcaggaagcagtgggagaccttcgagtgagccgggccctgagggtgggggatgcaccgaggcccgagggtccgtccactgctgcggttccgaggctcccccgccactctctctctgcccaggttctgctggtgggaagggatgggacccctctctgctgccccctcctcccctccacactgcccatctctgatgtctggccctggggaatggcaccagttccagcctgggaatcaacccagttcctgagtgcccatcccaccccgcggttgcctctcctcggcacccttgattgggttttgcactaaagaggtcagctgggccaatgatattgctccagaccgagtcctacccaccttcccccggaagtgtcccaagaggctccgaaggcctcccctccgagcccagctctcctgtctcctccacagccaggccctgcacgcccacctcctcggacacaggtgacagggttaccctccagtttgagctcatctgcacgagacacaggtagcttggggttgaagttaggactcctcctgggctggaggatttacctggtggggcacttccagactgtttctagcaatatacacacacgttctttcctgtgtcttcaccccaaaacttcagttgattctgacctgggaggatctggggaccagggggtcttgggctgccttgtgatacacagccccagccaccctgcacgggggctgcgagcaccagcaactttgatttatagaaggaaaatggaaacccccatctgagtattttgggaggagcccccagccctcatccagctctggcacgctgatacctccaggtactcccctcactgtcaaagctggggctcagcctcttgtcatctggagctttgtgggcaaagctgagaagctgcaacccagatttcaacccagttggaacgaggcagtggccctgagccccttctccagggccaggtagaaaggacaaacttggtctctgcctcggggaagcaggaggagggctagaagccagtccctccccacctgcccagagctccaggccagcacagaaattcctgaggccaacgtcaccaaagttagattgaatgtttattatctttctttttcctttttaccttattgatttgatgaatcttgaaatggattcatttccataaaccaagttaaagtatggcccgaccatttaagaaaacaaccatctgagacacgcaggaaattgtgagcatttcgacccgagctctcatttcctatttgtgaagggtcagacacagtctacccaggggtgtctgggggacaagggggtctctggagatgtcacccagggagccccctctatgtctgagaggctgccactgctgcacatgctcagtgaggcttggcggccatcctggcacatggctcttcctgggtcaaccgtgacctgtctggctcaggaatgggctctggctgctgggggagccgtgtcactcctgggccatgggggcacctcctgggcacttaggtgtttcagcatagattccagtttcgcaccctgggcagacccccaggccccatccgggatagggcagaggaggtgctggcggccccagggaaggagggtgtgtaccccaaggccccctggctgtgctgaggggctggggtgagcgctccatgttcacatgagcactgctgcctcttcacttgtgggactttttgcaaacccaaggatgaactttgtgtgcattcaataaaatcatcttggggaag

SEQ ID NO: 429092 - DNA, 4369 bp, Homo sapiens
  misc_feature (4318)..(4318): n is a, c, g, or t
gcggcgcgcgccgggcacgcgcgccggcgaccatggcgttcgccgggctggagcgagtacattaacccctggaggcggcggcggcggcgagggagcgagcctcgagcgggcgggccccagcctgagggaagggaggaaggggcggggagagcgccagagggaggccggtcggccgcgggcgggcgggcagcgcagcgccgagcggggcccgcgggcccatgaggaggcctggggaccatgggctccaggatcaagcagaatccagagaccacatttgaagtatatgttgaagtggcctatcccaggacaggtggcactctttcagatcctgaggtgcagaggcaattcccggaggactacagtgaccaggaagttctacagactttgaccaagttttgtttccccttctatgtggacagcctcacagttagccaagttggccagaacttcacattcgtgctcactgacattgacagcaaacagagattcgggttctgccgcttatcttcaggagcgaagagctgcttctgtatcttaagctatctcccctggttcgaggtattttataagctgcttaacatcctggcagattacacgacaaaaagacaggaaaatcagtggaatgagcttcttgaaactctgcacaaacttcccatccctgacccaggagtgtctgtccatctcagcgtgcattcttattttactgtgcctgataccagagaacttcccagcatacctgagaatagaaatctgacagaatattttgtggctgtggatgttaacaacatgttgcatctgtacgccagtatgctgtacgaacgccggatactcatcatttgcagcaaactcagcactctgactgcctgcatccacgggtctgcggcgatgctctaccccatgtactggcagcacgtgtacatccccgtgctgccgccgcatctgctggactactgctgtgctcccatgccctacctcataggaatccatttaagtttaatggagaaagtcagaaacatggccctggatgatgtcgtgatcctgaatgtggacaccaacaccctggaaacccccttcgatgacctccagagcctcccaaacgacgtgatctcttccctgaagaacaggctgaaaaaggtctccacaaccactggggatggtgtggccagagcgttcctcaaggcccaggctgctttcttcggtagctaccgaaacgctctgaaaatcgagccggaggagccgatcactttctgtgaggaagccttcgtgtcccactaccgctccggagccatgaggcagttcctgcagaacgccacacagctgcagctcttcaagcagtttattgatggtcgattagatcttctcaattccggcgaaggtttcagtgatgtttttgaagaggaaatcaacatgggcgagtacgctggattcctgttgagattaaatcagagtacatgaggaaaggtttgtgcagtcatccaggacagttcctggcatggggactgtgtgcagcagtgacaaactgtaccatcagtggctctccactgtccggaaaggaagtggagcaattctgaatactgtaaagaccaaagcaaatccggccatgaagactgtctacaagttcgcaaaagatcatgcaaaaatgggaataaaagaggtgaaaaaccgcttgaagcaaaaggacattgccgagaatggctgcgcccccaccccagaagagcagctgccaaagactgcaccgtccccactggtggaggccaaggaccccaagctccgagaagaccggcggccaatcacagtccactttggacaggtgcgcccacctcgtccacatgttgttaagagaccaaagagcaacatcgcagtggaaggccggaggacgtctgtgccgagccctgagcagccgcagccgtatcggacactcagggagtcagacagcgcggaaggcgacgaggcagagagtccagagcagcaagtgcggaagtccacaggccctgtcccagctccccctgaccgggctgccagcatcgaccttctggaagacgtcttcagcaacctggacatggaggccgcactgcagccactgggccaggccaagagcttagaggaccttcgtgcccccaaagacctgagggagcagccagggacctttgactatcagaggctggatctgggcgggagtgagaggagccgcggggtgacagtggccttgaagcttacccacccgtacaacaagctctggagcctgggccaggacgacatggccatccccagcaagcccccagctgcctcccctgagaagccctcggccctgctcgggaactccctggccctgcctcgaaggccccagaaccgggacagcatcctgaaccccagtgacaaggaggaggtgcccacccctactctgggcagcatcaccatcccccggccccaaggcaggaagaccccagagctgggcatcgtgcctccaccgcccattccccgcccggccaagctccaggctgccggcgccgcacttggtgacgtctcagagcggctgcagacggatcgggacaggcgagctgccctgagtccagggctcctgcctggtgttgtcccccaaggccccactgaactgctccagccgctcagccctggccccggggctgcaggcacgagcagtgacgccctgctcgccctcctggacccgctcagcacagcctggtcaggcagcaccctcccgtcacgccccgccaccccgaatgtagccaccccattcaccccccaattcagcttcccccctgcagggacacccaccccattcccacagccaccactcaacccctttgtcccatccatgccagcagccccacccaccctgcccctggtctccacaccagccgggcctttcggggcccctccagcttccctggggccggcttttgcgtccggcctcctgctgtccagtgctggcttctgtgcccctcacaggtctcagcccaacctctccgccctctccatgcccaacctctttggccagatgcccatgggcacccacacgagccccctacagccgctgggtcccccagcagttgccccgtcgaggatccgaacgttgcccctggcccgctcaagtgccagggctgctgagaccaagcaggggctggccctgaggcctggagaccccccgcttctgcctcccaggccccctcaaggcctggagccaacactgcagccctctgctcctcaacaggccagagacccctttgaggatttgttacagaaaaccaagcaagacgtgagcccgagtccggccctggccccggccccagactcggtggagcagctcaggaagcagtgggagaccttcgagtgagccgggccctgagggtgggggatgcaccgaggcccgagggtccgtccactgctgcggttccgaggctcccccgccactctctctctgcccaggttctgctggtgggaagggatgggacccctctctgctgccccctcctcccctccacactgcccatctctgatgtctggccctggggaatggcaccagttccagcctgggaatcaacccagttcctgagtgcccatcccaccccgcggttgcctctcctcggcacccttgattgggttttgcactaaagaggtcagctgggccaatgatattgctccagaccgagtcctacccaccttcccccggaagtgtcccaagaggctccgaaggcctcccctccgagcccagctctcctgtctcctccacagccaggccctgcacgcccacctcctcggacacaggtgacagggttaccctccagtttgagctcatctgcacgagacacaggtagcttggggttgaagttaggactcctcctgggctggaggatttacctggtggggcacttccagactgtttctagcaatatacacacacgttctttcctgtgtcttcaccccaaaacttcagttgattctgacctgggaggatctggggaccagggggtcttgggctgccttgtgatacacagccccagccaccctgcacgggggctgcgagcaccagcaactttgatttatagaaggaaaatggaaacccccatctgagtattttgggaggagcccccagccctcatccagctctggcacgctgatacctccaggtactcccctcactgtcaaagctggggctcagcctcttgtcatctggagctttgtgggcaaagctgagaagctgcaacccagatttcaacccaacgaggcatgccctgagcccttctccaggcagtagaaggacaactggtctttgctcgtgaacaggagaggctagagcagncttcaactgccaagttcagcagttctcagagttgagccagatactgacccg

SEQ ID NO: 429093 - DNA, 2179 bp, Homo sapiens
gcggcgcgcgccgggcacgcgcgccggcgaccatggcgttcgccgggctggagcgagtacattaacccctggaggcggcggcggcggcgagggagcgagcctcgagcgggcgggccccagcctgagggaagggaggaaggggcggggagagcgccagagggaggccggtcggccgcgggcgggcgggcagcgcagcgccgagcggggcccgcgggcccatgaggaggcctggggaccatgggctccaggatcaagcagaatccagagaccacatttgaagtatatgttgaagtggcctatcccaggacaggtggcactctttcagatcctgaggtgcagaggcaattcccggaggactacagtgaccaggaagttctacagactttgaccaagttttgtttccccttctatgtggacagcctcacagttagccaagttggccagaacttcacattcgtgctcactgacattgacagcaaacagagattcgggttctgccgcttatcttcaggagcgaagagctgcttctgtatcttaagctatctcccctggttcgaggtattttataagctgcttaacatcctggcagattacacgacaaaaagacaggaaaatcagtggaatgagcttcttgaaactctgcacaaacttcccatccctgacccaggagtgtctgtccatctcagcgtgcattcttattttactgtgcctgataccagagaacttcccagcatacctgagaatagaaatctgacagaatattttgtggctgtggatgttaacaacatgttgcatctgtacgccagtatgctgtacgaacgccggatactcatcatttgcagcaaactcagcactctgactgcctgcatccacgggtctgcggcgatgctctaccccatgtactggcagcacgtgtacatccccgtgctgccgccgcatctgctggactactgctgtgctcccatgccctacctcataggaatccatttaagtttaatggagaaagtcagaaacatggccctggatgatgtcgtgatcctgaatgtggacaccaacaccctggaaacccccttcgatgacctccagagcctcccaaacgacgtgatctcttccctgaagaacaggctgaaaaaggtctccacaaccactggggatggtgtggccagagcgttcctcaaggcccaggctgctttcttcggtagctaccgaaacgctctgaaaatcgagccggaggagccgatcactttctgtgaggaagccttcgtgtcccactaccgctccggagccatgaggcagttcctgcagaacgccacacagctgcagctcttcaagcagtttattgatggtcgattagatcttctcaattccggcgaaggtttcagtgatgtttttgaagaggaaatcaacatgggcgagtacgctggcagtgacaaactgtaccatcagtggctctccactgtccggaaaggaagtggagcaattctgaatactgtaaagaccaaagcaaatccggccatgaagactgtctacaagttcgcaaaagatcatgcaaaaatgggaataaaagaggtgaaaaaccgcttgaagcaaaaggacattgccgagaatggctgcgcccccaccccagaagagcagctgccaaagactgcaccgtccccactggtggaggccaaggaccccaagctccgagaagaccggcggccaatcacagtccactttggacaggtgcgcccacctcgtccacatgttgttaagagaccaaagagcaacatcgcagtggaaggccggaggacgtctgtgccgagccctgagcaaaacaccattgcaacaccagctacactccacatcctacagaaaagcattacccattttgcggccaagttcccgacgagaggctggacctcttcatcacattgacttacgccgttgcttttccagactgggcagaggggctgacttcgcagtgtgtgccaaagagccggtgtctgataatcccattttcctgcttatcacctgaactgtgtcagtatcacttttagttttgttggttggttggtttgttgtttgtttaatatgccctgttttctacttctgttggaaaatatttggggttgaaataaaccagtgggagcatgggagccagtttggtggttggcaaactaccagtgatagaaaacaa

SEQ ID NO: 429094 - DNA, 2802 bp, Homo sapiens
gcggcgcgcgccgggcacgcgcgccggcgaccatggcgttcgccgggctggagcgagtacattaacccctggaggcggcggcggcggcgagggagcgagcctcgagcgggcgggccccagcctgagggaagggaggaaggggcggggagagcgccagagggaggccggtcggccgcgggcgggcgggcagcgcagcgccgagcggggcccgcgggcccatgaggaggcctggggaccatgggctccaggatcaagcagaatccagagaccacatttgaagtatatgttgaagtggcctatcccaggacaggtggcactctttcagatcctgaggtgcagaggcaattcccggaggactacagtgaccaggaagttctacagactttgaccaagttttgtttccccttctatgtggacagcctcacagttagccaagttggccagaacttcacattcgtgctcactgacattgacagcaaacagagattcgggttctgccgcttatcttcaggagcgaagagctgcttctgtatcttaagctatctcccctggttcgaggtattttataagctgcttaacatcctggcagattacacgacaaaaagacaggaaaatcagtggaatgagcttcttgaaactctgcacaaacttcccatccctgacccaggagtgtctgtccatctcagcgtgcattcttattttactgtgcctgataccagagaacttcccagcatacctgagaatagaaatctgacagaatattttgtggctgtggatgttaacaacatgttgcatctgtacgccagtatgctgtacgaacgccggatactcatcatttgcagcaaactcagcactctgactgcctgcatccacgggtctgcggcgatgctctaccccatgtactggcagcacgtgtacatccccgtgctgccgccgcatctgctggactactgctgtgctcccatgccctacctcataggaatccatttaagtttaatggagaaagtcagaaacatggccctggatgatgtcgtgatcctgaatgtggacaccaacaccctggaaacccccttcgatgacctccagagcctcccaaacgacgtgatctcttccctgaagaacaggctgaaaaaggtctccacaaccactggggatggtgtggccagagcgttcctcaaggcccaggctgctttcttcggtagctaccgaaacgctctgaaaatcgagccggaggagccgatcactttctgtgaggaagccttcgtgtcccactaccgctccggagccatgaggcagttcctgcagaacgccacacagctgcagctcttcaagcagtttattgatggtcgattagatcttctcaattccggcgaaggtttcagtgatgtttttgaagaggaaatcaacatgggcgagtacgctggattcctgttgagattaaatcagagtacatgaggaaaggtttgtgcagtcatccaggacagttcctggcatggggactgtgtgcagcagtgacaaactgtaccatcagtggctctccactgtccggaaaggaagtggagcaattctgaatactgtaaagaccaaagcaaatccggccatgaagactgtctacaagttcgcaaaagatcatgcaaaaatgggaataaaagaggtgaaaaaccgcttgaagcaaaaggacattgccgagaatggctgcgcccccaccccagaagagcagctgccaaagactgcaccgtccccactggtggaggccaaggaccccaagctccgagaagaccggcggccaatcacagtccactttggacaggtgcgcccacctcgtccacatgttgttaagagaccaaagagcaacatcgcagtggaaggccggaggacgtctgtgccgagccctgagcagccgcagccgtatcggacactcagggagtcagacagcgcggaaggcgacgaggcagagagtccagagcagcaagtgcggaagtccacaggccctgtcccagctccccctgaccgggctgccagcatcgaccttctggaagacgtcttcagcaacctggacatggaggccgcactgcagccactgggccaggccaagagcttagaggaccttcgtgcccccaaagacctgagggagcagccagggacctttgactatcagaggctggatctgggcgggagtgagaggagccgcggggtgacagtggccttgaagcttacccacccgtacaacaagctctggagcctgggccaggacgacatggccatccccagcaagcccccagctgcctcccctgagaagccctcggccctgctcgggaactccctggccctgcctcgaaggccccagaaccgggacagcatcctgaaccccagtgacaaggaggaggtgcccacccctactctgggcagcatcaccatcccccggccccaaggcaggaagaccccagagctgggcatcgtgcctccaccgcccattccccgcccggccaagctccaggctgccggcgccgcacttggtgacgtctcagagcggctgcagacggatcgggacaggcgagctgccctgagtccagggctcctgcctggtgttgtcccccaaggccccactgaactgctccagccgctcagccctggccccggggctgcaggcacgagcagtgacgccctgctcgccctcctggacccgctcagcacagcctggtcaggcagcacccttcctgtgagaggcgggcaattcttattggtagctctcgatacatttttgtatcccggtttgacgtcttgtgtgttttcctgacattt

SEQ ID NO: 429095 - DNA, 1812 bp, Homo sapiens
gcggcgcgcgccgggcacgcgcgccggcgaccatggcgttcgccgggctggagcgagtacattaacccctggaggcggcggcggcggcgagggagcgagcctcgagcgggcgggccccagcctgagggaagggaggaaggggcggggagagcgccagagggaggccggtcggccgcgggcgggcgggcagcgcagcgccgagcggggcccgcgggcccatgaggaggcctggggaccatgggctccaggatcaagcagaatccagagaccacatttgaagtatatgttgaagtggcctatcccaggacaggtggcactctttcagatcctgaggtgcagaggcaattcccggaggactacagtgaccaggaagttctacagactttgaccaagttttgtttccccttctatgtggacagcctcacagttagccaagttggccagaacttcacattcgtgctcactgacattgacagcaaacagagattcgggttctgccgcttatcttcaggagcgaagagctgcttctgtatcttaagctatctcccctggttcgaggtattttataagctgcttaacatcctggcagattacacgacaaaaagacaggaaaatcagtggaatgagcttcttgaaactctgcacaaacttcccatccctgacccaggagtgtctgtccatctcagcgtgcattcttattttactgtgcctgataccagagaacttcccagcatacctgagaatagaaatctgacagaatattttgtggctgtggatgttaacaacatgttgcatctgtacgccagtatgctgtacgaacgccggatactcatcatttgcagcaaactcagcactctgactgcctgcatccacgggtctgcggcgatgctctaccccatgtactggcagcacgtgtacatccccgtgctgccgccgcatctgctggactactgctgtgctcccatgccctacctcataggaatccatttaagtttaatggagaaagtcagaaacatggccctggatgatgtcgtgatcctgaatgtggacaccaacaccctggaaacccccttcgatgacctccagagcctcccaaacgacgtgatctcttccctgaagaacaggctgaaaaaggtctccacaaccactggggatggtgtggccagagcgttcctcaaggcccaggctgctttcttcggtagctaccgaaacgctctgaaaatcgagccggaggagccgatcactttctgtgaggaagccttcgtgtcccactaccgctccggagccatgaggcagttcctgcagaacgccacacagctgcagctcttcaagcagtttattgatggtcgattagatcttctcaattccggcgaaggtttcagtgatgtttttgaagaggaaatcaacatgggcgagtacgctggcagtgacaaactgtaccatcagtggctctccactgtccggaaaggaagtggagcaattctgaatactgtaaagaccaaagcaaatccggccatgaagactgtctacaagttcgcaaaagatcatgcaaaaatgggaataaaagaggtgaaaaaccgcttgaagcaaaaggacattgccgagaatggctgcgcccccaccccagaagagcagctgccaaagactgcaccgtccccactggtggaggccaaggaccccaagctccgagaagaccggcggccaatcacagtccactttggacagctgcagagactgcgtccaccgaacgctccaagatacagcgctcgagccgtgcgccactcgtcacctgttgtagagaccaagagcaat

SEQ ID NO: 429096 - DNA, 1109 bp, Homo sapiens
gcggcgcgcgccgggcacgcgcgccggcgaccatggcgttcgccgggctggagcgagtacattaacccctggaggcggcggcggcggcgagggagcgagcctcgagcgggcgggccccagcctgagggaagggaggaaggggcggggagagcgccagagggaggccggtcggccgcgggcgggcgggcagcgcagcgccgagcggggcccgcgggcccatgaggaggcctggggaccatgggctccaggatcaagcagaatccagagaccacatttgaagtatatgttgaagtggcctatcccaggacaggtggcactctttcagatcctgaggtgcagaggcaattcccggaggactacagtgaccaggaagttctacagactttgaccaagttttgtttccccttctatgtggacagcctcacagttagccaagttggccagaacttcacattcgtgctcactgacattgacagcaaacagagattcgggttctgccgcttatcttcaggagcgaagagctgcttctgtatcttaagctatctcccctggttcgaggtattttataagctgcttaacatcctggcagattacacgacaaaaagacaggaaaatcagtggaatgagcttcttgaaactctgcacaaacttcccatccctgacccaggagtgtctgtccatctcagcgtgcattcttattttactgtgcctgataccagagaacttcccagcatacctgagaatagaaatctgacagaatattttgtggctgtggatgttaacaacatgttgcatctgtacgccagtatgctgtacgaacgccggatactcatcatttgcagcaaactcagcactctgactgcctgcatccacgggtctgcggcgatgctctaccccatgtactggcagcacgtgtacatccccgtgctgccgccgcatctgctggactactgctggtaaggtggctggccctgtcctctgcttctcctttgccctgatctgactgggcgtgttaggtgtgtcacttgttaatgcagttggtgactctacattaaaaatattaacttcatccagcctggacaaaatagtgagaatccatctgtacaaaa

SEQ ID NO: 429097 - DNA, 4552 bp, Homo sapiens
aaccaaaaaaggctggaagaacatgaagatggagcagtcataaaccacccactcaaggaccatctccttcaggaccatccacacgagactcagattgtctgaattgagctatcgcaacttaatgctaaaagctccttaaagctacagatttatgacatagttccttccaaaatattacatcataaatcattgagaagattaaaaaaaaacacttgaagaaattgtagttttaaacatctctgcatatattttggatagctactaggttactttaactgtcattaaggagcacagacttactgaagctttactggacagaatcctgggaaatcgatatcattataaggttatatttcccagttagcgggtgaagggctggagaccttattgcagtcatggctttcacaaattacagcagtctgaatcgagctcagctaacctttgaatatctgcacacaaattcgtaagtatcctctaggtgccactgaggtaaccagtaactcgttccttgatattatatggaaatcgtttccccagaaaattttgctttttcactttttgagatgtatcccactggagtgaaatgtgtcactggatatcttgagctctgtattgaagaactgagatcagtgaaatacttgttgctaatccagaagaatctgatttttgtttattggatcaaaattttctaaatgcaaactttagttatttgaagtcaatatgttgagttgtttcattcaagtgtttataggaatccaacaaatactgctctattggatcgccaaatgttggactattttagtatcaaccgtttcccctctgtagtgacaacgtcctaaacagttaggtttataacaagtgtttactttctaacaagaaaacagaagacatttaaatgacaactttcaagaagaaaatttttattttttcagaagttggcattatcttcctggcagattgctcacatccaatattatttgtatatgctaaacaggaaacggcaacttgtttatatctctatttagatagtctttccccaaaatttccacagaaacatacagtgttcatggttcttgagttcatgaaggagtaatctaatcactccaacatggtctggaatgtttcaggtttaatccatatgcccactctcttggaggctgtccagtagcgtcaaaactttagtgttttaatacattcacctgttacttttgagatgaagttcacctttcttggatcacatgcaaaggatgtttaggtctgtgaagaaaagaatttctaggccgggtgctgtggctcacgcctgtaatcccagcactttgggaggccgagaaccactcacgaattcttgtttggtgctcttgctgaactggttgataatgcaagagatgctgatgccaccagaatagatatttatgcagaaagacgagaggaccttcgaggaggatttatgctttgctttttggatgatggagcaggaatggatccaagtgatgctgccagtgtgatccagtttgggaagtcggccaagcgaacacctgagtctactcagattgggcagtacgggaatgggttaaaatcgggctcaatgcgcattgggaaggattttatcctgttcaccaagaaggaagacaccatgacctgcctcttcctgtctcgcacgtttcatgaggaagaaggcattgatgaagtgatagtcccactgcccacctggaatgctcggacccgggaacctgtcacagacaatgtagagaaatttgccattgagacagaactcatctataagtactctccattccgcactgaggaggaagtgatgacccagtttatgaagattcctggggacagcggaacattggtgatcatcttcaatctcaaactcatggataatggagagccagaactagacataatctcaaatccaagagatatccagatggcagagacgtccccagagggcacgaagccagagcggcgctcgttccgtgcctatgccgctgtgctctatattgatccccggatgaggatcttcatccatgggcacaaggtgcagaccaagaggctctcctgctgcctgtacaagcccaggatgtacaagtacacgtcaagccgtttcaagacccgtgcggagcaggaggtgaagaaagcagagcacgtagcaaggattgctgaagagaaggcgcgggaggcagagagcaaagctcggacattagaagtacgcctaggtggagacctcacgcgggactccagggtgatgttgcgacaggtccagaacagagccatcactctgcgcagagaagccgatgtcaagaagaggatcaaggaggccaagcagcgagcacttaaagaacctaaggaactgaattttgtttttggtgtcaacattgaacaccgggatctggatggcatgttcatctacaactgtagccgactgatcaaaatgtatgagaaagtgggcccacagctggaagggggcatggcatgtggcggggttgttggggttgttgatgtgccctacctggtcctggagcctacacacaacaaacaggactttgctgatgccaaggagtaccggcacctgctccgagcaatgggggagcacctggcgcagtattggaaggatattgccatcgcccagaggggaatcatcaagttctgggatgagtttggctacctctctgccaactggaaccagcccccgtccagtgagctgcgttacaaacgccggagagctatggaaatccccaccaccatccagtgcgatttgtgtctgaaatggagaaccctccccttccagctgagttctgtggaaaaagattaccctgacacctgggtttgctccatgaaccctgatcctgaacaggaccggtgtgaggcttctgaacaaaagcagaaggttcccctgggaacattcagaaaggacatgaagacgcaggaagagaagcagaaacaactgacagagaaaattcgccagcagcaggagaagctggaggcccttcagaaaaccacacccatccgctcccaagcagacctgaagaaattgcccttggaagtgaccaccagaccttccactgaggaacctgtgcgtagacctcagcgtcctcggtcgccccctttacctgctgtgatcaggaacgcccccagcagacccccttctttgccaactcctagaccagccagccagccccgaaaggctcctgtcatcagcagtaccccaaagctccctgctttggcagcccgggaggaggccagcacatctaggctgctccagccacctgaggcaccccgaaagcctgccaacactctcgtcaagactgcatcccgacctgcccctctggtgcagcaactgtcaccatctttactgcccaactccaagagccctcgggaggttccttctcccaaagtcatcaagactccagtggtgaagaagacagagtcacccatcaaactctccccggctacccctagtcggaagcggagtgtcgcagtttctgatgaggaagaagttgaggaggaagctgagaggaggaaggagaggtgcaagcggggcagatttgttgtgaaggaggaaaagaaggactcgaatgagctctcagacagtgctggggaagaggactcggctgacctcaagagagctcagaaagataaagggctgcacgtggaggtgcgtgtgaacagggagtggtacacgggccgtgtcacagccgtggaggtgggcaagcatgtggtgcggtggaaggtgaagtttgactacgtgcccacagacacgacaccaagagaccgctgggtggagaaaggcagtgaggatgtgcggctgatgaaacccccttctccggaacatcagagccttgatacacaacaggagggcggggaggaggaggtgggccctgtggcccagcaggccatagctgtcgcagagccctccacttccgaatgcctccgcattgagcctgacaccactgccctgagcaccaatcacgagaccatcgacctgcttgtccagatcctccggaattgtttacggtacttcctgcctccaagtttccccatctccaagaagcagctgagtgctatgaattcagatgagctaatatcttttcctctgaaggagtacttcaagcaatatgaagtagggctccaaaacctgtgcaattcctaccagagccgtgctgactcccgggccaaggcctccgaggaaagcctgcgcacctccgagaggaagctccgcgagacggaggagaagctgcagaagctgaggaccaacatcgtggcactcctgcaaaaggtgcaggaggacatagacatcaacacagatgatgagctggacgcctacattgaggacctcatcaccaagggggactgaaggcaggagagagagcagctcccctgcccacctgcccctcaaccctgtagctgcagggggaggggacttcattcatgggttggtggtcgcaccttggtttgacttacacgggacatttgtgtttttggaggaaaagataccctgattctttgaatcttccttaagtttataaatatttattttttaaaagaa

SEQ ID NO: 429098 - DNA, 566 bp, Homo sapiens
cccccaggaaaaggtattccatgattccgaatttaatccgctcactatagggaatttgccctccagggccaaaaattgggcaaaaggcctcgtgcgggttaatatcttttcttttaaaggagtacttcaagcaatatgaagtagggctccaaaacctgtgcaattcctaccagagccgtgctgactcccgggccaaggcctccgaggaaagcctgcgcacctccgagaggaagctccgcgagacggaggagaagctgcagaagctgaggaccaacatcgtggcactcctgcaaaaggtgcaggaggacatagacatcaacacagatgatgagctggacgcctacattgaggacctcatcaccaagggggactgaaggcaggagagagagcagctcccctgcccacctgcccctcaaccctgtagctgcagggggaggggacttcattcatgggttggtggtcgcaccttggtttgacttacacgggacatttgtgtttttggaggaaaagataccctgattctttgaatcttccttaagtttataaatatttattttttaaaagaa

SEQ ID NO: 429099 - DNA, 404 bp, Homo sapiens
gacagaagcctgacatccagggcggggtgggaggtcagggagaggactctgggctccatcccaggagctgagagaagggtggaaaggtgagccccccaatcactttctggcccccagttgatccctaccctgctctattccaggacatagacatcaacacagatgatgagctggacgcctacattgaggacctcatcaccaagggggactgaaggcaggagagagagcagctcccctgcccacctgcccctcaaccctgtagctgcagggggaggggacttcattcatgggttggtggtcgcaccttggtttgacttacacgggacatttgtgtttttggaggaaaagataccctgattctttgaatcttccttaagtttataaatatttattttttaaaagaa

SEQ ID NO: 429100 - DNA, 516 bp, Homo sapiens
cgagggtcacccatcaaactctccccggctacccctagtcagacacgacaccaagagaccgctgggtggagaaaggcagtgaggatgtgcggctgatgaaacccccttctccggaacatcagagccttgatacacaacaggagggcggggaggaggaggtgggccctgtggcccagcaggccatagctgtcgcagagccctccacttccgaatgcctccgcattgagcctgacaccactgccctgagcaccaatcacgagaccatcgacctgcttgtccagatcctccggaattgtttacggtacttcctgcctccaagtttccccatctccaagaaagcagctcccctgcccacctgcccctcaaccctgtagctgcagggggaggggacttcattcatgggttggtggtcgcaccttggtttgacttacacgggacatttgtgtttttggaggaaaagataccctgattctttgaatcttccttaagtttataaatatttattttttaaaagaa

SEQ ID NO: 429101 - DNA, 3239 bp, Homo sapiens
tagctaggaggcgggtgatcggccgaggacgatcctgttgatgccctgctgaactggttgataatgcaagagatgctgatgccaccagaatagatatttatgcagaaagacgagaggaccttcgaggaggatttatgctttgctttttggatgatggagcaggaatggatccaagtgatgctgccagtgtgatccagtttgggaagtcggccaagcgaacacctgagtctactcagattgggcagtacgggaatgggttaaaatcgggctcaatgcgcattgggaaggattttatcctgttcaccaagaaggaagacaccatgacctgcctcttcctgtctcgcacgtttcatgaggaagaaggcattgatgaagtgatagtcccactgcccacctggaatgctcggacccgggaacctgtcacagacaatgtagagaaatttgccattgagacagaactcatctataagtactctccattccgcactgaggaggaagtgatgacccagtttatgaagattcctggggacagcggaacattggtgatcatcttcaatctcaaactcatggataatggagagccagaactagacataatctcaaatccaagagatatccagatggcagagacgtccccagagggcacgaagccagagcggcgctcgttccgtgcctatgccgctgtgctctatattgatccccggatgaggatcttcatccatgggcacaaggtgcagaccaagaggctctcctgctgcctgtacaagcccaggatgtacaagtacacgtcaagccgtttcaagacccgtgcggagcaggaggtgaagaaagcagagcacgtagcaaggattgctgaagagaaggcgcgggaggcagagagcaaagctcggacattagaagtacgcctaggtggagacctcacgcgggactccagggtgatgttgcgacaggtccagaacagagccatcactctgcgcagagaagccgatgtcaagaagaggatcaaggaggccaagcagcgagcacttaaagaacctaaggaactgaattttgtttttggtgtcaacattgaacaccgggatctggatggcatgttcatctacaactgtagccgactgatcaaaatgtatgagaaagtgggcccacagctggaagggggcatggcatgtggcggggttgttggggttgttgatgtgccctacctggtcctggagcctacacacaacaaacaggactttgctgatgccaaggagtaccggcacctgctccgagcaatgggggagcacctggcgcagtattggaaggatattgccatcgcccagaggggaatcatcaagttctgggatgagtttggctacctctctgccaactggaaccagcccccgtccagtgagctgcgttacaaacgccggagagctatggaaatccccaccaccatccagtgcgatttgtgtctgaaatggagaaccctccccttccagctgagttctgtggaaaaagattaccctgacacctgggtttgctccatgaaccctgatcctgaacaggaccggtgtgaggcttctgaacaaaagcagaaggttcccctgggaacattcagaaaggacatgaagacgcaggaagagaagcagaaacaactgacagagaaaattcgccagcagcaggagaagctggaggcccttcagaaaaccacacccatccgctcccaagcagacctgaagaaattgcccttggaagtgaccaccagaccttccactgaggaacctgtgcgtagacctcagcgtcctcggtcgccccctttacctgctgtgatcaggaacgcccccagcagacccccttctttgccaactcctagaccagccagccagccccgaaaggctcctgtcatcagcagtaccccaaagctccctgctttggcagcccgggaggaggccagcacatctaggctgctccagccacctgaggcaccccgaaagcctgccaacactctcgtcaagactgcatcccgacctgcccctctggtgcagcaactgtcaccatctttactgcccaactccaagagccctcgggaggttccttctcccaaagtcatcaagactccagtggtgaagaagacagagtcacccatcaaactctccccggctacccctagtcggaagcggagtgtcgcagtttctgatgaggaagaagttgaggaggaagctgagaggaggaaggagaggtgcaagcggggcagatttgttgtgaaggaggaaaagaaggactcgaatgagctctcagacagtgctggggaagaggactcggctgacctcaagagagctcagaaagataaagggctgcacgtggaggtgcgtgtgaacagggagtggtacacgggccgtgtcacagccgtggaggtgggcaagcatgtggtgcggtggaaggtgaagtttgactacgtgcccacagacacgacaccaagagaccgctgggtggagaaaggcagtgaggatgtgcggctgatgaaacccccttctccggaacatcagagccttgatacacaacaggagggcggggaggaggaggtgggccctgtggcccagcaggccatagctgtcgcagagccctccacttccgaatgcctccgcattgagcctgacaccactgccctgagcaccaatcacgagaccatcgacctgcttgtccagatcctccggaattgtttacggtacttcctgcctccaagtttccccatctccaagaagcagctgagtgctatgaattcagatgagctaatatcttttcctctgaaggagtacttcaagcaatatgaagtagggctccaaaacctgtgcaattcctaccagagccgtgctgactcccgggccaaggcctccgaggaaagcctgcgcacctccgagaggaagctccgcgagacggaggagaagctgcagaagctgaggaccaacatcgtggcactcctgcaaaaggtgcaggaggacatagacatcaacacagatgatgagctggacgcctacattgaggacctcatcaccaagggggactgaaggcaggagagagagcagctcccctgcccacctgcccctcaaccctgtagctgcagggggaggggacttcattcatgggttggtggtcgcaccttggtttgacttacacgggacatttgtgtttttggaggaaaagataccctgattctttgaatcttccttaagtttataaatatttattttttaaaagaa

SEQ ID NO: 429102 - DNA, 1653 bp, Homo sapiens
  misc_feature (84)..(84): n is a, c, g, or t
acgcatgtgccgctcccgagcaggcaggcaaggtgacgggactggaagcccttttcagagccttggaggagctggtccgtccgngaagcaatgagtgccaaaaccacacccatccgctcccaagcagacctgaagaaattgcccttggaagtgaccaccagaccttccactgaggaacctgtgcgtagacctcagcgtcctcggtcgccccctttacctgctgtgatcaggaacgcccccagcagacccccttctttgccaactcctagaccagccagccagccccgaaaggctcctgtcatcagcagtaccccaaagctccctgctttggcagcccgggaggaggccagcacatctaggctgctccagccacctgaggcaccccgaaagcctgccaacactctcgtcaagactgcatcccgacctgcccctctggtgcagcaactgtcaccatctttactgcccaactccaagagccctcgggaggttccttctcccaaagtcatcaagactccagtggtgaagaagacagagtcacccatcaaactctccccggctacccctagtcggaagcggagtgtcgcagtttctgatgaggaagaagttgaggaggaagctgagaggaggaaggagaggtgcaagcggggcagatttgttgtgaaggaggaaaagaaggactcgaatgagctctcagacagtgctggggaagaggactcggctgacctcaagagagctcagaaagataaagggctgcacgtggaggtgcgtgtgaacagggagtggtacacgggccgtgtcacagccgtggaggtgggcaagcatgtggtgcggtggaaggtgaagtttgactacgtgcccacagacacgacaccaagagaccgctgggtggagaaaggcagtgaggatgtgcggctgatgaaacccccttctccggaacatcagagccttgatacacaacaggagggcggggaggaggaggtgggccctgtggcccagcaggccatagctgtcgcagagccctccacttccgaatgcctccgcattgagcctgacaccactgccctgagcaccaatcacgagaccatcgacctgcttgtccagatcctccggaattgtttacggtacttcctgcctccaagtttccccatctccaagaagcagctgagtgctatgaattcagatgagctaatatcttttcctctgaaggagtacttcaagcaatatgaagtagggctccaaaacctgtgcaattcctaccagagccgtgctgactcccgggccaaggcctccgaggaaagcctgcgcacctccgagaggaagctccgcgagacggaggagaagctgcagaagctgaggaccaacatcgtggcactcctgcaaaaggtgcaggaggacatagacatcaacacagatgatgagctggacgcctacattgaggacctcatcaccaagggggactgaaggcaggagagagagcagctcccctgcccacctgcccctcaaccctgtagctgcagggggaggggacttcattcatgggttggtggtcgcaccttggtttgacttacacgggacatttgtgtttttggaggaaaagataccctgattctttgaatcttccttaagtttataaatatttattttttaaaagaa

SEQ ID NO: 429103 - DNA, 4590 bp, Homo sapiens
aaccaaaaaaggctggaagaacatgaagatggagcagtcataaaccacccactcaaggaccatctccttcaggaccatccacacgagactcagattgtctgaattgagctatcgcaacttaatgctaaaagctccttaaagctacagatttatgacatagttccttccaaaatattacatcataaatcattgagaagattaaaaaaaaacacttgaagaaattgtagttttaaacatctctgcatatattttggatagctactaggttactttaactgtcattaaggagcacagacttactgaagctttactggacagaatcctgggaaatcgatatcattataaggttatatttcccagttagcgggtgaagggctggagaccttattgcagtcatggctttcacaaattacagcagtctgaatcgagctcagctaacctttgaatatctgcacacaaattcgtaagtatcctctaggtgccactgaggtaaccagtaactcgttccttgatattatatggaaatcgtttccccagaaaattttgctttttcactttttgagatgtatcccactggagtgaaatgtgtcactggatatcttgagctctgtattgaagaactgagatcagtgaaatacttgttgctaatccagaagaatctgatttttgtttattggatcaaaattttctaaatgcaaactttagttatttgaagtcaatatgttgagttgtttcattcaagtgtttataggaatccaacaaatactgctctattggatcgccaaatgttggactattttagtatcaaccgtttcccctctgtagtgacaacgtcctaaacagttaggtttataacaagtgtttactttctaacaagaaaacagaagacatttaaatgacaactttcaagaagaaaatttttattttttcagaagttggcattatcttcctggcagattgctcacatccaatattatttgtatatgctaaacaggaaacggcaacttgtttatatctctatttagatagtctttccccaaaatttccacagaaacatacagtgttcatggttcttgagttcatgaaggagtaatctaatcactccaacatggtctggaatgtttcaggtttaatccatatgcccactctcttggaggctgtccagtagcgtcaaaactttagtgttttaatacattcacctgttacttttgagatgaagttcacctttcttggatcacatgcaaaggatgtttaggtctgtgaagaaaagaatttctaggccgggtgctgtggctcacgcctgtaatcccagcactttgggaggccgagaaccactcacgaattcttgtttggtgctcttgctgaactggttgataatgcaagagatgctgatgccaccagaatagatatttatgcagaaagacgagaggaccttcgaggaggatttatgctttgctttttggatgatggagcaggaatggatccaagtgatgctgccagtgtgatccagtttgggaagtcggccaagcgaacacctgagtctactcagattgggcagtacgggaatgggttaaaatcgggctcaatgcgcattgggaaggattttatcctgttcaccaagaaggaagacaccatgacctgcctcttcctgtctcgcacgtttcatgaggaagaaggcattgatgaagtgatagtcccactgcccacctggaatgctcggacccgggaacctgtcacagacaatgtagagaaatttgccattgagacagaactcatctataagtactctccattccgcactgaggaggaagtgatgacccagtttatgaagattcctggggacagcggaacattggtgatcatcttcaatctcaaactcatggataatggagagccagaactagacataatctcaaatccaagagatatccagatggcagagacgtccccagagggcacgaagccagagcggcgctcgttccgtgcctatgccgctgtgctctatattgatccccggatgaggatcttcatccatgggcacaaggtgcagaccaagaggctctcctgctgcctgtacaagcccaggatgtacaagtacacgtcaagccgtttcaagacccgtgcggagcaggaggtgaagaaagcagagcacgtagcaaggattgctgaagagaaggcgcgggaggcagagagcaaagctcggacattagaagtacgcctaggtggagacctcacgcgggactccagggtgatgttgcgacaggtccagaacagagccatcactctgcgcagagaagccgatgtcaagaagaggatcaaggaggccaagcagcgagcacttaaagaacctaaggaactgaattttgtttttggtgtcaacattgaacaccgggatctggatggcatgttcatctacaactgtagccgactgatcaaaatgtatgagaaagtgggcccacagctggaagggggcatggcatgtggcggggttgttggggttgttgatgtgccctacctggtcctggagcctacacacaacaaacaggactttgctgatgccaaggagtaccggcacctgctccgagcaatgggggagcacctggcgcagtattggaaggatattgccatcgcccagaggggaatcatcaagttctgggatgagtttggctacctctctgccaactggaaccagcccccgtccagtgagctgcgttacaaacgccggagagctatggaaatccccaccaccatccagtgcgatttgtgtctgaaatggagaaccctccccttccagctgagttctgtggaaaaagattaccctgacacctgggtttgctccatgaaccctgatcctgaacaggaccggtgtgaggcttctgaacaaaagcagaaggttcccctgggaacattcagaaaggacatgaagacgcaggaagagaagcagaaacaactgacagagaaaattcgccagcagcaggagaagctggaggcccttcagaaaaccacacccatccgctcccaagcagacctgaagaaattgcccttggaagtgaccaccagaccttccactgaggaacctgtgcgtagacctcagcgtcctcggtcgccccctttacctgctgtgatcaggaacgcccccagcagacccccttctttgccaactcctagaccagccagccagccccgaaaggctcctgtcatcagcagtaccccaaagctccctgctttggcagcccgggaggaggccagcacatctaggctgctccagccacctgaggcaccccgaaagcctgccaacactctcgtcaagactgcatcccgacctgcccctctggtgcagcaactgtcaccatctttactgcccaactccaagagccctcgggaggttccttctcccaaagtcatcaagactccagtggtgaagaagacagagtcacccatcaaactctccccggctacccctagtcggaagcggagtgtcgcagtttctgatgaggaagaagttgaggaggaagctgagaggaggaaggagaggtgcaagcggggcagatttgttgtgaaggaggaaaagaaggactcgaatgagctctcagacagtgctggggaagaggactcggctgacctcaagagagctcagaaagataaagggctgcacgtggaggtgcgtgtgaacagggagtggtacacgggccgtgtcacagccgtggaggtgggcaagcatgtggtgcggtggaaggtgaagtttgactacgtgcccacagacacgacaccaagagaccgctgggtggagaaaggcagtgaggatgtgcggctgatgaaacccccttctccggaacatcagagccttgatacacaacaggagggcggggaggaggaggtgggccctgtggcccagcaggccatagctgtcgcagagccctccacttccgaatgcctccgcattgagcctgacaccactgccctgagcaccaatcacgagaccatcgacctgcttgtccagatcctccggaattgtttacggtacttcctgcctccaagtttccccatctccaagaagcagctgagtgctatgaattcagatgagctaatatcttttcctctgaaggagtacttcaagcaatatgaagtagggctccaaaacctgtgcaattcctaccagagccgtgctgactcccgggccaaggcctccgaggaaagcctgcgcacctccgagaggaagctccgcgagacggaggagaagctgcagaagctgaggaccaacatcgtggcactcctgcaaaaggtgcaggaggacatagacatcaacacagatgatgagctggacgcctacattgaggacctcatcaccaagggggactgaaggcaggagagagagcagctcccctgcccacctgcccctcaaccctgtagctgcagggggaggggacttcattcatgggttggtggtcgcaccttggtttgacttacacgggacatttgtgtttttggaggaaaagataccctgattctttgaatcttccttaagtttataaatatttattttttaaaagaaaaaaaaaaaaaaacaaacaaacagaaaaagacaaacaa

SEQ ID NO: 429104 - DNA, 4395 bp, Homo sapiens
aaccaaaaaaggctggaagaacatgaagatggagcagtcataaaccacccactcaaggaccatctccttcaggaccatccacacgagactcagattgtctgaattgagctatcgcaacttaatgctaaaagctccttaaagctacagatttatgacatagttccttccaaaatattacatcataaatcattgagaagattaaaaaaaaacacttgaagaaattgtagttttaaacatctctgcatatattttggatagctactaggttactttaactgtcattaaggagcacagacttactgaagctttactggacagaatcctgggaaatcgatatcattataaggttatatttcccagttagcgggtgaagggctggagaccttattgcagtcatggctttcacaaattacagcagtctgaatcgagctcagctaacctttgaatatctgcacacaaattcgtaagtatcctctaggtgccactgaggtaaccagtaactcgttccttgatattatatggaaatcgtttccccagaaaattttgctttttcactttttgagatgtatcccactggagtgaaatgtgtcactggatatcttgagctctgtattgaagaactgagatcagtgaaatacttgttgctaatccagaagaatctgatttttgtttattggatcaaaattttctaaatgcaaactttagttatttgaagtcaatatgttgagttgtttcattcaagtgtttataggaatccaacaaatactgctctattggatcgccaaatgttggactattttagtatcaaccgtttcccctctgtagtgacaacgtcctaaacagttaggtttataacaagtgtttactttctaacaagaaaacagaagacatttaaatgacaactttcaagaagaaaatttttattttttcagaagttggcattatcttcctggcagattgctcacatccaatattatttgtatatgctaaacaggaaacggcaacttgtttatatctctatttagatagtctttccccaaaatttccacagaaacatacagtgttcatggttcttgagttcatgaaggagtaatctaatcactccaacatggtctggaatgtttcaggtttaatccatatgcccactctcttggaggctgtccagtagcgtcaaaactttagtgttttaatacattcacctgttacttttgagatgaagttcacctttcttggatcacatgcaaaggatgtttaggtctgtgaagaaaagaatttctaggccgggtgctgtggctcacgcctgtaatcccagcactttgggaggccgagaaccactcacgaattcttgtttggtgctcttgctgaactggttgataatgcaagagatgctgatgccaccagaatagatatttatgcagaaagacgagaggaccttcgaggaggatttatgctttgctttttggatgatggagcaggaatggatccaagtgatgctgccagtgtgatccagtttgggaagtcggccaagcgaacacctgagtctactcagattgggcagtacgggaatgggttaaaatcgggctcaatgcgcattgggaaggattttatcctgttcaccaagaaggaagacaccatgacctgcctcttcctgtctcgcacgtttcatgaggaagaaggcattgatgaagtgatagtcccactgcccacctggaatgctcggacccgggaacctgtcacagacaatgtagagaaatttgccattgagacagaactcatctataagtactctccattccgcactgaggaggaagtgatgacccagtttatgaagattcctggggacagcggaacattggtgatcatcttcaatctcaaactcatggataatggagagccagaactagacataatctcaaatccaagagatatccagatggcagagacgtccccagagggcacgaagccagagcggcgctcgttccgtgcctatgccgctgtgctctatattgatccccggatgaggatcttcatccatgggcacaaggtgcagaccaagaggctctcctgctgcctgtacaagcccaggatgtacaagtacacgtcaagccgtttcaagacccgtgcggagcaggaggtgaagaaagcagagcacgtagcaaggattgctgaagagaaggcgcgggaggcagagagcaaagctcggacattagaagtacgcctaggtggagacctcacgcgggactccagggtgatgttgcgacaggtccagaacagagccatcactctgcgcagagaagccgatgtcaagaagaggatcaaggaggccaagcagcgagcacttaaagaacctaaggaactgaattttgtttttggtgtcaacattgaacaccgggatctggatggcatgttcatctacaactgtagccgactgatcaaaatgtatgagaaagtgggcccacagctggaagggggcatggcatgtggcggggttgttggggttgttgatgtgccctacctggtcctggagcctacacacaacaaacaggactttgctgatgccaaggagtaccggcacctgctccgagcaatgggggagcacctggcgcagtattggaaggatattgccatcgcccagaggggaatcatcaagttctgggatgagtttggctacctctctgccaactggaaccagcccccgtccagtgagctgcgttacaaacgccggagagctatggaaatccccaccaccatccagtgcgatttgtgtctgaaatggagaaccctccccttccagctgagttctgtggaaaaagattaccctgacacctgggtttgctccatgaaccctgatcctgaacaggaccggtgtgaggcttctgaacaaaagcagaaggttcccctgggaacattcagaaaggacatgaagacgcaggaagagaagcagaaacaactgacagagaaaattcgccagcagcaggagaagctggaggcccttcagaaaaccacacccatccgctcccaagcagacctgaagaaattgcccttggaagtgaccaccagaccttccactgaggaacctgtgcgtagacctcagcgtcctcggtcgccccctttacctgctgtgatcaggaacgcccccagcagacccccttctttgccaactcctagaccagccagccagccccgaaaggctcctgtcatcagcagtaccccaaagctccctgctttggcagcccgggaggaggccagcacatctaggctgctccagccacctgaggcaccccgaaagcctgccaacactctcgtcaagactgcatcccgacctgcccctctggtgcagcaactgtcaccatctttactgcccaactccaagagccctcgggaggttccttctcccaaagtcatcaagactccagtggtgaagaagacagagtcacccatcaaactctccccggctacccctagtcggaagcggagtgtcgcagtttctgatgaggaagaagttgaggaggaagctgagaggaggaaggagaggtgcaagcggggcagatttgttgtgaaggaggaaaagaaggactcgaatgagctctcagacagtgctggggaagaggactcggctgacctcaagagagctcagaaagataaagggctgcacgtggaggtgcgtgtgaacagggagtggtacacgggccgtgtcacagccgtggaggtgggcaagcatgtggtgcggtggaaggtgaagtttgactacgtgcccacagacacgacaccaagagaccgctgggtggagaaaggcagtgaggatgtgcggctgatgaaacccccttctccggaacatcagagccttgatacacaacaggagggcggggaggaggaggtgggccctgtggcccagcaggccatagctgtcgcagagccctccacttccgaatgcctccgcattgagcctgacaccactgccctgagcaccaatcacgagaccatcgacctgcttgtccagatcctccggaattgtttacggtacttcctgcctccaagtttccccatctccaagaagcagctgagtgctatgaattcagatgagctaatatcttttcctctgaaggagtacttcaagcaatatgaagtagggctccaaaacctgtgcaattcctaccagagccgtgctgactcccgggccaaggcctccgaggaaagcctgcgcacctccgagaggaagctccgcgagacggaggagaagctgcagaagctgaggaccaacatcgtggcactcctgcaaaaggtgcaggaggtgcaggaggtgagcccggcagccttcctgttgcagctggaccacctggtctctcagggaggggggcctgggccctgttcctgttctcacaagaatctatccac

SEQ ID NO: 429105 - DNA, 586 bp, Homo sapiens
caacgggtcctcagctcatcatctgtgttgatgtctatgtcctcctgcaccttttgcaggagtgcctccaagtttccccatctccaagaagcagctgagtgctatgaattcagatgagctaatatcttttcctctgaaggagtacttcaagcaatatgaagtagggctccaaaacctgtgcaattcctaccagagccgtgctgactcccgggccaaggcctccgaggaaagcctgcgcacctccgagaggaagctccgcgagacggaggagaagctgcagaagctgaggaccaacatcgtggcactcctgcaaaaggtgcaggaggacatagacatcaacacagatgatgagctggacgcctacattgaggacctcatcaccaagggggactgaaggcaggagagagagcagctcccctgcccacctgcccctcaaccctgtagctgcagggggaggggacttcattcatgggttggtggtcgcaccttggtttgacttacacgggacatttgtgtttttggaggaaaagataccctgattctttgaatcttccttaagtttataaatatttattttttaaaagaa

SEQ ID NO: 429106 - DNA, 171 bp, Homo sapiens
catgttctcttctgggtttcagctgaagagaaggcgcgggaggcagagagcaaagctcggacattagaagtacgcctaggtggagacctcacgcgggactccagggtaaggtcccggcccaggcggctgttctccagcgtttctggcactaggagcccatgtcccatgagc

SEQ ID NO: 429107 - DNA, 342 bp, Homo sapiens
acagaaacatacagtgttcatggttcttgagttcatgaaggagtaatctaatcactccaacatggtctggaatgtttcaggtttaatccatatgcccactctcttggaggctgtccagtagcgtcaaaactttagtgttttaatacattcacctgttacttttgagatgaaggtaagtgttctaacattctagtacctggagaggagatgagcagctacatgaatggtccagtctctgaagaacccacttcagagtcgagagtatagacttccattatgtagtaatagtacaatggtttttagcttttgatggagaagacaacatgtttgtgatatcataat

SEQ ID NO: 429108 - DNA, 703 bp, Homo sapiens
agtagctgggaccacaggtgtgtgccattgtgcctggctaatttttaaaaagtttttttttgtagagacagtgtcttcctatgttgcctaggctggtcttgaactcttgagcttaagtaatctgcacacctcagttcttccaaagtattggaatcacaagcgtgagccactgcgcccgactttttcacttctcttaatgctctgtaaacattaatgtatttatatatgtacttagaattttaaaaaatcaattttattgagttataattaacatacagtaaaaatgctcccatcttgagtaattccatgccttttgacaagtgttctgtacccatgccacgaccaccacaatcgagagagaacatcttcatcactccagaagggctcctttgcagtgagtactccctaggagttccagcggccggtgacattgatctgttttctgtcactgtagatgagatttgtctgttatatacaatttttaaaaattaaatgatatgtatggcttcttttgcttagcataatgtttttgagcttattcatttgttgcatatatcaatactttgcttctttttaccacctgtacttcatttatggatacgttgtttatccatgtgtttatccccaatggacattgggttgtttctgattttttggttattattatgaataaagttgctatgaacattattgtataaatctt

SEQ ID NO: 429109 - DNA, 4303 bp, Homo sapiens
gccgactcgaagcccttataaggcgcggagacgccggctctggctgggccgcccgcctccacagccgccgcccagggttctcccgccactgccgcccgcacccccgcccccgcggggttaagatcacacacgcgcccacgccggcccgcggggcgtgcactttcgctgggttccgtccgccgcagcccaaacagttaactgaacggggaggggagggggcggggcttacccggggtcaccgccagggccctgctgggttccacgccacgttcctgtctccgcagggcgttcgatccctagagggaggagcctgtccaaacggacgctaacggcctacctccccctcaggtgctcttacagcctgttccaagtgtggcttaatccgtctccaccaccagatctttctccgtggattcctctgctaagaccgctgccatgccagtgacggtaacccgcaccaccatcacaaccaccacgacgtcatcttcgggcctggggtcccccatgatcgtggggtcccctcgggccctgacacagcccctgggtctccttcgcctgctgcagctggtgtctacctgcgtggccttctcgctggtggctagcgtgggcgcctggacggggtccatgggcaactggtccatgttcacctggtgcttctgcttctccgtgaccctgatcatcctcatcgtggagctgtgcgggctccaggcccgcttccccctgtcttggcgcaacttccccatcaccttcgcctgctatgcggccctcttctgcctctcggcctccatcatctaccccaccacctatgtccagttcctgtcccacggccgttcgcgggaccacgccatcgccgccaccttcttctcctgcatcgcgtgtgtggcttacgccaccgaagtggcctggacccgggcccggcccggcgagatcactggctatatggccaccgtacccgggctgctgaaggtgctggagaccttcgttgcctgcatcatcttcgcgttcatcagcgaccccaacctgtaccagcaccagccggccctggagtggtgcgtggcggtgtacgccatctgcttcatcctagcggccatcgccatcctgctgaacctgggggagtgcaccaacgtgctacccatccccttccccagcttcctgtcggggctggccttgctgtctgtcctcctctatgccaccgcccttgttctctggcccctctaccagttcgatgagaagtatggcggccagcctcggcgctcgagagatgtaagctgcagccgcagccatgcctactacgtgtgtgcctgggaccgccgactggctgtggccatcctgacggccatcaacctactggcgtatgtggctgacctggtgcactctgcccacctggtttttgtcaaggtctaagactctcccaagaggctcccgttccctctccaacctctttgttcttcttgcccgagttttctttatggagtacttctttcctccgcctttcctctgttttcctcttcctgtctcccctccctcccacctttttctttccttcccaattccttgcactctaaccagttcttggatgcatcttcttccttccctttcctcttgctgtttccttcctgtgttgttttgttgcccacatcctgttttcacccctgagctgtttctctttttcttttctttctttttttttttttttttaagacggattctcactctgtggcccaggctggagcgcagtggtgcgatctcgactcactgcaacccccgcctcctgggttcaagcgattctcctgccccagcctcccaagtagctgggaggacaggtgtgagctgccgcacccagcctgtttctctttttccactcttcttttttctcatctcttttctgggttgcctgtcggctttcttatctgcctgttttgcaagcaccttctcctgtgtccttgggagccctgagacttctttctctccttgcctccacccacctccaaaggtgctgagctcacatccacaccccttgcagccgtccatgccacagccccccaaggggccccattgccaaagcatgcctgcccaccctcgctgtgccttagtcagtgtgtacgtgtgtgtgtgtgtgtgtttggggggtggggggtgggtagctggggattgggccctctttctcccagtggaggaaggtgtgcagtgtacttcccctttaaattaaaaaacatatatatatatatatttggaggtcagtaatttccaatgggcgggaggcattaagcaccgaccctgggtccctaggccccgcctggcactcagccttgccagagattggctccagaatttttgccaggcttacagaacacccactgcctagaggccatcttaaaggaagcaggggctggatgcctttcatcccaactattctctgtggtatgaaaaagaaaaaaaaaaaaaaagaaggagtcggggccgggcgtggtggctcacgcctgtaatcccagcactttgggagaccaagtcaggcaatcatctgaagtcaggagttcaagaccagcctggccaacatggtgaaagcatgtctctattaaaaatacaaaaattagccgggcgtggtggcgggcgcctgtaatcccaggtatttggggggactgagacaggagaatcccttcaacccgggaggtggaggttgcagtaagtcaagatggcaccactgtgctccagcctgggggacagagcgagactccatctcaaaaaaaaaaaggaatcggacgaagaaccacaggatgttgaagacaactgtctgaagtatttgtgagggacagcgatgtggccctctgtgttaagaataacgtgtcctgctttggcagagagaagaaaatagccactgcccgctttcaaggcaagatcgaccttttctgttttgttttgtttttctttctttttcctggccatgaggacaaaaattactgagtggcccttaaagagggaagtttgttttcagctgttctcttttgcccgtaggtgggagggtggggattgctgcgtcctagctagaggaatggctttgcttgaatgtgtagtgcacacgcacgggtgtttctgtgtgctagttgcttcttgctgctgcttcctgcttgtctgggactcacatacataacgtgatatatatatatatatataaatgtataaatatatattttatttttttttaaatccttggagcttctggttcctatcagttcctgttgttaatcgtagaaccgttgtcccttcccccattcccgtatccatcatgttctttttcttttaaatatcaatataaaggtaaaagaaaaaaaaaaaaaaaaccaaaaaaaaaaaaaaaaaaaaaaaaaaaaaaattttgcgcccccccccccccccaaaaactttttaagaaaccccaccgcgtagggagcgaccgggaccccagaagaggtacagagcacacacgggtccaaaacggagtgtctccccacaagaggaacacccggggcacacaaacacaaagggacgagggaaaatcacacaccgaactaataaaaagaaccgcccgggaggcaaacaacagcaacggtctccgtcgacaaaaacaacccagagaagagagagcactacgagcagaccaacaataacacgggagaatcatctaaaacacggggagagacactcacacgcagacgcccccagaggaaaacccaaaagatcaatagcccccacccccttggagagaaacaaaagaacgaatcagacgcacacacaggacgacagacacagaaggacatgcacacagacagcaagaagagcagaggaccgcggacacacaagaagagacagaaagggagaagcgcagagcggaggacaacggggagcacccagacgcgccgcgacggagacacggaaggagacagccaggagacacgagcgcgcgagcaggcggacgcgacagcacaccagcgaccacggcgaacccaagagcagaccgaccaagcccggacgggccggcgtggcggacgaacggcgcagcaaccataaaacagagcataacaccagtctctcagaaaccaccaaaaccccactgagcataaagcgtaacgctatataacaaccataaaactacatacaccatccataaatgtaacacaactataaaacatcaatcatacactctcaacacaacaagacacacaccatatcaacaaaacagatacgcacccagtatacacttccccatcaaaagcaaataacagaaaatacaacatgacattaataaacgaaaacataacatataaaa

SEQ ID NO: 429110 - DNA, 4030 bp, Homo sapiens
gctggtaccggccgaagtcttagaagctgccgctgtcgtctttgcttcagccgcagtcgccactggctgcctgaggtgctcttacagcctgttccaagtgtggcttaatccgtctccaccaccagatctttctccgtggattcctctgctaagaccgctgccatgccagtgacggtaacccgcaccaccatcacaaccaccacgacgtcatcttcgggcctggggtcccccatgatcgtggggtcccctcgggccctgacacagcccctgggtctccttcgcctgctgcagctggtgtctacctgcgtggccttctcgctggtggctagcgtgggcgcctggacggggtccatgggcaactggtccatgttcacctggtgcttctgcttctccgtgaccctgatcatcctcatcgtggagctgtgcgggctccaggcccgcttccccctgtcttggcgcaacttccccatcaccttcgcctgctatgcggccctcttctgcctctcggcctccatcatctaccccaccacctatgtccagttcctgtcccacggccgttcgcgggaccacgccatcgccgccaccttcttctcctgcatcgcgtgtgtggcttacgccaccgaagtggcctggacccgggcccggcccggcgagatcactggctatatggccaccgtacccgggctgctgaaggtgctggagaccttcgttgcctgcatcatcttcgcgttcatcagcgaccccaacctgtaccagcaccagccggccctggagtggtgcgtggcggtgtacgccatctgcttcatcctagcggccatcgccatcctgctgaacctgggggagtgcaccaacgtgctacccatccccttccccagcttcctgtcggggctggccttgctgtctgtcctcctctatgccaccgcccttgttctctggcccctctaccagttcgatgagaagtatggcggccagcctcggcgctcgagagatgtaagctgcagccgcagccatgcctactacgtgtgtgcctgggaccgccgactggctgtggccatcctgacggccatcaacctactggcgtatgtggctgacctggtgcactctgcccacctggtttttgtcaaggtctaagactctcccaagaggctcccgttccctctccaacctctttgttcttcttgcccgagttttctttatggagtacttctttcctccgcctttcctctgttttcctcttcctgtctcccctccctcccacctttttctttccttcccaattccttgcactctaaccagttcttggatgcatcttcttccttccctttcctcttgctgtttccttcctgtgttgttttgttgcccacatcctgttttcacccctgagctgtttctctttttcttttctttctttttttttttttttttaagacggattctcactctgtggcccaggctggagcgcagtggtgcgatctcgactcactgcaacccccgcctcctgggttcaagcgattctcctgccccagcctcccaagtagctgggaggacaggtgtgagctgccgcacccagcctgtttctctttttccactcttcttttttctcatctcttttctgggttgcctgtcggctttcttatctgcctgttttgcaagcaccttctcctgtgtccttgggagccctgagacttctttctctccttgcctccacccacctccaaaggtgctgagctcacatccacaccccttgcagccgtccatgccacagccccccaaggggccccattgccaaagcatgcctgcccaccctcgctgtgccttagtcagtgtgtacgtgtgtgtgtgtgtgtgtttggggggtggggggtgggtagctggggattgggccctctttctcccagtggaggaaggtgtgcagtgtacttcccctttaaattaaaaaacatatatatatatatatttggaggtcagtaatttccaatgggcgggaggcattaagcaccgaccctgggtccctaggccccgcctggcactcagccttgccagagattggctccagaatttttgccaggcttacagaacacccactgcctagaggccatcttaaaggaagcaggggctggatgcctttcatcccaactattctctgtggtatgaaaaagaaaaaaaaaaaaaaagaaggagtcggggccgggcgtggtggctcacgcctgtaatcccagcactttgggagaccaagtcaggcaatcatctgaagtcaggagttcaagaccagcctggccaacatggtgaaagcatgtctctattaaaaatacaaaaattagccgggcgtggtggcgggcgcctgtaatcccaggtatttggggggactgagacaggagaatcccttcaacccgggaggtggaggttgcagtaagtcaagatggcaccactgtgctccagcctgggggacagagcgagactccatctcaaaaaaaaaaaggaatcggacgaagaaccacaggatgttgaagacaactgtctgaagtatttgtgagggacagcgatgtggccctctgtgttaagaataacgtgtcctgctttggcagagagaagaaaatagccactgcccgctttcaaggcaagatcgaccttttctgttttgttttgtttttctttctttttcctggccatgaggacaaaaattactgagtggcccttaaagagggaagtttgttttcagctgttctcttttgcccgtaggtgggagggtggggattgctgcgtcctagctagaggaatggctttgcttgaatgtgtagtgcacacgcacgggtgtttctgtgtgctagttgcttcttgctgctgcttcctgcttgtctgggactcacatacataacgtgatatatatatatatatataaatgtataaatatatattttatttttttttaaatccttggagcttctggttcctatcagttcctgttgttaatcgtagaaccgttgtcccttcccccattcccgtatccatcatgttctttttcttttaaatatcaatataaaggtaaaagaaaaaaaaaaaaaaaaccaaaaaaaaaaaaaaaaaaaaaaaaaaaaaaattttgcgcccccccccccccccaaaaactttttaagaaaccccaccgcgtagggagcgaccgggaccccagaagaggtacagagcacacacgggtccaaaacggagtgtctccccacaagaggaacacccggggcacacaaacacaaagggacgagggaaaatcacacaccgaactaataaaaagaaccgcccgggaggcaaacaacagcaacggtctccgtcgacaaaaacaacccagagaagagagagcactacgagcagaccaacaataacacgggagaatcatctaaaacacggggagagacactcacacgcagacgcccccagaggaaaacccaaaagatcaatagcccccacccccttggagagaaacaaaagaacgaatcagacgcacacacaggacgacagacacagaaggacatgcacacagacagcaagaagagcagaggaccgcggacacacaagaagagacagaaagggagaagcgcagagcggaggacaacggggagcacccagacgcgccgcgacggagacacggaaggagacagccaggagacacgagcgcgcgagcaggcggacgcgacagcacaccagcgaccacggcgaacccaagagcagaccgaccaagcccggacgggccggcgtggcggacgaacggcgcagcaaccataaaacagagcataacaccagtctctcagaaaccaccaaaaccccactgagcataaagcgtaacgctatataacaaccataaaactacatacaccatccataaatgtaacacaactataaaacatcaatcatacactctcaacacaacaagacacacaccatatcaacaaaacagatacgcacccagtatacacttccccatcaaaagcaaataacagaaaatacaacatgacattaataaacgaaaacataacatataaaa

SEQ ID NO: 429111 - DNA, 4050 bp, Homo sapiens
gattgactctgtaggactcccccacacttcgatcgcggagaaagatctgccgctgtcgtctttgcttcagccgcagtcgccactggctgcctgaggtgctcttacagcctgttccaagtgtggcttaatccgtctccaccaccagatctttctccgtggattcctctgctaagaccgctgccatgccagtgacggtaacccgcaccaccatcacaaccaccacgacgtcatcttcgggcctggggtcccccatgatcgtggggtcccctcgggccctgacacagcccctgggtctccttcgcctgctgcagctggtgtctacctgcgtggccttctcgctggtggctagcgtgggcgcctggacggggtccatgggcaactggtccatgttcacctggtgcttctgcttctccgtgaccctgatcatcctcatcgtggagctgtgcgggctccaggcccgcttccccctgtcttggcgcaacttccccatcaccttcgcctgctatgcggccctcttctgcctctcggcctccatcatctaccccaccacctatgtccagttcctgtcccacggccgttcgcgggaccacgccatcgccgccaccttcttctcctgcatcgcgtgtgtggcttacgccaccgaagtggcctggacccgggcccggcccggcgagatcactggctatatggccaccgtacccgggctgctgaaggtgctggagaccttcgttgcctgcatcatcttcgcgttcatcagcgaccccaacctgtaccagcaccagccggccctggagtggtgcgtggcggtgtacgccatctgcttcatcctagcggccatcgccatcctgctgaacctgggggagtgcaccaacgtgctacccatccccttccccagcttcctgtcggggctggccttgctgtctgtcctcctctatgccaccgcccttgttctctggcccctctaccagttcgatgagaagtatggcggccagcctcggcgctcgagagatgtaagctgcagccgcagccatgcctactacgtgtgtgcctgggaccgccgactggctgtggccatcctgacggccatcaacctactggcgtatgtggctgacctggtgcactctgcccacctggtttttgtcaaggtctaagactctcccaagaggctcccgttccctctccaacctctttgttcttcttgcccgagttttctttatggagtacttctttcctccgcctttcctctgttttcctcttcctgtctcccctccctcccacctttttctttccttcccaattccttgcactctaaccagttcttggatgcatcttcttccttccctttcctcttgctgtttccttcctgtgttgttttgttgcccacatcctgttttcacccctgagctgtttctctttttcttttctttctttttttttttttttttaagacggattctcactctgtggcccaggctggagcgcagtggtgcgatctcgactcactgcaacccccgcctcctgggttcaagcgattctcctgccccagcctcccaagtagctgggaggacaggtgtgagctgccgcacccagcctgtttctctttttccactcttcttttttctcatctcttttctgggttgcctgtcggctttcttatctgcctgttttgcaagcaccttctcctgtgtccttgggagccctgagacttctttctctccttgcctccacccacctccaaaggtgctgagctcacatccacaccccttgcagccgtccatgccacagccccccaaggggccccattgccaaagcatgcctgcccaccctcgctgtgccttagtcagtgtgtacgtgtgtgtgtgtgtgtgtttggggggtggggggtgggtagctggggattgggccctctttctcccagtggaggaaggtgtgcagtgtacttcccctttaaattaaaaaacatatatatatatatatttggaggtcagtaatttccaatgggcgggaggcattaagcaccgaccctgggtccctaggccccgcctggcactcagccttgccagagattggctccagaatttttgccaggcttacagaacacccactgcctagaggccatcttaaaggaagcaggggctggatgcctttcatcccaactattctctgtggtatgaaaaagaaaaaaaaaaaaaaagaaggagtcggggccgggcgtggtggctcacgcctgtaatcccagcactttgggagaccaagtcaggcaatcatctgaagtcaggagttcaagaccagcctggccaacatggtgaaagcatgtctctattaaaaatacaaaaattagccgggcgtggtggcgggcgcctgtaatcccaggtatttggggggactgagacaggagaatcccttcaacccgggaggtggaggttgcagtaagtcaagatggcaccactgtgctccagcctgggggacagagcgagactccatctcaaaaaaaaaaaggaatcggacgaagaaccacaggatgttgaagacaactgtctgaagtatttgtgagggacagcgatgtggccctctgtgttaagaataacgtgtcctgctttggcagagagaagaaaatagccactgcccgctttcaaggcaagatcgaccttttctgttttgttttgtttttctttctttttcctggccatgaggacaaaaattactgagtggcccttaaagagggaagtttgttttcagctgttctcttttgcccgtaggtgggagggtggggattgctgcgtcctagctagaggaatggctttgcttgaatgtgtagtgcacacgcacgggtgtttctgtgtgctagttgcttcttgctgctgcttcctgcttgtctgggactcacatacataacgtgatatatatatatatatataaatgtataaatatatattttatttttttttaaatccttggagcttctggttcctatcagttcctgttgttaatcgtagaaccgttgtcccttcccccattcccgtatccatcatgttctttttcttttaaatatcaatataaaggtaaaagaaaaaaaaaaaaaaaaccaaaaaaaaaaaaaaaaaaaaaaaaaaaaaaattttgcgcccccccccccccccaaaaactttttaagaaaccccaccgcgtagggagcgaccgggaccccagaagaggtacagagcacacacgggtccaaaacggagtgtctccccacaagaggaacacccggggcacacaaacacaaagggacgagggaaaatcacacaccgaactaataaaaagaaccgcccgggaggcaaacaacagcaacggtctccgtcgacaaaaacaacccagagaagagagagcactacgagcagaccaacaataacacgggagaatcatctaaaacacggggagagacactcacacgcagacgcccccagaggaaaacccaaaagatcaatagcccccacccccttggagagaaacaaaagaacgaatcagacgcacacacaggacgacagacacagaaggacatgcacacagacagcaagaagagcagaggaccgcggacacacaagaagagacagaaagggagaagcgcagagcggaggacaacggggagcacccagacgcgccgcgacggagacacggaaggagacagccaggagacacgagcgcgcgagcaggcggacgcgacagcacaccagcgaccacggcgaacccaagagcagaccgaccaagcccggacgggccggcgtggcggacgaacggcgcagcaaccataaaacagagcataacaccagtctctcagaaaccaccaaaaccccactgagcataaagcgtaacgctatataacaaccataaaactacatacaccatccataaatgtaacacaactataaaacatcaatcatacactctcaacacaacaagacacacaccatatcaacaaaacagatacgcacccagtatacacttccccatcaaaagcaaataacagaaaatacaacatgacattaataaacgaaaacataacatataaaa

SEQ ID NO: 429112 - DNA, 4084 bp, Homo sapiens
cgccaccaggccccgcccagcggccgcagccagccaggccgcgcccgggacgactgcagagcgcgggcgttcgatccctagagggaggagcctgtccaaacggacgctaacggcctacctccccctcaggtgctcttacagcctgttccaagtgtggcttaatccgtctccaccaccagatctttctccgtggattcctctgctaagaccgctgccatgccagtgacggtaacccgcaccaccatcacaaccaccacgacgtcatcttcgggcctggggtcccccatgatcgtggggtcccctcgggccctgacacagcccctgggtctccttcgcctgctgcagctggtgtctacctgcgtggccttctcgctggtggctagcgtgggcgcctggacggggtccatgggcaactggtccatgttcacctggtgcttctgcttctccgtgaccctgatcatcctcatcgtggagctgtgcgggctccaggcccgcttccccctgtcttggcgcaacttccccatcaccttcgcctgctatgcggccctcttctgcctctcggcctccatcatctaccccaccacctatgtccagttcctgtcccacggccgttcgcgggaccacgccatcgccgccaccttcttctcctgcatcgcgtgtgtggcttacgccaccgaagtggcctggacccgggcccggcccggcgagatcactggctatatggccaccgtacccgggctgctgaaggtgctggagaccttcgttgcctgcatcatcttcgcgttcatcagcgaccccaacctgtaccagcaccagccggccctggagtggtgcgtggcggtgtacgccatctgcttcatcctagcggccatcgccatcctgctgaacctgggggagtgcaccaacgtgctacccatccccttccccagcttcctgtcggggctggccttgctgtctgtcctcctctatgccaccgcccttgttctctggcccctctaccagttcgatgagaagtatggcggccagcctcggcgctcgagagatgtaagctgcagccgcagccatgcctactacgtgtgtgcctgggaccgccgactggctgtggccatcctgacggccatcaacctactggcgtatgtggctgacctggtgcactctgcccacctggtttttgtcaaggtctaagactctcccaagaggctcccgttccctctccaacctctttgttcttcttgcccgagttttctttatggagtacttctttcctccgcctttcctctgttttcctcttcctgtctcccctccctcccacctttttctttccttcccaattccttgcactctaaccagttcttggatgcatcttcttccttccctttcctcttgctgtttccttcctgtgttgttttgttgcccacatcctgttttcacccctgagctgtttctctttttcttttctttctttttttttttttttttaagacggattctcactctgtggcccaggctggagcgcagtggtgcgatctcgactcactgcaacccccgcctcctgggttcaagcgattctcctgccccagcctcccaagtagctgggaggacaggtgtgagctgccgcacccagcctgtttctctttttccactcttcttttttctcatctcttttctgggttgcctgtcggctttcttatctgcctgttttgcaagcaccttctcctgtgtccttgggagccctgagacttctttctctccttgcctccacccacctccaaaggtgctgagctcacatccacaccccttgcagccgtccatgccacagccccccaaggggccccattgccaaagcatgcctgcccaccctcgctgtgccttagtcagtgtgtacgtgtgtgtgtgtgtgtgtttggggggtggggggtgggtagctggggattgggccctctttctcccagtggaggaaggtgtgcagtgtacttcccctttaaattaaaaaacatatatatatatatatttggaggtcagtaatttccaatgggcgggaggcattaagcaccgaccctgggtccctaggccccgcctggcactcagccttgccagagattggctccagaatttttgccaggcttacagaacacccactgcctagaggccatcttaaaggaagcaggggctggatgcctttcatcccaactattctctgtggtatgaaaaagaaaaaaaaaaaaaaagaaggagtcggggccgggcgtggtggctcacgcctgtaatcccagcactttgggagaccaagtcaggcaatcatctgaagtcaggagttcaagaccagcctggccaacatggtgaaagcatgtctctattaaaaatacaaaaattagccgggcgtggtggcgggcgcctgtaatcccaggtatttggggggactgagacaggagaatcccttcaacccgggaggtggaggttgcagtaagtcaagatggcaccactgtgctccagcctgggggacagagcgagactccatctcaaaaaaaaaaaggaatcggacgaagaaccacaggatgttgaagacaactgtctgaagtatttgtgagggacagcgatgtggccctctgtgttaagaataacgtgtcctgctttggcagagagaagaaaatagccactgcccgctttcaaggcaagatcgaccttttctgttttgttttgtttttctttctttttcctggccatgaggacaaaaattactgagtggcccttaaagagggaagtttgttttcagctgttctcttttgcccgtaggtgggagggtggggattgctgcgtcctagctagaggaatggctttgcttgaatgtgtagtgcacacgcacgggtgtttctgtgtgctagttgcttcttgctgctgcttcctgcttgtctgggactcacatacataacgtgatatatatatatatatataaatgtataaatatatattttatttttttttaaatccttggagcttctggttcctatcagttcctgttgttaatcgtagaaccgttgtcccttcccccattcccgtatccatcatgttctttttcttttaaatatcaatataaaggtaaaagaaaaaaaaaaaaaaaaccaaaaaaaaaaaaaaaaaaaaaaaaaaaaaaattttgcgcccccccccccccccaaaaactttttaagaaaccccaccgcgtagggagcgaccgggaccccagaagaggtacagagcacacacgggtccaaaacggagtgtctccccacaagaggaacacccggggcacacaaacacaaagggacgagggaaaatcacacaccgaactaataaaaagaaccgcccgggaggcaaacaacagcaacggtctccgtcgacaaaaacaacccagagaagagagagcactacgagcagaccaacaataacacgggagaatcatctaaaacacggggagagacactcacacgcagacgcccccagaggaaaacccaaaagatcaatagcccccacccccttggagagaaacaaaagaacgaatcagacgcacacacaggacgacagacacagaaggacatgcacacagacagcaagaagagcagaggaccgcggacacacaagaagagacagaaagggagaagcgcagagcggaggacaacggggagcacccagacgcgccgcgacggagacacggaaggagacagccaggagacacgagcgcgcgagcaggcggacgcgacagcacaccagcgaccacggcgaacccaagagcagaccgaccaagcccggacgggccggcgtggcggacgaacggcgcagcaaccataaaacagagcataacaccagtctctcagaaaccaccaaaaccccactgagcataaagcgtaacgctatataacaaccataaaactacatacaccatccataaatgtaacacaactataaaacatcaatcatacactctcaacacaacaagacacacaccatatcaacaaaacagatacgcacccagtatacacttccccatcaaaagcaaataacagaaaatacaacatgacattaataaacgaaaacataacatataaaa

SEQ ID NO: 429113 - DNA, 3996 bp, Homo sapiens
gctggtaccggccgggagtttgggatcgactgcagagcgcggtgctcttacagcctgttccaagtgtggcttaatccgtctccaccaccagatctttctccgtggattcctctgctaagaccgctgccatgccagtgacggtaacccgcaccaccatcacaaccaccacgacgtcatcttcgggcctggggtcccccatgatcgtggggtcccctcgggccctgacacagcccctgggtctccttcgcctgctgcagctggtgtctacctgcgtggccttctcgctggtggctagcgtgggcgcctggacggggtccatgggcaactggtccatgttcacctggtgcttctgcttctccgtgaccctgatcatcctcatcgtggagctgtgcgggctccaggcccgcttccccctgtcttggcgcaacttccccatcaccttcgcctgctatgcggccctcttctgcctctcggcctccatcatctaccccaccacctatgtccagttcctgtcccacggccgttcgcgggaccacgccatcgccgccaccttcttctcctgcatcgcgtgtgtggcttacgccaccgaagtggcctggacccgggcccggcccggcgagatcactggctatatggccaccgtacccgggctgctgaaggtgctggagaccttcgttgcctgcatcatcttcgcgttcatcagcgaccccaacctgtaccagcaccagccggccctggagtggtgcgtggcggtgtacgccatctgcttcatcctagcggccatcgccatcctgctgaacctgggggagtgcaccaacgtgctacccatccccttccccagcttcctgtcggggctggccttgctgtctgtcctcctctatgccaccgcccttgttctctggcccctctaccagttcgatgagaagtatggcggccagcctcggcgctcgagagatgtaagctgcagccgcagccatgcctactacgtgtgtgcctgggaccgccgactggctgtggccatcctgacggccatcaacctactggcgtatgtggctgacctggtgcactctgcccacctggtttttgtcaaggtctaagactctcccaagaggctcccgttccctctccaacctctttgttcttcttgcccgagttttctttatggagtacttctttcctccgcctttcctctgttttcctcttcctgtctcccctccctcccacctttttctttccttcccaattccttgcactctaaccagttcttggatgcatcttcttccttccctttcctcttgctgtttccttcctgtgttgttttgttgcccacatcctgttttcacccctgagctgtttctctttttcttttctttctttttttttttttttttaagacggattctcactctgtggcccaggctggagcgcagtggtgcgatctcgactcactgcaacccccgcctcctgggttcaagcgattctcctgccccagcctcccaagtagctgggaggacaggtgtgagctgccgcacccagcctgtttctctttttccactcttcttttttctcatctcttttctgggttgcctgtcggctttcttatctgcctgttttgcaagcaccttctcctgtgtccttgggagccctgagacttctttctctccttgcctccacccacctccaaaggtgctgagctcacatccacaccccttgcagccgtccatgccacagccccccaaggggccccattgccaaagcatgcctgcccaccctcgctgtgccttagtcagtgtgtacgtgtgtgtgtgtgtgtgtttggggggtggggggtgggtagctggggattgggccctctttctcccagtggaggaaggtgtgcagtgtacttcccctttaaattaaaaaacatatatatatatatatttggaggtcagtaatttccaatgggcgggaggcattaagcaccgaccctgggtccctaggccccgcctggcactcagccttgccagagattggctccagaatttttgccaggcttacagaacacccactgcctagaggccatcttaaaggaagcaggggctggatgcctttcatcccaactattctctgtggtatgaaaaagaaaaaaaaaaaaaaagaaggagtcggggccgggcgtggtggctcacgcctgtaatcccagcactttgggagaccaagtcaggcaatcatctgaagtcaggagttcaagaccagcctggccaacatggtgaaagcatgtctctattaaaaatacaaaaattagccgggcgtggtggcgggcgcctgtaatcccaggtatttggggggactgagacaggagaatcccttcaacccgggaggtggaggttgcagtaagtcaagatggcaccactgtgctccagcctgggggacagagcgagactccatctcaaaaaaaaaaaggaatcggacgaagaaccacaggatgttgaagacaactgtctgaagtatttgtgagggacagcgatgtggccctctgtgttaagaataacgtgtcctgctttggcagagagaagaaaatagccactgcccgctttcaaggcaagatcgaccttttctgttttgttttgtttttctttctttttcctggccatgaggacaaaaattactgagtggcccttaaagagggaagtttgttttcagctgttctcttttgcccgtaggtgggagggtggggattgctgcgtcctagctagaggaatggctttgcttgaatgtgtagtgcacacgcacgggtgtttctgtgtgctagttgcttcttgctgctgcttcctgcttgtctgggactcacatacataacgtgatatatatatatatatataaatgtataaatatatattttatttttttttaaatccttggagcttctggttcctatcagttcctgttgttaatcgtagaaccgttgtcccttcccccattcccgtatccatcatgttctttttcttttaaatatcaatataaaggtaaaagaaaaaaaaaaaaaaaaccaaaaaaaaaaaaaaaaaaaaaaaaaaaaaaattttgcgcccccccccccccccaaaaactttttaagaaaccccaccgcgtagggagcgaccgggaccccagaagaggtacagagcacacacgggtccaaaacggagtgtctccccacaagaggaacacccggggcacacaaacacaaagggacgagggaaaatcacacaccgaactaataaaaagaaccgcccgggaggcaaacaacagcaacggtctccgtcgacaaaaacaacccagagaagagagagcactacgagcagaccaacaataacacgggagaatcatctaaaacacggggagagacactcacacgcagacgcccccagaggaaaacccaaaagatcaatagcccccacccccttggagagaaacaaaagaacgaatcagacgcacacacaggacgacagacacagaaggacatgcacacagacagcaagaagagcagaggaccgcggacacacaagaagagacagaaagggagaagcgcagagcggaggacaacggggagcacccagacgcgccgcgacggagacacggaaggagacagccaggagacacgagcgcgcgagcaggcggacgcgacagcacaccagcgaccacggcgaacccaagagcagaccgaccaagcccggacgggccggcgtggcggacgaacggcgcagcaaccataaaacagagcataacaccagtctctcagaaaccaccaaaaccccactgagcataaagcgtaacgctatataacaaccataaaactacatacaccatccataaatgtaacacaactataaaacatcaatcatacactctcaacacaacaagacacacaccatatcaacaaaacagatacgcacccagtatacacttccccatcaaaagcaaataacagaaaatacaacatgacattaataaacgaaaacataacatataaaa

SEQ ID NO: 429114 - DNA, 3981 bp, Homo sapiens
gctggtaccggccgaagtcttagaaggtgctcttacagcctgttccaagtgtggcttaatccgtctccaccaccagatctttctccgtggattcctctgctaagaccgctgccatgccagtgacggtaacccgcaccaccatcacaaccaccacgacgtcatcttcgggcctggggtcccccatgatcgtggggtcccctcgggccctgacacagcccctgggtctccttcgcctgctgcagctggtgtctacctgcgtggccttctcgctggtggctagcgtgggcgcctggacggggtccatgggcaactggtccatgttcacctggtgcttctgcttctccgtgaccctgatcatcctcatcgtggagctgtgcgggctccaggcccgcttccccctgtcttggcgcaacttccccatcaccttcgcctgctatgcggccctcttctgcctctcggcctccatcatctaccccaccacctatgtccagttcctgtcccacggccgttcgcgggaccacgccatcgccgccaccttcttctcctgcatcgcgtgtgtggcttacgccaccgaagtggcctggacccgggcccggcccggcgagatcactggctatatggccaccgtacccgggctgctgaaggtgctggagaccttcgttgcctgcatcatcttcgcgttcatcagcgaccccaacctgtaccagcaccagccggccctggagtggtgcgtggcggtgtacgccatctgcttcatcctagcggccatcgccatcctgctgaacctgggggagtgcaccaacgtgctacccatccccttccccagcttcctgtcggggctggccttgctgtctgtcctcctctatgccaccgcccttgttctctggcccctctaccagttcgatgagaagtatggcggccagcctcggcgctcgagagatgtaagctgcagccgcagccatgcctactacgtgtgtgcctgggaccgccgactggctgtggccatcctgacggccatcaacctactggcgtatgtggctgacctggtgcactctgcccacctggtttttgtcaaggtctaagactctcccaagaggctcccgttccctctccaacctctttgttcttcttgcccgagttttctttatggagtacttctttcctccgcctttcctctgttttcctcttcctgtctcccctccctcccacctttttctttccttcccaattccttgcactctaaccagttcttggatgcatcttcttccttccctttcctcttgctgtttccttcctgtgttgttttgttgcccacatcctgttttcacccctgagctgtttctctttttcttttctttctttttttttttttttttaagacggattctcactctgtggcccaggctggagcgcagtggtgcgatctcgactcactgcaacccccgcctcctgggttcaagcgattctcctgccccagcctcccaagtagctgggaggacaggtgtgagctgccgcacccagcctgtttctctttttccactcttcttttttctcatctcttttctgggttgcctgtcggctttcttatctgcctgttttgcaagcaccttctcctgtgtccttgggagccctgagacttctttctctccttgcctccacccacctccaaaggtgctgagctcacatccacaccccttgcagccgtccatgccacagccccccaaggggccccattgccaaagcatgcctgcccaccctcgctgtgccttagtcagtgtgtacgtgtgtgtgtgtgtgtgtttggggggtggggggtgggtagctggggattgggccctctttctcccagtggaggaaggtgtgcagtgtacttcccctttaaattaaaaaacatatatatatatatatttggaggtcagtaatttccaatgggcgggaggcattaagcaccgaccctgggtccctaggccccgcctggcactcagccttgccagagattggctccagaatttttgccaggcttacagaacacccactgcctagaggccatcttaaaggaagcaggggctggatgcctttcatcccaactattctctgtggtatgaaaaagaaaaaaaaaaaaaaagaaggagtcggggccgggcgtggtggctcacgcctgtaatcccagcactttgggagaccaagtcaggcaatcatctgaagtcaggagttcaagaccagcctggccaacatggtgaaagcatgtctctattaaaaatacaaaaattagccgggcgtggtggcgggcgcctgtaatcccaggtatttggggggactgagacaggagaatcccttcaacccgggaggtggaggttgcagtaagtcaagatggcaccactgtgctccagcctgggggacagagcgagactccatctcaaaaaaaaaaaggaatcggacgaagaaccacaggatgttgaagacaactgtctgaagtatttgtgagggacagcgatgtggccctctgtgttaagaataacgtgtcctgctttggcagagagaagaaaatagccactgcccgctttcaaggcaagatcgaccttttctgttttgttttgtttttctttctttttcctggccatgaggacaaaaattactgagtggcccttaaagagggaagtttgttttcagctgttctcttttgcccgtaggtgggagggtggggattgctgcgtcctagctagaggaatggctttgcttgaatgtgtagtgcacacgcacgggtgtttctgtgtgctagttgcttcttgctgctgcttcctgcttgtctgggactcacatacataacgtgatatatatatatatatataaatgtataaatatatattttatttttttttaaatccttggagcttctggttcctatcagttcctgttgttaatcgtagaaccgttgtcccttcccccattcccgtatccatcatgttctttttcttttaaatatcaatataaaggtaaaagaaaaaaaaaaaaaaaaccaaaaaaaaaaaaaaaaaaaaaaaaaaaaaaattttgcgcccccccccccccccaaaaactttttaagaaaccccaccgcgtagggagcgaccgggaccccagaagaggtacagagcacacacgggtccaaaacggagtgtctccccacaagaggaacacccggggcacacaaacacaaagggacgagggaaaatcacacaccgaactaataaaaagaaccgcccgggaggcaaacaacagcaacggtctccgtcgacaaaaacaacccagagaagagagagcactacgagcagaccaacaataacacgggagaatcatctaaaacacggggagagacactcacacgcagacgcccccagaggaaaacccaaaagatcaatagcccccacccccttggagagaaacaaaagaacgaatcagacgcacacacaggacgacagacacagaaggacatgcacacagacagcaagaagagcagaggaccgcggacacacaagaagagacagaaagggagaagcgcagagcggaggacaacggggagcacccagacgcgccgcgacggagacacggaaggagacagccaggagacacgagcgcgcgagcaggcggacgcgacagcacaccagcgaccacggcgaacccaagagcagaccgaccaagcccggacgggccggcgtggcggacgaacggcgcagcaaccataaaacagagcataacaccagtctctcagaaaccaccaaaaccccactgagcataaagcgtaacgctatataacaaccataaaactacatacaccatccataaatgtaacacaactataaaacatcaatcatacactctcaacacaacaagacacacaccatatcaacaaaacagatacgcacccagtatacacttccccatcaaaagcaaataacagaaaatacaacatgacattaataaacgaaaacataacatataaaa

SEQ ID NO: 429115 - DNA, 4315 bp, Homo sapiens
aggctggagtgcagtggcaatcttggctcactgcaacctccacctcccgggttcaagccattctcctgcctcagcctctggagtagctgggattacaggcggcgccacaacgcctgattaatttttttgtatttttaatagagacggggtttcatcatgttggccacgctggtcttgaattcccgacctcaggtgatctgcctgccttggcctcccaaagtgctaggattacagaggtgagccaccgtgaccggccttcactcttcaaatgtttgcttcctgttcctgctaccctgaaccctgctgttgaggggttctagtgtctacaagggaaccgctgccaccacgaggaataacacagtgctcttacagcctgttccaagtgtggcttaatccgtctccaccaccagatctttctccgtggattcctctgctaagaccgctgccatgccagtgacggtaacccgcaccaccatcacaaccaccacgacgtcatcttcgggcctggggtcccccatgatcgtggggtcccctcgggccctgacacagcccctgggtctccttcgcctgctgcagctggtgtctacctgcgtggccttctcgctggtggctagcgtgggcgcctggacggggtccatgggcaactggtccatgttcacctggtgcttctgcttctccgtgaccctgatcatcctcatcgtggagctgtgcgggctccaggcccgcttccccctgtcttggcgcaacttccccatcaccttcgcctgctatgcggccctcttctgcctctcggcctccatcatctaccccaccacctatgtccagttcctgtcccacggccgttcgcgggaccacgccatcgccgccaccttcttctcctgcatcgcgtgtgtggcttacgccaccgaagtggcctggacccgggcccggcccggcgagatcactggctatatggccaccgtacccgggctgctgaaggtgctggagaccttcgttgcctgcatcatcttcgcgttcatcagcgaccccaacctgtaccagcaccagccggccctggagtggtgcgtggcggtgtacgccatctgcttcatcctagcggccatcgccatcctgctgaacctgggggagtgcaccaacgtgctacccatccccttccccagcttcctgtcggggctggccttgctgtctgtcctcctctatgccaccgcccttgttctctggcccctctaccagttcgatgagaagtatggcggccagcctcggcgctcgagagatgtaagctgcagccgcagccatgcctactacgtgtgtgcctgggaccgccgactggctgtggccatcctgacggccatcaacctactggcgtatgtggctgacctggtgcactctgcccacctggtttttgtcaaggtctaagactctcccaagaggctcccgttccctctccaacctctttgttcttcttgcccgagttttctttatggagtacttctttcctccgcctttcctctgttttcctcttcctgtctcccctccctcccacctttttctttccttcccaattccttgcactctaaccagttcttggatgcatcttcttccttccctttcctcttgctgtttccttcctgtgttgttttgttgcccacatcctgttttcacccctgagctgtttctctttttcttttctttctttttttttttttttttaagacggattctcactctgtggcccaggctggagcgcagtggtgcgatctcgactcactgcaacccccgcctcctgggttcaagcgattctcctgccccagcctcccaagtagctgggaggacaggtgtgagctgccgcacccagcctgtttctctttttccactcttcttttttctcatctcttttctgggttgcctgtcggctttcttatctgcctgttttgcaagcaccttctcctgtgtccttgggagccctgagacttctttctctccttgcctccacccacctccaaaggtgctgagctcacatccacaccccttgcagccgtccatgccacagccccccaaggggccccattgccaaagcatgcctgcccaccctcgctgtgccttagtcagtgtgtacgtgtgtgtgtgtgtgtgtttggggggtggggggtgggtagctggggattgggccctctttctcccagtggaggaaggtgtgcagtgtacttcccctttaaattaaaaaacatatatatatatatatttggaggtcagtaatttccaatgggcgggaggcattaagcaccgaccctgggtccctaggccccgcctggcactcagccttgccagagattggctccagaatttttgccaggcttacagaacacccactgcctagaggccatcttaaaggaagcaggggctggatgcctttcatcccaactattctctgtggtatgaaaaagaaaaaaaaaaaaaaagaaggagtcggggccgggcgtggtggctcacgcctgtaatcccagcactttgggagaccaagtcaggcaatcatctgaagtcaggagttcaagaccagcctggccaacatggtgaaagcatgtctctattaaaaatacaaaaattagccgggcgtggtggcgggcgcctgtaatcccaggtatttggggggactgagacaggagaatcccttcaacccgggaggtggaggttgcagtaagtcaagatggcaccactgtgctccagcctgggggacagagcgagactccatctcaaaaaaaaaaaggaatcggacgaagaaccacaggatgttgaagacaactgtctgaagtatttgtgagggacagcgatgtggccctctgtgttaagaataacgtgtcctgctttggcagagagaagaaaatagccactgcccgctttcaaggcaagatcgaccttttctgttttgttttgtttttctttctttttcctggccatgaggacaaaaattactgagtggcccttaaagagggaagtttgttttcagctgttctcttttgcccgtaggtgggagggtggggattgctgcgtcctagctagaggaatggctttgcttgaatgtgtagtgcacacgcacgggtgtttctgtgtgctagttgcttcttgctgctgcttcctgcttgtctgggactcacatacataacgtgatatatatatatatatataaatgtataaatatatattttatttttttttaaatccttggagcttctggttcctatcagttcctgttgttaatcgtagaaccgttgtcccttcccccattcccgtatccatcatgttctttttcttttaaatatcaatataaaggtaaaagaaaaaaaaaaaaaaaaccaaaaaaaaaaaaaaaaaaaaaaaaaaaaaaattttgcgcccccccccccccccaaaaactttttaagaaaccccaccgcgtagggagcgaccgggaccccagaagaggtacagagcacacacgggtccaaaacggagtgtctccccacaagaggaacacccggggcacacaaacacaaagggacgagggaaaatcacacaccgaactaataaaaagaaccgcccgggaggcaaacaacagcaacggtctccgtcgacaaaaacaacccagagaagagagagcactacgagcagaccaacaataacacgggagaatcatctaaaacacggggagagacactcacacgcagacgcccccagaggaaaacccaaaagatcaatagcccccacccccttggagagaaacaaaagaacgaatcagacgcacacacaggacgacagacacagaaggacatgcacacagacagcaagaagagcagaggaccgcggacacacaagaagagacagaaagggagaagcgcagagcggaggacaacggggagcacccagacgcgccgcgacggagacacggaaggagacagccaggagacacgagcgcgcgagcaggcggacgcgacagcacaccagcgaccacggcgaacccaagagcagaccgaccaagcccggacgggccggcgtggcggacgaacggcgcagcaaccataaaacagagcataacaccagtctctcagaaaccaccaaaaccccactgagcataaagcgtaacgctatataacaaccataaaactacatacaccatccataaatgtaacacaactataaaacatcaatcatacactctcaacacaacaagacacacaccatatcaacaaaacagatacgcacccagtatacacttccccatcaaaagcaaataacagaaaatacaacatgacattaataaacgaaaacataacatataaaa

SEQ ID NO: 429116 - DNA, 4148 bp, Homo sapiens
gccgactcgaagcccttataaggcgcggagacgccggctctggctgggccgcccgcctccacagccgccgcccagggttctcccgccactgccgcccgcacccccgcccccgcggggttaagatcacacacgcgcccacgccggcccgcggggcgtgcactttcgctgggttccgtccgccgcagcccaaacagtgctcttacagcctgttccaagtgtggcttaatccgtctccaccaccagatctttctccgtggattcctctgctaagaccgctgccatgccagtgacggtaacccgcaccaccatcacaaccaccacgacgtcatcttcgggcctggggtcccccatgatcgtggggtcccctcgggccctgacacagcccctgggtctccttcgcctgctgcagctggtgtctacctgcgtggccttctcgctggtggctagcgtgggcgcctggacggggtccatgggcaactggtccatgttcacctggtgcttctgcttctccgtgaccctgatcatcctcatcgtggagctgtgcgggctccaggcccgcttccccctgtcttggcgcaacttccccatcaccttcgcctgctatgcggccctcttctgcctctcggcctccatcatctaccccaccacctatgtccagttcctgtcccacggccgttcgcgggaccacgccatcgccgccaccttcttctcctgcatcgcgtgtgtggcttacgccaccgaagtggcctggacccgggcccggcccggcgagatcactggctatatggccaccgtacccgggctgctgaaggtgctggagaccttcgttgcctgcatcatcttcgcgttcatcagcgaccccaacctgtaccagcaccagccggccctggagtggtgcgtggcggtgtacgccatctgcttcatcctagcggccatcgccatcctgctgaacctgggggagtgcaccaacgtgctacccatccccttccccagcttcctgtcggggctggccttgctgtctgtcctcctctatgccaccgcccttgttctctggcccctctaccagttcgatgagaagtatggcggccagcctcggcgctcgagagatgtaagctgcagccgcagccatgcctactacgtgtgtgcctgggaccgccgactggctgtggccatcctgacggccatcaacctactggcgtatgtggctgacctggtgcactctgcccacctggtttttgtcaaggtctaagactctcccaagaggctcccgttccctctccaacctctttgttcttcttgcccgagttttctttatggagtacttctttcctccgcctttcctctgttttcctcttcctgtctcccctccctcccacctttttctttccttcccaattccttgcactctaaccagttcttggatgcatcttcttccttccctttcctcttgctgtttccttcctgtgttgttttgttgcccacatcctgttttcacccctgagctgtttctctttttcttttctttctttttttttttttttttaagacggattctcactctgtggcccaggctggagcgcagtggtgcgatctcgactcactgcaacccccgcctcctgggttcaagcgattctcctgccccagcctcccaagtagctgggaggacaggtgtgagctgccgcacccagcctgtttctctttttccactcttcttttttctcatctcttttctgggttgcctgtcggctttcttatctgcctgttttgcaagcaccttctcctgtgtccttgggagccctgagacttctttctctccttgcctccacccacctccaaaggtgctgagctcacatccacaccccttgcagccgtccatgccacagccccccaaggggccccattgccaaagcatgcctgcccaccctcgctgtgccttagtcagtgtgtacgtgtgtgtgtgtgtgtgtttggggggtggggggtgggtagctggggattgggccctctttctcccagtggaggaaggtgtgcagtgtacttcccctttaaattaaaaaacatatatatatatatatttggaggtcagtaatttccaatgggcgggaggcattaagcaccgaccctgggtccctaggccccgcctggcactcagccttgccagagattggctccagaatttttgccaggcttacagaacacccactgcctagaggccatcttaaaggaagcaggggctggatgcctttcatcccaactattctctgtggtatgaaaaagaaaaaaaaaaaaaaagaaggagtcggggccgggcgtggtggctcacgcctgtaatcccagcactttgggagaccaagtcaggcaatcatctgaagtcaggagttcaagaccagcctggccaacatggtgaaagcatgtctctattaaaaatacaaaaattagccgggcgtggtggcgggcgcctgtaatcccaggtatttggggggactgagacaggagaatcccttcaacccgggaggtggaggttgcagtaagtcaagatggcaccactgtgctccagcctgggggacagagcgagactccatctcaaaaaaaaaaaggaatcggacgaagaaccacaggatgttgaagacaactgtctgaagtatttgtgagggacagcgatgtggccctctgtgttaagaataacgtgtcctgctttggcagagagaagaaaatagccactgcccgctttcaaggcaagatcgaccttttctgttttgttttgtttttctttctttttcctggccatgaggacaaaaattactgagtggcccttaaagagggaagtttgttttcagctgttctcttttgcccgtaggtgggagggtggggattgctgcgtcctagctagaggaatggctttgcttgaatgtgtagtgcacacgcacgggtgtttctgtgtgctagttgcttcttgctgctgcttcctgcttgtctgggactcacatacataacgtgatatatatatatatatataaatgtataaatatatattttatttttttttaaatccttggagcttctggttcctatcagttcctgttgttaatcgtagaaccgttgtcccttcccccattcccgtatccatcatgttctttttcttttaaatatcaatataaaggtaaaagaaaaaaaaaaaaaaaaccaaaaaaaaaaaaaaaaaaaaaaaaaaaaaaattttgcgcccccccccccccccaaaaactttttaagaaaccccaccgcgtagggagcgaccgggaccccagaagaggtacagagcacacacgggtccaaaacggagtgtctccccacaagaggaacacccggggcacacaaacacaaagggacgagggaaaatcacacaccgaactaataaaaagaaccgcccgggaggcaaacaacagcaacggtctccgtcgacaaaaacaacccagagaagagagagcactacgagcagaccaacaataacacgggagaatcatctaaaacacggggagagacactcacacgcagacgcccccagaggaaaacccaaaagatcaatagcccccacccccttggagagaaacaaaagaacgaatcagacgcacacacaggacgacagacacagaaggacatgcacacagacagcaagaagagcagaggaccgcggacacacaagaagagacagaaagggagaagcgcagagcggaggacaacggggagcacccagacgcgccgcgacggagacacggaaggagacagccaggagacacgagcgcgcgagcaggcggacgcgacagcacaccagcgaccacggcgaacccaagagcagaccgaccaagcccggacgggccggcgtggcggacgaacggcgcagcaaccataaaacagagcataacaccagtctctcagaaaccaccaaaaccccactgagcataaagcgtaacgctatataacaaccataaaactacatacaccatccataaatgtaacacaactataaaacatcaatcatacactctcaacacaacaagacacacaccatatcaacaaaacagatacgcacccagtatacacttccccatcaaaagcaaataacagaaaatacaacatgacattaataaacgaaaacataacatataaaa

SEQ ID NO: 429117 - DNA, 4020 bp, Homo sapiens
cgccaccaggccccgcccagcggccgcagccagccaggccgcgcccgggacgactgcagagcgcggtgctcttacagcctgttccaagtgtggcttaatccgtctccaccaccagatctttctccgtggattcctctgctaagaccgctgccatgccagtgacggtaacccgcaccaccatcacaaccaccacgacgtcatcttcgggcctggggtcccccatgatcgtggggtcccctcgggccctgacacagcccctgggtctccttcgcctgctgcagctggtgtctacctgcgtggccttctcgctggtggctagcgtgggcgcctggacggggtccatgggcaactggtccatgttcacctggtgcttctgcttctccgtgaccctgatcatcctcatcgtggagctgtgcgggctccaggcccgcttccccctgtcttggcgcaacttccccatcaccttcgcctgctatgcggccctcttctgcctctcggcctccatcatctaccccaccacctatgtccagttcctgtcccacggccgttcgcgggaccacgccatcgccgccaccttcttctcctgcatcgcgtgtgtggcttacgccaccgaagtggcctggacccgggcccggcccggcgagatcactggctatatggccaccgtacccgggctgctgaaggtgctggagaccttcgttgcctgcatcatcttcgcgttcatcagcgaccccaacctgtaccagcaccagccggccctggagtggtgcgtggcggtgtacgccatctgcttcatcctagcggccatcgccatcctgctgaacctgggggagtgcaccaacgtgctacccatccccttccccagcttcctgtcggggctggccttgctgtctgtcctcctctatgccaccgcccttgttctctggcccctctaccagttcgatgagaagtatggcggccagcctcggcgctcgagagatgtaagctgcagccgcagccatgcctactacgtgtgtgcctgggaccgccgactggctgtggccatcctgacggccatcaacctactggcgtatgtggctgacctggtgcactctgcccacctggtttttgtcaaggtctaagactctcccaagaggctcccgttccctctccaacctctttgttcttcttgcccgagttttctttatggagtacttctttcctccgcctttcctctgttttcctcttcctgtctcccctccctcccacctttttctttccttcccaattccttgcactctaaccagttcttggatgcatcttcttccttccctttcctcttgctgtttccttcctgtgttgttttgttgcccacatcctgttttcacccctgagctgtttctctttttcttttctttctttttttttttttttttaagacggattctcactctgtggcccaggctggagcgcagtggtgcgatctcgactcactgcaacccccgcctcctgggttcaagcgattctcctgccccagcctcccaagtagctgggaggacaggtgtgagctgccgcacccagcctgtttctctttttccactcttcttttttctcatctcttttctgggttgcctgtcggctttcttatctgcctgttttgcaagcaccttctcctgtgtccttgggagccctgagacttctttctctccttgcctccacccacctccaaaggtgctgagctcacatccacaccccttgcagccgtccatgccacagccccccaaggggccccattgccaaagcatgcctgcccaccctcgctgtgccttagtcagtgtgtacgtgtgtgtgtgtgtgtgtttggggggtggggggtgggtagctggggattgggccctctttctcccagtggaggaaggtgtgcagtgtacttcccctttaaattaaaaaacatatatatatatatatttggaggtcagtaatttccaatgggcgggaggcattaagcaccgaccctgggtccctaggccccgcctggcactcagccttgccagagattggctccagaatttttgccaggcttacagaacacccactgcctagaggccatcttaaaggaagcaggggctggatgcctttcatcccaactattctctgtggtatgaaaaagaaaaaaaaaaaaaaagaaggagtcggggccgggcgtggtggctcacgcctgtaatcccagcactttgggagaccaagtcaggcaatcatctgaagtcaggagttcaagaccagcctggccaacatggtgaaagcatgtctctattaaaaatacaaaaattagccgggcgtggtggcgggcgcctgtaatcccaggtatttggggggactgagacaggagaatcccttcaacccgggaggtggaggttgcagtaagtcaagatggcaccactgtgctccagcctgggggacagagcgagactccatctcaaaaaaaaaaaggaatcggacgaagaaccacaggatgttgaagacaactgtctgaagtatttgtgagggacagcgatgtggccctctgtgttaagaataacgtgtcctgctttggcagagagaagaaaatagccactgcccgctttcaaggcaagatcgaccttttctgttttgttttgtttttctttctttttcctggccatgaggacaaaaattactgagtggcccttaaagagggaagtttgttttcagctgttctcttttgcccgtaggtgggagggtggggattgctgcgtcctagctagaggaatggctttgcttgaatgtgtagtgcacacgcacgggtgtttctgtgtgctagttgcttcttgctgctgcttcctgcttgtctgggactcacatacataacgtgatatatatatatatatataaatgtataaatatatattttatttttttttaaatccttggagcttctggttcctatcagttcctgttgttaatcgtagaaccgttgtcccttcccccattcccgtatccatcatgttctttttcttttaaatatcaatataaaggtaaaagaaaaaaaaaaaaaaaaccaaaaaaaaaaaaaaaaaaaaaaaaaaaaaaattttgcgcccccccccccccccaaaaactttttaagaaaccccaccgcgtagggagcgaccgggaccccagaagaggtacagagcacacacgggtccaaaacggagtgtctccccacaagaggaacacccggggcacacaaacacaaagggacgagggaaaatcacacaccgaactaataaaaagaaccgcccgggaggcaaacaacagcaacggtctccgtcgacaaaaacaacccagagaagagagagcactacgagcagaccaacaataacacgggagaatcatctaaaacacggggagagacactcacacgcagacgcccccagaggaaaacccaaaagatcaatagcccccacccccttggagagaaacaaaagaacgaatcagacgcacacacaggacgacagacacagaaggacatgcacacagacagcaagaagagcagaggaccgcggacacacaagaagagacagaaagggagaagcgcagagcggaggacaacggggagcacccagacgcgccgcgacggagacacggaaggagacagccaggagacacgagcgcgcgagcaggcggacgcgacagcacaccagcgaccacggcgaacccaagagcagaccgaccaagcccggacgggccggcgtggcggacgaacggcgcagcaaccataaaacagagcataacaccagtctctcagaaaccaccaaaaccccactgagcataaagcgtaacgctatataacaaccataaaactacatacaccatccataaatgtaacacaactataaaacatcaatcatacactctcaacacaacaagacacacaccatatcaacaaaacagatacgcacccagtatacacttccccatcaaaagcaaataacagaaaatacaacatgacattaataaacgaaaacataacatataaaa

SEQ ID NO: 429118 - DNA, 3961 bp, Homo sapiens
aagatacggctaggtacgaggctgggtggtgtggcttaatccgtctccaccaccagatctttctccgtggattcctctgctaagaccgctgccatgccagtgacggtaacccgcaccaccatcacaaccaccacgacgtcatcttcgggcctggggtcccccatgatcgtggggtcccctcgggccctgacacagcccctgggtctccttcgcctgctgcagctggtgtctacctgcgtggccttctcgctggtggctagcgtgggcgcctggacggggtccatgggcaactggtccatgttcacctggtgcttctgcttctccgtgaccctgatcatcctcatcgtggagctgtgcgggctccaggcccgcttccccctgtcttggcgcaacttccccatcaccttcgcctgctatgcggccctcttctgcctctcggcctccatcatctaccccaccacctatgtccagttcctgtcccacggccgttcgcgggaccacgccatcgccgccaccttcttctcctgcatcgcgtgtgtggcttacgccaccgaagtggcctggacccgggcccggcccggcgagatcactggctatatggccaccgtacccgggctgctgaaggtgctggagaccttcgttgcctgcatcatcttcgcgttcatcagcgaccccaacctgtaccagcaccagccggccctggagtggtgcgtggcggtgtacgccatctgcttcatcctagcggccatcgccatcctgctgaacctgggggagtgcaccaacgtgctacccatccccttccccagcttcctgtcggggctggccttgctgtctgtcctcctctatgccaccgcccttgttctctggcccctctaccagttcgatgagaagtatggcggccagcctcggcgctcgagagatgtaagctgcagccgcagccatgcctactacgtgtgtgcctgggaccgccgactggctgtggccatcctgacggccatcaacctactggcgtatgtggctgacctggtgcactctgcccacctggtttttgtcaaggtctaagactctcccaagaggctcccgttccctctccaacctctttgttcttcttgcccgagttttctttatggagtacttctttcctccgcctttcctctgttttcctcttcctgtctcccctccctcccacctttttctttccttcccaattccttgcactctaaccagttcttggatgcatcttcttccttccctttcctcttgctgtttccttcctgtgttgttttgttgcccacatcctgttttcacccctgagctgtttctctttttcttttctttctttttttttttttttttaagacggattctcactctgtggcccaggctggagcgcagtggtgcgatctcgactcactgcaacccccgcctcctgggttcaagcgattctcctgccccagcctcccaagtagctgggaggacaggtgtgagctgccgcacccagcctgtttctctttttccactcttcttttttctcatctcttttctgggttgcctgtcggctttcttatctgcctgttttgcaagcaccttctcctgtgtccttgggagccctgagacttctttctctccttgcctccacccacctccaaaggtgctgagctcacatccacaccccttgcagccgtccatgccacagccccccaaggggccccattgccaaagcatgcctgcccaccctcgctgtgccttagtcagtgtgtacgtgtgtgtgtgtgtgtgtttggggggtggggggtgggtagctggggattgggccctctttctcccagtggaggaaggtgtgcagtgtacttcccctttaaattaaaaaacatatatatatatatatttggaggtcagtaatttccaatgggcgggaggcattaagcaccgaccctgggtccctaggccccgcctggcactcagccttgccagagattggctccagaatttttgccaggcttacagaacacccactgcctagaggccatcttaaaggaagcaggggctggatgcctttcatcccaactattctctgtggtatgaaaaagaaaaaaaaaaaaaaagaaggagtcggggccgggcgtggtggctcacgcctgtaatcccagcactttgggagaccaagtcaggcaatcatctgaagtcaggagttcaagaccagcctggccaacatggtgaaagcatgtctctattaaaaatacaaaaattagccgggcgtggtggcgggcgcctgtaatcccaggtatttggggggactgagacaggagaatcccttcaacccgggaggtggaggttgcagtaagtcaagatggcaccactgtgctccagcctgggggacagagcgagactccatctcaaaaaaaaaaaggaatcggacgaagaaccacaggatgttgaagacaactgtctgaagtatttgtgagggacagcgatgtggccctctgtgttaagaataacgtgtcctgctttggcagagagaagaaaatagccactgcccgctttcaaggcaagatcgaccttttctgttttgttttgtttttctttctttttcctggccatgaggacaaaaattactgagtggcccttaaagagggaagtttgttttcagctgttctcttttgcccgtaggtgggagggtggggattgctgcgtcctagctagaggaatggctttgcttgaatgtgtagtgcacacgcacgggtgtttctgtgtgctagttgcttcttgctgctgcttcctgcttgtctgggactcacatacataacgtgatatatatatatatatataaatgtataaatatatattttatttttttttaaatccttggagcttctggttcctatcagttcctgttgttaatcgtagaaccgttgtcccttcccccattcccgtatccatcatgttctttttcttttaaatatcaatataaaggtaaaagaaaaaaaaaaaaaaaaccaaaaaaaaaaaaaaaaaaaaaaaaaaaaaaattttgcgcccccccccccccccaaaaactttttaagaaaccccaccgcgtagggagcgaccgggaccccagaagaggtacagagcacacacgggtccaaaacggagtgtctccccacaagaggaacacccggggcacacaaacacaaagggacgagggaaaatcacacaccgaactaataaaaagaaccgcccgggaggcaaacaacagcaacggtctccgtcgacaaaaacaacccagagaagagagagcactacgagcagaccaacaataacacgggagaatcatctaaaacacggggagagacactcacacgcagacgcccccagaggaaaacccaaaagatcaatagcccccacccccttggagagaaacaaaagaacgaatcagacgcacacacaggacgacagacacagaaggacatgcacacagacagcaagaagagcagaggaccgcggacacacaagaagagacagaaagggagaagcgcagagcggaggacaacggggagcacccagacgcgccgcgacggagacacggaaggagacagccaggagacacgagcgcgcgagcaggcggacgcgacagcacaccagcgaccacggcgaacccaagagcagaccgaccaagcccggacgggccggcgtggcggacgaacggcgcagcaaccataaaacagagcataacaccagtctctcagaaaccaccaaaaccccactgagcataaagcgtaacgctatataacaaccataaaactacatacaccatccataaatgtaacacaactataaaacatcaatcatacactctcaacacaacaagacacacaccatatcaacaaaacagatacgcacccagtatacacttccccatcaaaagcaaataacagaaaatacaacatgacattaataaacgaaaacataacatataaaa

SEQ ID NO: 429119 - DNA, 3965 bp, Homo sapiens
gattgactctgtaggactcccccacacttcgatcgcggagaaagatctgccgctgtcgtctttgcttcagccgcagtcgccactggctgcctgagccatgccagtgacggtaacccgcaccaccatcacaaccaccacgacgtcatcttcgggcctggggtcccccatgatcgtggggtcccctcgggccctgacacagcccctgggtctccttcgcctgctgcagctggtgtctacctgcgtggccttctcgctggtggctagcgtgggcgcctggacggggtccatgggcaactggtccatgttcacctggtgcttctgcttctccgtgaccctgatcatcctcatcgtggagctgtgcgggctccaggcccgcttccccctgtcttggcgcaacttccccatcaccttcgcctgctatgcggccctcttctgcctctcggcctccatcatctaccccaccacctatgtccagttcctgtcccacggccgttcgcgggaccacgccatcgccgccaccttcttctcctgcatcgcgtgtgtggcttacgccaccgaagtggcctggacccgggcccggcccggcgagatcactggctatatggccaccgtacccgggctgctgaaggtgctggagaccttcgttgcctgcatcatcttcgcgttcatcagcgaccccaacctgtaccagcaccagccggccctggagtggtgcgtggcggtgtacgccatctgcttcatcctagcggccatcgccatcctgctgaacctgggggagtgcaccaacgtgctacccatccccttccccagcttcctgtcggggctggccttgctgtctgtcctcctctatgccaccgcccttgttctctggcccctctaccagttcgatgagaagtatggcggccagcctcggcgctcgagagatgtaagctgcagccgcagccatgcctactacgtgtgtgcctgggaccgccgactggctgtggccatcctgacggccatcaacctactggcgtatgtggctgacctggtgcactctgcccacctggtttttgtcaaggtctaagactctcccaagaggctcccgttccctctccaacctctttgttcttcttgcccgagttttctttatggagtacttctttcctccgcctttcctctgttttcctcttcctgtctcccctccctcccacctttttctttccttcccaattccttgcactctaaccagttcttggatgcatcttcttccttccctttcctcttgctgtttccttcctgtgttgttttgttgcccacatcctgttttcacccctgagctgtttctctttttcttttctttctttttttttttttttttaagacggattctcactctgtggcccaggctggagcgcagtggtgcgatctcgactcactgcaacccccgcctcctgggttcaagcgattctcctgccccagcctcccaagtagctgggaggacaggtgtgagctgccgcacccagcctgtttctctttttccactcttcttttttctcatctcttttctgggttgcctgtcggctttcttatctgcctgttttgcaagcaccttctcctgtgtccttgggagccctgagacttctttctctccttgcctccacccacctccaaaggtgctgagctcacatccacaccccttgcagccgtccatgccacagccccccaaggggccccattgccaaagcatgcctgcccaccctcgctgtgccttagtcagtgtgtacgtgtgtgtgtgtgtgtgtttggggggtggggggtgggtagctggggattgggccctctttctcccagtggaggaaggtgtgcagtgtacttcccctttaaattaaaaaacatatatatatatatatttggaggtcagtaatttccaatgggcgggaggcattaagcaccgaccctgggtccctaggccccgcctggcactcagccttgccagagattggctccagaatttttgccaggcttacagaacacccactgcctagaggccatcttaaaggaagcaggggctggatgcctttcatcccaactattctctgtggtatgaaaaagaaaaaaaaaaaaaaagaaggagtcggggccgggcgtggtggctcacgcctgtaatcccagcactttgggagaccaagtcaggcaatcatctgaagtcaggagttcaagaccagcctggccaacatggtgaaagcatgtctctattaaaaatacaaaaattagccgggcgtggtggcgggcgcctgtaatcccaggtatttggggggactgagacaggagaatcccttcaacccgggaggtggaggttgcagtaagtcaagatggcaccactgtgctccagcctgggggacagagcgagactccatctcaaaaaaaaaaaggaatcggacgaagaaccacaggatgttgaagacaactgtctgaagtatttgtgagggacagcgatgtggccctctgtgttaagaataacgtgtcctgctttggcagagagaagaaaatagccactgcccgctttcaaggcaagatcgaccttttctgttttgttttgtttttctttctttttcctggccatgaggacaaaaattactgagtggcccttaaagagggaagtttgttttcagctgttctcttttgcccgtaggtgggagggtggggattgctgcgtcctagctagaggaatggctttgcttgaatgtgtagtgcacacgcacgggtgtttctgtgtgctagttgcttcttgctgctgcttcctgcttgtctgggactcacatacataacgtgatatatatatatatatataaatgtataaatatatattttatttttttttaaatccttggagcttctggttcctatcagttcctgttgttaatcgtagaaccgttgtcccttcccccattcccgtatccatcatgttctttttcttttaaatatcaatataaaggtaaaagaaaaaaaaaaaaaaaaccaaaaaaaaaaaaaaaaaaaaaaaaaaaaaaattttgcgcccccccccccccccaaaaactttttaagaaaccccaccgcgtagggagcgaccgggaccccagaagaggtacagagcacacacgggtccaaaacggagtgtctccccacaagaggaacacccggggcacacaaacacaaagggacgagggaaaatcacacaccgaactaataaaaagaaccgcccgggaggcaaacaacagcaacggtctccgtcgacaaaaacaacccagagaagagagagcactacgagcagaccaacaataacacgggagaatcatctaaaacacggggagagacactcacacgcagacgcccccagaggaaaacccaaaagatcaatagcccccacccccttggagagaaacaaaagaacgaatcagacgcacacacaggacgacagacacagaaggacatgcacacagacagcaagaagagcagaggaccgcggacacacaagaagagacagaaagggagaagcgcagagcggaggacaacggggagcacccagacgcgccgcgacggagacacggaaggagacagccaggagacacgagcgcgcgagcaggcggacgcgacagcacaccagcgaccacggcgaacccaagagcagaccgaccaagcccggacgggccggcgtggcggacgaacggcgcagcaaccataaaacagagcataacaccagtctctcagaaaccaccaaaaccccactgagcataaagcgtaacgctatataacaaccataaaactacatacaccatccataaatgtaacacaactataaaacatcaatcatacactctcaacacaacaagacacacaccatatcaacaaaacagatacgcacccagtatacacttccccatcaaaagcaaataacagaaaatacaacatgacattaataaacgaaaacataacatataaaa

SEQ ID NO: 429120 - DNA, 4197 bp, Homo sapiens
gccgactcgaagcccttataaggcgcggagacgccggctctggctgggccgcccgcctccacagccgccgcccagggttctcccgccactgccgcccgcacccccgcccccgcggggttaagatcacacacgcgcccacgccggcccgcggggcgtgcactttcgctgggttccgtccgccgcagcccaaacagttaactgaacggggaggggagggggcggggcttacccggggtcaccgccagggccctgctgggttccacgccacgttcctgtctccgcagggcgttcgatccctagagggaggagcctgtccaaacggacgctaacggcctacctccccctcaggtgctcttacagcctgttccaagtgtggcttaatccgtctccaccaccagatctttctccgtggattcctctgctaagaccgctgccatgccagtgacggtaacccgcaccaccatcacaaccaccacgacgtcatcttcgggcctggggtcccccatgatcgtggggtcccctcgggccctgacacagcccctgggtctccttcgcctgctgcagctggtgtctacctgcgtggccttctcgctggtggctagcgtgggcgcctggacggggtccatgggcaactggtccatgttcacctggtgcttctgcttctccgtgaccctgatcatcctcatcgtggagctgtgcgggctccaggcccgcttccccctgtcttggcgcaacttccccatcaccttcgcctgctatgcggccctcttctgcctctcggcctccatcatctaccccaccacctatgtccagttcctgtcccacggccgttcgcgggaccacgccatcgccgccaccttcttctcctgcatcgcgtgtgtggcttacgccaccgaagtggcctggacccgggcccggcccggcgagatcactggctatatggccaccgtacccgggctgctgaaggtgctggagaccttcgttgcctgcatcatcttcgcgttcatcagcgaccccaacctgtaccagcaccagccggccctggagtggtgcgtggcggtgtacgccatctgcttcatcctagcggccatcgccatcctgctgaacctgggggagtgcaccaacgtgctacccatccccttccccagcttcctgtcggggctggccttgctgtctgtcctcctctatgccaccgcccttgttctctggcccctctaccagttcgatgagaagtatggcggccagcctcggcgctcgagagatgtaagctgcagccgcagccatgcctactacgtgtgtgcctgggaccgccgactggctgtggccatcctgacggccatcaacctactggcgtatgtggctgacctggtgcactctgcccacctggtttttgtcaaggtctaagactctcccaagaggctcccgttccctctccaacctctttgttcttcttgcccgagttttctttatggagtacttctttcctccgcctttcctctgttttcctcttcctgtctcccctccctcccacctttttctttccttcccaattccttgcactctaaccagttcttggatgcatcttcttccttccctttcctcttgctgtttccttcctgtgttgttttgttgcccacatcctgttttcacccctgagctgtttctctttttcttttctttctttttttttttttttttaagacggattctcactctgtggcccaggctggagcgcagtggtgcgatctcgactcactgcaacccccgcctcctgggttcaagcgattctcctgccccagcctcccaagtagctgggaggacaggtgtgagctgccgcacccagcctgtttctctttttccactcttcttttttctcatctcttttctgggttgcctgtcggctttcttatctgcctgttttgcaagcaccttctcctgtgtccttgggagccctgagacttctttctctccttgcctccacccacctccaaaggtgctgagctcacatccacaccccttgcagccgtccatgccacagccccccaaggggccccattgccaaagcatgcctgcccaccctcgctgtgccttagtcagtgtgtacgtgtgtgtgtgtgtgtgtttggggggtggggggtgggtagctggggattgggccctctttctcccagtggaggaaggtgtgcagtgtacttcccctttaaattaaaaaacatatatatatatatatttggaggtcagtaatttccaatgggcgggaggccatcttaaaggaagcaggggctggatgcctttcatcccaactattctctgtggtatgaaaaagaaaaaaaaaaaaaaagaaggagtcggggccgggcgtggtggctcacgcctgtaatcccagcactttgggagaccaagtcaggcaatcatctgaagtcaggagttcaagaccagcctggccaacatggtgaaagcatgtctctattaaaaatacaaaaattagccgggcgtggtggcgggcgcctgtaatcccaggtatttggggggactgagacaggagaatcccttcaacccgggaggtggaggttgcagtaagtcaagatggcaccactgtgctccagcctgggggacagagcgagactccatctcaaaaaaaaaaaggaatcggacgaagaaccacaggatgttgaagacaactgtctgaagtatttgtgagggacagcgatgtggccctctgtgttaagaataacgtgtcctgctttggcagagagaagaaaatagccactgcccgctttcaaggcaagatcgaccttttctgttttgttttgtttttctttctttttcctggccatgaggacaaaaattactgagtggcccttaaagagggaagtttgttttcagctgttctcttttgcccgtaggtgggagggtggggattgctgcgtcctagctagaggaatggctttgcttgaatgtgtagtgcacacgcacgggtgtttctgtgtgctagttgcttcttgctgctgcttcctgcttgtctgggactcacatacataacgtgatatatatatatatatataaatgtataaatatatattttatttttttttaaatccttggagcttctggttcctatcagttcctgttgttaatcgtagaaccgttgtcccttcccccattcccgtatccatcatgttctttttcttttaaatatcaatataaaggtaaaagaaaaaaaaaaaaaaaaccaaaaaaaaaaaaaaaaaaaaaaaaaaaaaaattttgcgcccccccccccccccaaaaactttttaagaaaccccaccgcgtagggagcgaccgggaccccagaagaggtacagagcacacacgggtccaaaacggagtgtctccccacaagaggaacacccggggcacacaaacacaaagggacgagggaaaatcacacaccgaactaataaaaagaaccgcccgggaggcaaacaacagcaacggtctccgtcgacaaaaacaacccagagaagagagagcactacgagcagaccaacaataacacgggagaatcatctaaaacacggggagagacactcacacgcagacgcccccagaggaaaacccaaaagatcaatagcccccacccccttggagagaaacaaaagaacgaatcagacgcacacacaggacgacagacacagaaggacatgcacacagacagcaagaagagcagaggaccgcggacacacaagaagagacagaaagggagaagcgcagagcggaggacaacggggagcacccagacgcgccgcgacggagacacggaaggagacagccaggagacacgagcgcgcgagcaggcggacgcgacagcacaccagcgaccacggcgaacccaagagcagaccgaccaagcccggacgggccggcgtggcggacgaacggcgcagcaaccataaaacagagcataacaccagtctctcagaaaccaccaaaaccccactgagcataaagcgtaacgctatataacaaccataaaactacatacaccatccataaatgtaacacaactataaaacatcaatcatacactctcaacacaacaagacacacaccatatcaacaaaacagatacgcacccagtatacacttccccatcaaaagcaaataacagaaaatacaacatgacattaataaacgaaaacataacatataaaa

SEQ ID NO: 429121 - DNA, 4271 bp, Homo sapiens
gccgactcgaagcccttataaggcgcggagacgccggctctggctgggccgcccgcctccacagccgccgcccagggttctcccgccactgccgcccgcacccccgcccccgcggggttaagatcacacacgcgcccacgccggcccgcggggcgtgcactttcgctgggttccgtccgccgcagcccaaacagttaactgaacggggaggggagggggcggggcttacccggggtcaccgccagggccctgctgggttccacgccacgttcctgtctccgcagggcgttcgatccctagagggaggagcctgtccaaacggacgctaacggcctacctccccctcaggtgctcttacagcctgttccaagtgtggcttaatccgtctccaccaccagatctttctccgtggattcctctgctaagaccgctgccatgccagtgacggtaacccgcaccaccatcacaaccaccacgacgtcatcttcgggcctggggtcccccatgatcgtggggtcccctcgggccctgacacagcccctgggtctccttcgcctgctgcagctggtgtctacctgcgtggccttctcgctggtggctagcgtgggcgcctggacggggtccatgggcaactggtccatgttcacctggtgcttctgcttctccgtgaccctgatcatcctcatcgtggagctgtgcgggctccaggcccgcttccccctgtcttggcgcaacttccccatcaccttcgcctgctatgcggccctcttctgcctctcggcctccatcatctaccccaccacctatgtccagttcctgtcccacggccgttcgcgggaccacgccatcgccgccaccttcttctcctgcatcgcgtgtgtggcttacgccaccgaagtggcctggacccgggcccggcccggcgagatcactggctatatggccaccgtacccgggctgctgaaggtgctggagaccttcgttgcctgcatcatcttcgcgttcatcagcgaccccaacctgtaccagcaccagccggccctggagtggtgcgtggcggtgtacgccatctgcttcatcctagcggccatcgccatcctgctgaacctgggggagtgcaccaacgtgctacccatccccttccccagcttcctgtcggggctggccttgctgtctgtcctcctctatgccaccgcccttgttctctggcccctctaccagttcgatgagaagtatggcggccagcctcggcgctcgagagatgtaagctgcagccgcagccatgcctactacgtgtgtgcctgggaccgccgactggctgtggccatcctgacggccatcaacctactggcgtatgtggctgacctggtgcactctgcccacctggtttttgtcaaggtctaagactctcccaagaggctcccgttccctctccaacctctttgttcttcttgcccgagttttctttatggagtacttctttcctccgcctttcctctgttttcctcttcctgtctcccctccctcccacctttttctttccttcccaattccttgcactctaaccagttcttggatgcatcttcttccttccctttcctcttgctgtttccttcctgtgttgttttgttgcccacatcctgttttcacccctgagctgtttctctttttcttttctttctttttttttttttttttaagacggattctcactctgtggcccaggctggagcgcagtggtgcgatctcgactcactgcaacccccgcctcctgggttcaagcgattctcctgccccagcctcgcacccagcctgtttctctttttccactcttcttttttctcatctcttttctgggttgcctgtcggctttcttatctgcctgttttgcaagcaccttctcctgtgtccttgggagccctgagacttctttctctccttgcctccacccacctccaaaggtgctgagctcacatccacaccccttgcagccgtccatgccacagccccccaaggggccccattgccaaagcatgcctgcccaccctcgctgtgccttagtcagtgtgtacgtgtgtgtgtgtgtgtgtttggggggtggggggtgggtagctggggattgggccctctttctcccagtggaggaaggtgtgcagtgtacttcccctttaaattaaaaaacatatatatatatatatttggaggtcagtaatttccaatgggcgggaggcattaagcaccgaccctgggtccctaggccccgcctggcactcagccttgccagagattggctccagaatttttgccaggcttacagaacacccactgcctagaggccatcttaaaggaagcaggggctggatgcctttcatcccaactattctctgtggtatgaaaaagaaaaaaaaaaaaaaagaaggagtcggggccgggcgtggtggctcacgcctgtaatcccagcactttgggagaccaagtcaggcaatcatctgaagtcaggagttcaagaccagcctggccaacatggtgaaagcatgtctctattaaaaatacaaaaattagccgggcgtggtggcgggcgcctgtaatcccaggtatttggggggactgagacaggagaatcccttcaacccgggaggtggaggttgcagtaagtcaagatggcaccactgtgctccagcctgggggacagagcgagactccatctcaaaaaaaaaaaggaatcggacgaagaaccacaggatgttgaagacaactgtctgaagtatttgtgagggacagcgatgtggccctctgtgttaagaataacgtgtcctgctttggcagagagaagaaaatagccactgcccgctttcaaggcaagatcgaccttttctgttttgttttgtttttctttctttttcctggccatgaggacaaaaattactgagtggcccttaaagagggaagtttgttttcagctgttctcttttgcccgtaggtgggagggtggggattgctgcgtcctagctagaggaatggctttgcttgaatgtgtagtgcacacgcacgggtgtttctgtgtgctagttgcttcttgctgctgcttcctgcttgtctgggactcacatacataacgtgatatatatatatatatataaatgtataaatatatattttatttttttttaaatccttggagcttctggttcctatcagttcctgttgttaatcgtagaaccgttgtcccttcccccattcccgtatccatcatgttctttttcttttaaatatcaatataaaggtaaaagaaaaaaaaaaaaaaaaccaaaaaaaaaaaaaaaaaaaaaaaaaaaaaaattttgcgcccccccccccccccaaaaactttttaagaaaccccaccgcgtagggagcgaccgggaccccagaagaggtacagagcacacacgggtccaaaacggagtgtctccccacaagaggaacacccggggcacacaaacacaaagggacgagggaaaatcacacaccgaactaataaaaagaaccgcccgggaggcaaacaacagcaacggtctccgtcgacaaaaacaacccagagaagagagagcactacgagcagaccaacaataacacgggagaatcatctaaaacacggggagagacactcacacgcagacgcccccagaggaaaacccaaaagatcaatagcccccacccccttggagagaaacaaaagaacgaatcagacgcacacacaggacgacagacacagaaggacatgcacacagacagcaagaagagcagaggaccgcggacacacaagaagagacagaaagggagaagcgcagagcggaggacaacggggagcacccagacgcgccgcgacggagacacggaaggagacagccaggagacacgagcgcgcgagcaggcggacgcgacagcacaccagcgaccacggcgaacccaagagcagaccgaccaagcccggacgggccggcgtggcggacgaacggcgcagcaaccataaaacagagcataacaccagtctctcagaaaccaccaaaaccccactgagcataaagcgtaacgctatataacaaccataaaactacatacaccatccataaatgtaacacaactataaaacatcaatcatacactctcaacacaacaagacacacaccatatcaacaaaacagatacgcacccagtatacacttccccatcaaaagcaaataacagaaaatacaacatgacattaataaacgaaaacataacatataaaa

SEQ ID NO: 429122 - DNA, 4327 bp, Homo sapiens
  misc_feature (2131)..(2131): n is a, c, g, or t
gccgactcgaagcccttataaggcgcggagacgccggctctggctgggccgcccgcctccacagccgccgcccagggttctcccgccactgccgcccgcacccccgcccccgcggggttaagatcacacacgcgcccacgccggcccgcggggcgtgcactttcgctgggttccgtccgccgcagcccaaacagttaactgaacggggaggggagggggcggggcttacccggggtcaccgccagggccctgctgggttccacgccacgttcctgtctccgcagggcgttcgatccctagagggaggagcctgtccaaacggacgctaacggcctacctccccctcaggtgctcttacagcctgttccaagtgtggcttaatccgtctccaccaccagatctttctccgtggattcctctgctaagaccgctgccatgccagtgacggtaacccgcaccaccatcacaaccaccacgacgtcatcttcgggcctggggtcccccatgatcgtggggtcccctcgggccctgacacagcccctgggtctccttcgcctgctgcagctggtgtctacctgcgtggccttctcgctggtggctagcgtgggcgcctggacggggtccatgggcaactggtccatgttcacctggtgcttctgcttctccgtgaccctgatcatcctcatcgtggagctgtgcgggctccaggcccgcttccccctgtcttggcgcaacttccccatcaccttcgcctgctatgcggccctcttctgcctctcggcctccatcatctaccccaccacctatgtccagttcctgtcccacggccgttcgcgggaccacgccatcgccgccaccttcttctcctgcatcgcgtgtgtggcttacgccaccgaagtggcctggacccgggcccggcccggcgagatcactggctatatggccaccgtacccgggctgctgaaggtgctggagaccttcgttgcctgcatcatcttcgcgttcatcagcgaccccaacctgtaccagcaccagccggccctggagtggtgcgtggcggtgtacgccatctgcttcatcctagcggccatcgccatcctgctgaacctgggggagtgcaccaacgtgctacccatccccttccccagcttcctgtcggggctggccttgctgtctgtcctcctctatgccaccgcccttgttctctggcccctctaccagttcgatgagaagtatggcggccagcctcggcgctcgagagatgtaagctgcagccgcagccatgcctactacgtgtgtgcctgggaccgccgactggctgtggccatcctgacggccatcaacctactggcgtatgtggctgacctggtgcactctgcccacctggtttttgtcaaggtctaagactctcccaagaggctcccgttccctctccaacctctttgttcttcttgcccgagttttctttatggagtacttctttcctccgcctttcctctgttttcctcttcctgtctcccctccctcccacctttttctttccttcccaattccttgcactctaaccagttcttggatgcatcttcttccttccctttcctcttgctgtttccttcctgtgttgttttgttgcccacatcctgttttcacccctgagctgtttctctttttcttttctttctttttttttttttttttaagacggattctcactctgtggcccaggctggagcgcagtggtgcgatctcgactcactgcaacccccgcctcctgggttcaagcgattctcctgccccagcctcccaagtagctgggaggacaggtgtgagctgccgcacccagcctgtttctctttttccactcttcttttttctcatctcttttctgggttgcctgtcggctttcttatctgcctgttttgcaagcaccttctcctgtgtccttgggagccctgagacttctttctctccttgcctccacccacctccaaaggtgctgagctcacatccacaccccttgcagccgtccatgccacagccccccaaggggccccattgccaaagcatgcctgcccaccctcgctgtgccttagtcagtgtgtacgtgtgtgtgtgtgtgtgtgtgtgtgtntgtgtgtgtgtgtgtttggggggtggggggtgggtagctggggattgggccctctttctcccagtggaggaaggtgtgcagtgtacttcccctttaaattaaaaaacatatatatatatatatttggaggtcagtaatttccaatgggcgggaggcattaagcaccgaccctgggtccctaggccccgcctggcactcagccttgccagagattggctccagaatttttgccaggcttacagaacacccactgcctagaggccatcttaaaggaagcaggggctggatgcctttcatcccaactattctctgtggtatgaaaaagaaaaaaaaaaaaaaagaaggagtcggggccgggcgtggtggctcacgcctgtaatcccagcactttgggagaccaagtcaggcaatcatctgaagtcaggagttcaagaccagcctggccaacatggtgaaagcatgtctctattaaaaatacaaaaattagccgggcgtggtggcgggcgcctgtaatcccaggtatttggggggactgagacaggagaatcccttcaacccgggaggtggaggttgcagtaagtcaagatggcaccactgtgctccagcctgggggacagagcgagactccatctcaaaaaaaaaaaggaatcggacgaagaaccacaggatgttgaagacaactgtctgaagtatttgtgagggacagcgatgtggccctctgtgttaagaataacgtgtcctgctttggcagagagaagaaaatagccactgcccgctttcaaggcaagatcgaccttttctgttttgttttgtttttctttctttttcctggccatgaggacaaaaattactgagtggcccttaaagagggaagtttgttttcagctgttctcttttgcccgtaggtgggagggtggggattgctgcgtcctagctagaggaatggctttgcttgaatgtgtagtgcacacgcacgggtgtttctgtgtgctagttgcttcttgctgctgcttcctgcttgtctgggactcacatacataacgtgatatatatatatatatataaatgtataaatatatattttatttttttttaaatccttggagcttctggttcctatcagttcctgttgttaatcgtagaaccgttgtcccttcccccattcccgtatccatcatgttctttttcttttaaatatcaatataaaggtaaaagaaaaaaaaaaaaaaaaccaaaaaaaaaaaaaaaaaaaaaaaaaaaaaaattttgcgcccccccccccccccaaaaactttttaagaaaccccaccgcgtagggagcgaccgggaccccagaagaggtacagagcacacacgggtccaaaacggagtgtctccccacaagaggaacacccggggcacacaaacacaaagggacgagggaaaatcacacaccgaactaataaaaagaaccgcccgggaggcaaacaacagcaacggtctccgtcgacaaaaacaacccagagaagagagagcactacgagcagaccaacaataacacgggagaatcatctaaaacacggggagagacactcacacgcagacgcccccagaggaaaacccaaaagatcaatagcccccacccccttggagagaaacaaaagaacgaatcagacgcacacacaggacgacagacacagaaggacatgcacacagacagcaagaagagcagaggaccgcggacacacaagaagagacagaaagggagaagcgcagagcggaggacaacggggagcacccagacgcgccgcgacggagacacggaaggagacagccaggagacacgagcgcgcgagcaggcggacgcgacagcacaccagcgaccacggcgaacccaagagcagaccgaccaagcccggacgggccggcgtggcggacgaacggcgcagcaaccataaaacagagcataacaccagtctctcagaaaccaccaaaaccccactgagcataaagcgtaacgctatataacaaccataaaactacatacaccatccataaatgtaacacaactataaaacatcaatcatacactctcaacacaacaagacacacaccatatcaacaaaacagatacgcacccagtatacacttccccatcaaaagcaaataacagaaaatacaacatgacattaataaacgaaaacataacatataaaa

SEQ ID NO: 429123 - DNA, 4249 bp, Homo sapiens
gccgactcgaagcccttataaggcgcggagacgccggctctggctgggccgcccgcctccacagccgccgcccagggttctcccgccactgccgcccgcacccccgcccccgcggggttaagatcacacacgcgcccacgccggcccgcggggcgtgcactttcgctgggttccgtccgccgcagcccaaacagttaactgaacggggaggggagggggcggggcttacccggggtcaccgccagggccctgctgggttccacgccacgttcctgtctccgcagggcgttcgatccctagagggaggagcctgtccaaacggacgctaacggcctacctccccctcaggtgctcttacagcctgttccaagtgtggcttaatccgtctccaccaccagatctttctccgtggattcctctgctaagaccgctgccatgccagtgacggtaacccgcaccaccatcacaaccaccacgacgtcatcttcgggcctggggtcccccatgatcgtggggtcccctcgggccctgacacagcccctgggtctccttcgcctgctgcagctggtgtctacctgcgtggccttctcgctggtggctagcgtgggcgcctggacggggtccatgggcaactggtccatgttcacctggtgcttctgcttctccgtgaccctgatcatcctcatcgtggagctgtgcgggctccaggcccgcttccccctgtcttggcgcaacttccccatcaccttcgcctgctatgcggccctcttctgcctctcggcctccatcatctaccccaccacctatgtccagttcctgtcccacggccgttcgcgggaccacgccatcgccgccaccttcttctcctgcatcgcgtgtgtggcttacgccaccgaagtggcctggacccgggcccggcccggcgagatcactggctatatggccaccgtacccgggctgctgaaggtgctggagaccttcgttgcctgcatcatcttcgcgttcatcagcgaccccaacctgtaccagcaccagccggccctggagtggtgcgtggcggtgtacgccatctgcttcatcctagcggccatcgccatcctgctgaacctgggggagtgcaccaacgtgctacccatccccttccccagcttcctgtcggggctggccttgctgtctgtcctcctctatgccaccgcccttgttctctggcccctctaccagttcgatgagaagtatggcggccagcctcggcgctcgagagatgtaagctgcagccgcagccatgcctactacgtgtgtgcctgggaccgccgactggctgtggccatcctgacggccatcaacctactggcgtatgtggctgacctggtgcactctgcccacctggtttttgtcaaggtctaagactctcccaagaggctcccgttccctctccaacctctttgttcttcttgcccgagttttctttatggagtacttctttcctccgcctttcctctgttttcctcttcctgtctcccctccctcccacctttttctttccttcccaattccttgcactctaaccagttcttggatgcatcttcttccttccctttcctcttgctgtttccttcctgtgttgttttgttgcccacatcctgttttcacccctgagctgtttctctttttcttttctttctttttttttttttttttaagacggattctcactctgtggcccaggctggagcgcagtggtgcgatctcgactcactgcaacccccgcctcctgggttcaagcgattctcctgccccagcctcccaagtagctgggaggacaggtgtgagctgccgcacccagcctgtttctctttttccactcttcttttttctcatctcttttctgggttgcctgtcggctttcttatctgcctgttttgcaagcaccttctcctgtgtccttgggagccctgagacttctttctctccttgcctccacccacctccaaaggtgctgagctcacatccacaccccttgcagccgtccatgccacagccccccaaggggccccattgccaaagcatgcctgcccaccctcgctgtgccttagtcagtgtgtacgtgtgtgtgtgtgtgtgtttggggggtggggggtgggtagctggggattgggccctctttctcccagtggaggaaggtgtgcagtgtacttcccctttaaattaaaaaacatatatatatatatatttggaggtcagtaatttccaatgggcgggaggcattaagcaccgaccctgggtccctaggccccgcctggcactcagccttgccagagattggctccagaatttttgccaggcttacagaacacccactgcctagaggccatcttaaaggaagcaggggctggatgcctttcatcccaactattctctgtggtatgaaaaagaaaaaaaaaaaaaaagaaggagtcggggccgggcgtggtggctcacgcctgtaatcccagcactttgggagaccaagtcaggcaatcatctgaagtcaggagttcaagaccagcctggccaacatggtgaaagcatgtctctattaaaaatacaaaaattagccgggcgtggtggcgggcgcctgtaatcccaggtatttggggggactgagacaggagaatcccttcaacccgggaggtggaggttgcagtaagtcaagatggcaccactgtgctccagcctgggggacagagcgagactccatctcaaaaaaaaaaaggaatcggacgaagaaccacaggatgttgaagacaactgtctgaagtatttgtgagggacagcgatgtggccctctgtgttaagaataacgtgtcctgctttggcagagagaagaaaatagccactgcccgctttcaaggcaagatcgaccttttctgttttgttttgtttttctttctttttcctggccatgaggacagcccgtaggtgggagggtggggattgctgcgtcctagctagaggaatggctttgcttgaatgtgtagtgcacacgcacgggtgtttctgtgtgctagttgcttcttgctgctgcttcctgcttgtctgggactcacatacataacgtgatatatatatatatatataaatgtataaatatatattttatttttttttaaatccttggagcttctggttcctatcagttcctgttgttaatcgtagaaccgttgtcccttcccccattcccgtatccatcatgttctttttcttttaaatatcaatataaaggtaaaagaaaaaaaaaaaaaaaaccaaaaaaaaaaaaaaaaaaaaaaaaaaaaaaattttgcgcccccccccccccccaaaaactttttaagaaaccccaccgcgtagggagcgaccgggaccccagaagaggtacagagcacacacgggtccaaaacggagtgtctccccacaagaggaacacccggggcacacaaacacaaagggacgagggaaaatcacacaccgaactaataaaaagaaccgcccgggaggcaaacaacagcaacggtctccgtcgacaaaaacaacccagagaagagagagcactacgagcagaccaacaataacacgggagaatcatctaaaacacggggagagacactcacacgcagacgcccccagaggaaaacccaaaagatcaatagcccccacccccttggagagaaacaaaagaacgaatcagacgcacacacaggacgacagacacagaaggacatgcacacagacagcaagaagagcagaggaccgcggacacacaagaagagacagaaagggagaagcgcagagcggaggacaacggggagcacccagacgcgccgcgacggagacacggaaggagacagccaggagacacgagcgcgcgagcaggcggacgcgacagcacaccagcgaccacggcgaacccaagagcagaccgaccaagcccggacgggccggcgtggcggacgaacggcgcagcaaccataaaacagagcataacaccagtctctcagaaaccaccaaaaccccactgagcataaagcgtaacgctatataacaaccataaaactacatacaccatccataaatgtaacacaactataaaacatcaatcatacactctcaacacaacaagacacacaccatatcaacaaaacagatacgcacccagtatacacttccccatcaaaagcaaataacagaaaatacaacatgacattaataaacgaaaacataacatataaaa

SEQ ID NO: 429124 - DNA, 3096 bp, Homo sapiens
cgccaccaggccccgcccagcggccgcagccagccaggccgcgcccgggacgactgcagagcgcgggcgttcgatccctagagggaggagcctgtccaaacggacgctaacggcctacctccccctcaggtgctcttacagcctgttccaagtgtggcttaatccgtctccaccaccagatctttctccgtggattcctctgctaagaccgctgccatgccagtgacggtaacccgcaccaccatcacaaccaccacgacgtcatcttcgggcctggggtcccccatgatcgtggggtcccctcgggccctgacacagcccctgggtctccttcgcctgctgcagctggtgtctacctgcgtggccttctcgctggtggctagcgtgggcgcctggacggggtccatgggcaactggtccatgttcacctggtgcttctgcttctccgtgaccctgatcatcctcatcgtggagctgtgcgggctccaggcccgcttccccctgtcttggcgcaacttccccatcaccttcgcctgctatgcggccctcttctgcctctcggcctccatcatctaccccaccacctatgtccagttcctgtcccacggccgttcgcgggaccacgccatcgccgccaccttcttctcctgcatcgcgtgtgtggcttacgccaccgaagtggcctggacccgggcccggcccggcgagatcactggctatatggccaccgtacccgggctgctgaaggtgctggagaccttcgttgcctgcatcatcttcgcgttcatcagcgaccccaacctgtaccagcaccagccggccctggagtggtgcgtggcggtgtacgccatctgcttcatcctagcggccatcgccatcctgctgaacctgggggagtgcaccaacgtgctacccatccccttccccagcttcctgtcggggctggccttgctgtctgtcctcctctatgccaccgcccttgttctctggcccctctaccagttcgatgagaagtatggcggccagcctcggcgctcgagagatgtaagctgcagccgcagccatgcctactacgtgtgtgcctgggaccgccgactggctgtggccatcctgacggccatcaacctactggcgtatgtggctgacctggtgcactctgcccacctggtttttgtcaaggtctaagactctcccaagaggctcccgttccctctccaacctctttgttcttcttgcccgagttttctttatggagtacttctttcctccgcctttcctctgttttcctcttcctgtctcccctccctcccacctttttctttccttcccaattccttgcactctaaccagttcttggatgcatcttcttccttccctttcctcttgctgtttccttcctgtgttgttttgttgcccacatcctgttttcacccctgagctgtttctctttttcttttctttctttttttttttttttttaagacggattctcacttgtgctccagcctgggggacagagcgagactccatctcaaaaaaaaaaaggaatcggacgaagaaccacaggatgttgaagacaactgtctgaagtatttgtgagggacagcgatgtggccctctgtgttaagaataacgtgtcctgctttggcagagagaagaaaatagccactgcccgctttcaaggcaagatcgaccttttctgttttgttttgtttttctttctttttcctggccatgaggacaaaaattactgagtggcccttaaagagggaagtttgttttcagctgttctcttttgcccgtaggtgggagggtggggattgctgcgtcctagctagaggaatggctttgcttgaatgtgtagtgcacacgcacgggtgtttctgtgtgctagttgcttcttgctgctgcttcctgcttgtctgggactcacatacataacgtgatatatatatatatatataaatgtataaatatatattttatttttttttaaatccttggagcttctggttcctatcagttcctgttgttaatcgtagaaccgttgtcccttcccccattcccgtatccatcatgttctttttcttttaaatatcaatataaaggtaaaagaaaaaaaaaaaaaaaaccaaaaaaaaaaaaaaaaaaaaaaaaaaaaaaattttgcgcccccccccccccccaaaaactttttaagaaaccccaccgcgtagggagcgaccgggaccccagaagaggtacagagcacacacgggtccaaaacggagtgtctccccacaagaggaacacccggggcacacaaacacaaagggacgagggaaaatcacacaccgaactaataaaaagaaccgcccgggaggcaaacaacagcaacggtctccgtcgacaaaaacaacccagagaagagagagcactacgagcagaccaacaataacacgggagaatcatctaaaacacggggagagacactcacacgcagacgcccccagaggaaaacccaaaagatcaatagcccccacccccttggagagaaacaaaagaacgaatcagacgcacacacaggacgacagacacagaaggacatgcacacagacagcaagaagagcagaggaccgcggacacacaagaagagacagaaagggagaagcgcagagcggaggacaacggggagcacccagacgcgccgcgacggagacacggaaggagacagccaggagacacgagcgcgcgagcaggcggacgcgacagcacaccagcgaccacggcgaacccaagagcagaccgaccaagcccggacgggccggcgtggcggacgaacggcgcagcaaccataaaacagagcataacaccagtctctcagaaaccaccaaaaccccactgagcataaagcgtaacgctatataacaaccataaaactacatacaccatccataaatgtaacacaactataaaacatcaatcatacactctcaacacaacaagacacacaccatatcaacaaaacagatacgcacccagtatacacttccccatcaaaagcaaataacagaaaatacaacatgacattaataaacgaaaacataacatataaaa

SEQ ID NO: 429125 - DNA, 2875 bp, Homo sapiens
agctcggtaccccgatgatgccgagaaccccttgatagccggttgctgtagatctcccacatcacatcccggtaccaatccttctgaaaagggccccggagctgccactcctccccggtgacgtccaccgtaacatcctccagtgtcagccattcctgggcattgatcattttcttctgttgtgggaaatggcccgcacctgggatactctgtctttttcacccctgagctgtttctctttttcttttctttctttttttttttttttttaagacggattctcactctgtggcccaggctggagcgcagtggtgcgatctcgactcactgcaacccccgcctcctgggttcaagcgattctcctgccccagcctcccaagtagctgggaggacaggtgtgagctgccgcacccagcctgtttctctttttccactcttcttttttctcatctcttttctgggttgcctgtcggctttcttatctgcctgttttgcaagcaccttctcctgtgtccttgggagccctgagacttctttctctccttgcctccacccacctccaaaggtgctgagctcacatccacaccccttgcagccgtccatgccacagccccccaaggggccccattgccaaagcatgcctgcccaccctcgctgtgccttagtcagtgtgtacgtgtgtgtgtgtgtgtgtttggggggtggggggtgggtagctggggattgggccctctttctcccagtggaggaaggtgtgcagtgtacttcccctttaaattaaaaaacatatatatatatatatttggaggtcagtaatttccaatgggcgggaggcattaagcaccgaccctgggtccctaggccccgcctggcactcagccttgccagagattggctccagaatttttgccaggcttacagaacacccactgcctagaggccatcttaaaggaagcaggggctggatgcctttcatcccaactattctctgtggtatgaaaaagaaaaaaaaaaaaaaagaaggagtcggggccgggcgtggtggctcacgcctgtaatcccagcactttgggagaccaagtcaggcaatcatctgaagtcaggagttcaagaccagcctggccaacatggtgaaagcatgtctctattaaaaatacaaaaattagccgggcgtggtggcgggcgcctgtaatcccaggtatttggggggactgagacaggagaatcccttcaacccgggaggtggaggttgcagtaagtcaagatggcaccactgtgctccagcctgggggacagagcgagactccatctcaaaaaaaaaaaggaatcggacgaagaaccacaggatgttgaagacaactgtctgaagtatttgtgagggacagcgatgtggccctctgtgttaagaataacgtgtcctgctttggcagagagaagaaaatagccactgcccgctttcaaggcaagatcgaccttttctgttttgttttgtttttctttctttttcctggccatgaggacaaaaattactgagtggcccttaaagagggaagtttgttttcagctgttctcttttgcccgtaggtgggagggtggggattgctgcgtcctagctagaggaatggctttgcttgaatgtgtagtgcacacgcacgggtgtttctgtgtgctagttgcttcttgctgctgcttcctgcttgtctgggactcacatacataacgtgatatatatatatatatataaatgtataaatatatattttatttttttttaaatccttggagcttctggttcctatcagttcctgttgttaatcgtagaaccgttgtcccttcccccattcccgtatccatcatgttctttttcttttaaatatcaatataaaggtaaaagaaaaaaaaaaaaaaaaccaaaaaaaaaaaaaaaaaaaaaaaaaaaaaaattttgcgcccccccccccccccaaaaactttttaagaaaccccaccgcgtagggagcgaccgggaccccagaagaggtacagagcacacacgggtccaaaacggagtgtctccccacaagaggaacacccggggcacacaaacacaaagggacgagggaaaatcacacaccgaactaataaaaagaaccgcccgggaggcaaacaacagcaacggtctccgtcgacaaaaacaacccagagaagagagagcactacgagcagaccaacaataacacgggagaatcatctaaaacacggggagagacactcacacgcagacgcccccagaggaaaacccaaaagatcaatagcccccacccccttggagagaaacaaaagaacgaatcagacgcacacacaggacgacagacacagaaggacatgcacacagacagcaagaagagcagaggaccgcggacacacaagaagagacagaaagggagaagcgcagagcggaggacaacggggagcacccagacgcgccgcgacggagacacggaaggagacagccaggagacacgagcgcgcgagcaggcggacgcgacagcacaccagcgaccacggcgaacccaagagcagaccgaccaagcccggacgggccggcgtggcggacgaacggcgcagcaaccataaaacagagcataacaccagtctctcagaaaccaccaaaaccccactgagcataaagcgtaacgctatataacaaccataaaactacatacaccatccataaatgtaacacaactataaaacatcaatcatacactctcaacacaacaagacacacaccatatcaacaaaacagatacgcacccagtatacacttccccatcaaaagcaaataacagaaaatacaacatgacattaataaacgaaaacataacatataaaa

SEQ ID NO: 429126 - DNA, 2612 bp, Homo sapiens
gccgactcgaagcccttataaggcgcggagacgccggctctggctgggccgcccgcctccacagccgccgcccagggttctcccgccactgccgcccgcacccccgcccccgcggggttaagatcacacacgcgcccacgccggcccgcggggcgtgcactttcgctgggttccgtccgccgcagcccaaacagttaactgaacggggaggggagggggcggggcttacccggggtcaccgccagggccctgctgggttccacgccacgttcctgtctccgcagggcgttcgatccctagagggaggagcctgtccaaacggacgctaacggcctacctccccctcaggtgctcttacagcctgttccaagtgtggcttaatccgtctccaccaccagatctttctccgtggattcctctgctaagaccgctgccatgccagtgacggtaacccgcaccaccatcacaaccaccacgacgtcatcttcgggcctggggtcccccatgatcgtggggtcccctcgggccctgacacagcccctgggtctccttcgcctgctgcagctggtgtctacctgcgtggccttctcgctggtggctagcgtgggcgcctggacggggtccatgggcaactggtccatgttcacctggtgcttctgcttctccgtgaccctgatcatcctcatcgtggagctgtgcgggctccaggcccgcttccccctgtcttggcgcaacttccccatcaccttcgcctgctatgcggccctcttctgcctctcggcctccatcatctaccccaccacctatgtccagttcctgtcccacggccgttcgcgggaccacgccatcgccgccaccttcttctcctgcatcgcgtgtgtggcttacgccaccgaagtggcctggacccgggcccggcccggcgagatcactggctatatggccaccgtacccgggctgctgaaggtgctggagaccttcgttgcctgcatcatcttcgcgttcatcagcgaccccaacctgtaccagcaccagccggccctggagtggtgcgtggcggtgtacgccatctgcttcatcctagcggccatcgccatcctgctgaacctgggggagtgcaccaacgtgctacccatccccttccccagcttcctgtcggggctggccttgctgtctgtcctcctctatgccaccgcccttgttctctggcccctctaccagttcgatgagaagtatggcggccagcctcggcgctcgagagatgtaagctgcagccgcagccatgcctactacgtgtgtgcctgggaccgccgactggctgtggccatcctgacggccatcaacctactggcgtatgtggctgacctggtgcactctgcccacctggtttttgtcaaggtctaagactctcccaagaggctcccgttccctctccaacctctttgttcttcttgcccgagttttctttatggagtacttctttcctccgcctttcctctgttttcctcttcctgtctcccctccctcccacctttttctttccttcccaattccttgcactctaaccagttcttggatgcatcttcttccttccctttcctcttgctgtttccttcctgtgttgttttgttgcccacatcctgttttcacccctgagctgtttctctttttcttttctttctttttttttttttttttaagacggattctcactctgtggcccaggctggagcgcagtggtgcgatctcgactcactgcaacccccgcctcctgggttcaagcgattctcctgccccagcctcccaagtagctgggaggacaggtgtgagctgccgcacccagcctgtttctctttttccactcttcttttttctcatctcttttctgggttgcctgtcggctttcttatctgcctgttttgcaagcaccttctcctgtgtccttgggagccctgagacttctttctctccttgcctccacccacctccaaaggtgctgagctcacatccacaccccttgcagccgtccatgccacagccccccaaggggccccattgccaaagcatgcctgcccaccctcgctgtgccttagtcagtgtgtacgtgtgtgtgtgtgtgtgtttggggggtggggggtgggtagctggggattgggccctctttctcccagtggaggaaggtgtgcagtgtacttcccctttaaattaaaaaacatatatataaaaaaaaaaaaaaaccaaaaaaaaaaaaaaaaaaaaaaaaaaaaaaaaaaaaaaaaaaaaaaaaaaaaaaaaactagaaaaaaaaaaaccgcaactcaagacgacagcgagagaacccagagaaagccccagcagacaagacggcggagcagccgagcgacgagaaccacacacccgaagaccccaccagcaaaacaagcacaaacaaaacgaacaggaacgagcgcacaacaaaaatcgacacgaaaaagaatcggagaaggaaaagcgacaaacacgcaagaggagcagcaaagctacagcacgagaagcacgcacaacacactgtcgaagcaaccaagagcccaacaacagacgaaccaacagaaaacacacacagtgagcgagcc

SEQ ID NO: 429127 - DNA, 2630 bp, Homo sapiens
gaattcgagctccggttccccaatcggagtgcaatccgcctgacaagtgagcctggccaacatggtgaaggcatgtctctatgttaatatacccaaattagcccgggcgtggtggcgggcgcctgtaattccaagtagctgggaggacaggtgtgagctgccgcacccagcctgtttctctttttccactcttcttttttctcatctcttttctgggttgcctgtcggctttcttatctgcctgttttgcaagcaccttctcctgtgtccttgggagccctgagacttctttctctccttgcctccacccacctccaaaggtgctgagctcacatccacaccccttgcagccgtccatgccacagccccccaaggggccccattgccaaagcatgcctgcccaccctcgctgtgccttagtcagtgtgtacgtgtgtgtgtgtgtgtgtttggggggtggggggtgggtagctggggattgggccctctttctcccagtggaggaaggtgtgcagtgtacttcccctttaaattaaaaaacatatatatatatatatttggaggtcagtaatttccaatgggcgggaggcattaagcaccgaccctgggtccctaggccccgcctggcactcagccttgccagagattggctccagaatttttgccaggcttacagaacacccactgcctagaggccatcttaaaggaagcaggggctggatgcctttcatcccaactattctctgtggtatgaaaaagaaaaaaaaaaaaaaagaaggagtcggggccgggcgtggtggctcacgcctgtaatcccagcactttgggagaccaagtcaggcaatcatctgaagtcaggagttcaagaccagcctggccaacatggtgaaagcatgtctctattaaaaatacaaaaattagccgggcgtggtggcgggcgcctgtaatcccaggtatttggggggactgagacaggagaatcccttcaacccgggaggtggaggttgcagtaagtcaagatggcaccactgtgctccagcctgggggacagagcgagactccatctcaaaaaaaaaaaggaatcggacgaagaaccacaggatgttgaagacaactgtctgaagtatttgtgagggacagcgatgtggccctctgtgttaagaataacgtgtcctgctttggcagagagaagaaaatagccactgcccgctttcaaggcaagatcgaccttttctgttttgttttgtttttctttctttttcctggccatgaggacaaaaattactgagtggcccttaaagagggaagtttgttttcagctgttctcttttgcccgtaggtgggagggtggggattgctgcgtcctagctagaggaatggctttgcttgaatgtgtagtgcacacgcacgggtgtttctgtgtgctagttgcttcttgctgctgcttcctgcttgtctgggactcacatacataacgtgatatatatatatatatataaatgtataaatatatattttatttttttttaaatccttggagcttctggttcctatcagttcctgttgttaatcgtagaaccgttgtcccttcccccattcccgtatccatcatgttctttttcttttaaatatcaatataaaggtaaaagaaaaaaaaaaaaaaaaccaaaaaaaaaaaaaaaaaaaaaaaaaaaaaaattttgcgcccccccccccccccaaaaactttttaagaaaccccaccgcgtagggagcgaccgggaccccagaagaggtacagagcacacacgggtccaaaacggagtgtctccccacaagaggaacacccggggcacacaaacacaaagggacgagggaaaatcacacaccgaactaataaaaagaaccgcccgggaggcaaacaacagcaacggtctccgtcgacaaaaacaacccagagaagagagagcactacgagcagaccaacaataacacgggagaatcatctaaaacacggggagagacactcacacgcagacgcccccagaggaaaacccaaaagatcaatagcccccacccccttggagagaaacaaaagaacgaatcagacgcacacacaggacgacagacacagaaggacatgcacacagacagcaagaagagcagaggaccgcggacacacaagaagagacagaaagggagaagcgcagagcggaggacaacggggagcacccagacgcgccgcgacggagacacggaaggagacagccaggagacacgagcgcgcgagcaggcggacgcgacagcacaccagcgaccacggcgaacccaagagcagaccgaccaagcccggacgggccggcgtggcggacgaacggcgcagcaaccataaaacagagcataacaccagtctctcagaaaccaccaaaaccccactgagcataaagcgtaacgctatataacaaccataaaactacatacaccatccataaatgtaacacaactataaaacatcaatcatacactctcaacacaacaagacacacaccatatcaacaaaacagatacgcacccagtatacacttccccatcaaaagcaaataacagaaaatacaacatgacattaataaacgaaaacataacatataaaa

SEQ ID NO: 429128 - DNA, 1696 bp, Homo sapiens
gattgactctgtaggactcccccacacttcgatcgcggagaaagatctgccgctgtcgtctttgcttcagccgcagtcgccactggctgcctgagtgtgctccagcctgggggacagagcgagactccatctcaaaaaaaaaaaggaatcggacgaagaaccacaggatgttgaagacaactgtctgaagtatttgtgagggacagcgatgtggccctctgtgttaagaataacgtgtcctgctttggcagagagaagaaaatagccactgcccgctttcaaggcaagatcgaccttttctgttttgttttgtttttctttctttttcctggccatgaggacaaaaattactgagtggcccttaaagagggaagtttgttttcagctgttctcttttgcccgtaggtgggagggtggggattgctgcgtcctagctagaggaatggctttgcttgaatgtgtagtgcacacgcacgggtgtttctgtgtgctagttgcttcttgctgctgcttcctgcttgtctgggactcacatacataacgtgatatatatatatatatataaatgtataaatatatattttatttttttttaaatccttggagcttctggttcctatcagttcctgttgttaatcgtagaaccgttgtcccttcccccattcccgtatccatcatgttctttttcttttaaatatcaatataaaggtaaaagaaaaaaaaaaaaaaaaccaaaaaaaaaaaaaaaaaaaaaaaaaaaaaaattttgcgcccccccccccccccaaaaactttttaagaaaccccaccgcgtagggagcgaccgggaccccagaagaggtacagagcacacacgggtccaaaacggagtgtctccccacaagaggaacacccggggcacacaaacacaaagggacgagggaaaatcacacaccgaactaataaaaagaaccgcccgggaggcaaacaacagcaacggtctccgtcgacaaaaacaacccagagaagagagagcactacgagcagaccaacaataacacgggagaatcatctaaaacacggggagagacactcacacgcagacgcccccagaggaaaacccaaaagatcaatagcccccacccccttggagagaaacaaaagaacgaatcagacgcacacacaggacgacagacacagaaggacatgcacacagacagcaagaagagcagaggaccgcggacacacaagaagagacagaaagggagaagcgcagagcggaggacaacggggagcacccagacgcgccgcgacggagacacggaaggagacagccaggagacacgagcgcgcgagcaggcggacgcgacagcacaccagcgaccacggcgaacccaagagcagaccgaccaagcccggacgggccggcgtggcggacgaacggcgcagcaaccataaaacagagcataacaccagtctctcagaaaccaccaaaaccccactgagcataaagcgtaacgctatataacaaccataaaactacatacaccatccataaatgtaacacaactataaaacatcaatcatacactctcaacacaacaagacacacaccatatcaacaaaacagatacgcacccagtatacacttccccatcaaaagcaaataacagaaaatacaacatgacattaataaacgaaaacataacatataaaa

SEQ ID NO: 429129 - DNA, 1182 bp, Homo sapiens
gctggtaccggccgaagtcttagaagctgccgctgtcgtctttgcttcagccgcagtcgccactggctgcctgaggtgctcttacagcctgttccaagtgtggcttaatccgtctccaccaccagatctttctccgtggattcctctgctaagaccgctgccatgccagtgacggtaacccgcaccaccatcacaaccaccacgacgtcatcttcgggcctggggtcccccatgatcgtggggtcccctcgggccctgacacagcccctgggtctccttcgcctgctgcagctggtgtctacctgcgtggccttctcgctggtggctagcgtgggcgcctggacggggtccatgggcaactggtccatgttcacctggtgcttctgcttctccgtgaccctgatcatcctcatcgtggagctgtgcgggctccaggcccgcttccccctgtcttggcgcaacttccccatcaccttcgcctgctatgcggccctcttctgcctctcggcctccatcatctaccccaccacctatgtccagttcctgtcccacggccgttcgcgggaccacgccatcgccgccaccttcttctcctgcatcgcgtgtgtggcttacgccaccgaagtggcctggacccgggcccggcccggcgagatcactggctatatggccaccgtacccgggctgctgaaggtgctggagaccttcgttgcctgcatcatcttcgcgttcatcagcgaccccaacctgtaccagcaccagccggccctggagtggtgcgtggcggtgtacgccatctgcttcatcctagcggccatcgccatcctgctgaacctgggggagtgcaccaacgtgctacccatccccttccccagcttcctgtcggggctggccttgctgtctgtcctcctctatgccaccgcccttgttctctggcccctctaccagttcgatgagaagtatggcggaccggggatataacacgtccacaaccactcagggcccagtccagatggacatgatctaagtgtgaccggcctctccgtactcttcaacagtatgaacactctttccattcaacattcacctaagcagctcatttcacaaccttgtccattccgtttgaagtcgtcgattcacttgggacttacagcaatttcctattacctgagaagtatgtgt

SEQ ID NO: 429130 - DNA, 2811 bp, Homo sapiens
atcgcttctactgcggcggccgcctcatgctggccggccacggcggcgtcttcgcgctcacgctgctgctcatcctcaccaccaccggcctcttcttcgtctttgactgtccctacctggctcgcaagctgacccttgccatccccatcatcgctgccatcctcttcttcttcgtcatgagctgcctgctgcagacaagcttcaccgaccctgggatcctgccccgggccactgtctgtgaagcagccgccctggagaaacagatcgacaacacaggcagttctacataccggccaccccctcggacccgggaggtgctgatcaacgggcagatggtgaagctgaagtactgcttcacctgcaagatgttccggccaccccgaacctcacactgcagtgtctgcgacaactgtgtggaacgatttgaccatcactgcccctgggtgggcaactgtgtggggagacggaactatcgcttcttctacgcgtttattctctccctctcattcctgacggccttcatcttcgcctgtgtggtcacccacctgacgttgcgcgctcagggaagcaacttcctctccactctgaaggagacaccagcaagcgtgctggagttggtgatctgcttcttctccatctggtccattctgggcctctcagggtttcacacgtacctcgtcgcctccaacctgactactaatgaagacatcaaaggctcgtggtccagcaagaggggcggtgaggcctctgtcaacccctacagccataaaagtattatcaccaactgctgtgctgtgctctgtggccccctacctcccagcctaattgaccggaggggatttgtgcagtccgacaccgtgttgccctcacccatcagaagcgatgagccagcctgcagagccaagcctgatgccagcatggtaggaggccacccctgaccacggctcagtacttgccacctgctggcctgtctgaccctccgcactcacctgccgggaccctccctattccatccaagggaagcagaactgccaaagactcaagtcttttcatatttatttcccatcctgcgtggctttccctgaactgttccgtggctgtgccctctgctccccaaacccaggttcccacagccttgggccctaggtaccccagctgatcagtgccaggagagaccagagcctctggaggctacccagggaccacaccaagtccttgcctgtgccgggcgagccctgtgtgagtgaggctgtgaactgagcgtgaggcctcccaggtgggggaactgcttgggccttgctgagccagggtcctcagggtgaagcaggactgaggagtggccagctctggatagctggctgtggagaggaagcctccatgggctgctttggtctgtgggctccttcattcccttggtgataatttccctttattctgtgggatttttggtggggttttccccccttttttatggagttggccaataggattgagttggggctccagtagagaaggcagggttggtggtgggtgggggcagcctgtatcagacaaaggtaaatcagccagccaggcacccacagcctcagctcctgtgcagttcctgggcagcacagtggaagtgggagcctggtccttcccctgcccatggagagctctttaagggatcccagcctgcccctccacttctctcccaagccaggtcccggcatgggtgggttatgctcatgctggcaatacttgaaacgggtttattaatgctgggtattttgcacaattttatagacctcttttctacatagtcttttttaaatggaaggagaaaatgtcagccacattactgtctgtgtagtgccaggtgaagggttatcagaaggctggttggttttaataagtttattccaagagaccttctggctggaatgagtgagagtgtgtgtgcatgtgtgtgtgtgttcatgtgtgccctgtatgaatgtggctggctcccatatcccctgggctgccccctgccccatcccctttgagtgtcagaagcactctgagccaaggggacagggggcacgtgcactggtcacgagaaaaccctgggctcccactggggctcagcccagcctcctatctttccttcttctatggacttcagacagccagtgtctggggactctgccactctacccccagccctacccaccagcccccaggtgaggcttccagctgggacctgcccagacaggctgagcctgggcgtggtgggtggggtgatggctctggggagcggctgccatcctacaagccacaccccctcctctgagctctgaatatgggacccagtgccaggagctggaagacaaggtgtttctgccaaacggggacctccatccagagaaaaggaagaaggtgcagggtgggccaagaggcaagtgaaggttggcctgagtctgggccggaaactcagaggatgtttctcctctgctgggagctgtagtttcttatcaaaatagatattgttccaccatccccctccttggcccttcaagtgggctgaagcccttggaaagtgacataggaagtccccagatcttgcccttctcactccagaggctagtggtcacagacagctgggaatggcagccacagagggtcccctctgggagaaacagcttcaccccagcctcagggccctgggccatcactgcagtggccctgggaggtgaggaagaagctggctagaggagggggctcccacctaccttttatttaagccagtattctttgttcctgcttgtaataaaacttcagtttataaga

SEQ ID NO: 429131 - DNA, 2173 bp, Homo sapiens
gatttttggtggggttttccccccttttttttatggagttggccaataggattgagttggggctccagtagagaaggcagggttggtggtgggtgggggcagcctgtatcagacaaaggtaaatcagccagccaggcacccacagcctcagctcctgtgctctgtggccccctacctcccagcctaattgaccggaggggatttgtgcagtccgacaccgtgttgccctcacccatcagaagcgatgagccagcctgcagagccaagcctgatgccagcatggtaggaggccacccctgaccacggctcagtacttgccacctgctggcctgtctgaccctccgcactcacctgccgggaccctccctattccatccaagggaagcagaactgccaaagactcaagtcttttcatatttatttcccatcctgcgtggctttccctgaactgttccgtggctgtgccctctgctccccaaacccaggttcccacagccttgggccctaggtaccccagctgatcagtgccaggagagaccagagcctctggaggctacccagggaccacaccaagtccttgcctgtgccgggcgagccctgtgtgagtgaggctgtgaactgagcgtgaggcctcccaggtgggggaactgcttgggccttgctgagccagggtcctcagggtgaagcaggactgaggagtggccagctctggatagctggctgtggagaggaagcctccatgggctgctttggtctgtgggctccttcattcccttggtgataatttccctttattctgtgggatttttggtggggttttccccccttttttatggagttggccaataggattgagttggggctccagtagagaaggcagggttggtggtgggtgggggcagcctgtatcagacaaaggtaaatcagccagccaggcacccacagcctcagctcctgtgcagttcctgggcagcacagtggaagtgggagcctggtccttcccctgcccatggagagctctttaagggatcccagcctgcccctccacttctctcccaagccaggtcccggcatgggtgggttatgctcatgctggcaatacttgaaacgggtttattaatgctgggtattttgcacaattttatagacctcttttctacatagtcttttttaaatggaaggagaaaatgtcagccacattactgtctgtgtagtgccaggtgaagggttatcagaaggctggttggttttaataagtttattccaagagaccttctggctggaatgagtgagagtgtgtgtgcatgtgtgtgtgtgttcatgtgtgccctgtatgaatgtggctggctcccatatcccctgggctgccccctgccccatcccctttgagtgtcagaagcactctgagccaaggggacagggggcacgtgcactggtcacgagaaaaccctgggctcccactggggctcagcccagcctcctatctttccttcttctatggacttcagacagccagtgtctggggactctgccactctacccccagccctacccaccagcccccaggtgaggcttccagctgggacctgcccagacaggctgagcctgggcgtggtgggtggggtgatggctctggggagcggctgccatcctacaagccacaccccctcctctgagctctgaatatgggacccagtgccaggagctggaagacaaggtgtttctgccaaacggggacctccatccagagaaaaggaagaaggtgcagggtgggccaagaggcaagtgaaggttggcctgagtctgggccggaaactcagaggatgtttctcctctgctgggagctgtagtttcttatcaaaatagatattgttccaccatccccctccttggcccttcaagtgggctgaagcccttggaaagtgacataggaagtccccagatcttgcccttctcactccagaggctagtggtcacagacagctgggaatggcagccacagagggtcccctctgggagaaacagcttcaccccagcctcagggccctgggccatcactgcagtggccctgggaggtgaggaagaagctggctagaggagggggctcccacctaccttttatttaagccagtattctttgttcctgcttgtaataaaacttcagtttataaga

SEQ ID NO: 429132 - DNA, 2515 bp, Homo sapiens
atcgcttctactgcggcggccgcctcatgctggccggccacggcggcgtcttcgcgctcacgctgctgctcatcctcaccaccaccggcctcttcttcgtctttgactgtccctacctggctcgcaagctgacccttgccatccccatcatcgctgccatcctcttcttcttcgtcatgagctgcctgctgcagacaagcttcaccgaccctgggatcctgccccgggccactgtctgtgaagcagccgccctggagaaacagatcgacaacacaggcagttctacataccggccaccccctcggacccgggaggtgctgatcaacgggcagatggtgaagctgaagtactgcttcacctgcaagatgttccggccaccccgaacctcacactgcagtgtctgcgacaactgtgtggaacgatttgaccatcactgcccctgggtgggcaactgtgtggggagacggaactatcgcttcttctacgcgtttattctctccctctcattcctgacggccttcatcttcgcctgtgtggtcacccacctgacgttgcgcgctcagggaagcaacttcctctccactctgaaggagacaccagcaagcgtgctggagttggtgatctgcttcttctccatctggtccattctgggcctctcagggtttcacacgtacctcgtcgcctccaacctgactactaatgaagacatcaaaggctcgtggtccagcaagaggggcggtgaggcctctgtcaacccctacagccataaaagtattatcaccaactgctgtgctgtgctctgtggccccctacctcccagcctaattgaccggaggggatttgtgcagtccgacaccgtgttgccctcacccatcagaagcgatgagccagcctgcagagccaagcctgatgccagcatggtaggaggccacccctgaccacggctcagtacttgccacctgctggcctgtctgaccctccgcactcacctgccgggaccctccctattccatccaagggaagcagaactgccaaagactcaagtcttttcatatttatttcccatcctgcgtggctttccctgaactgttccgtggctgtgccctctgctccccaaacccaggttcccacagccttgggccctaggtaccccagctgatcagtgccaggagagaccagagcctctggaggctacccagggaccacaccaagtccttgcctgtgccgggcgagccctgtgtgagtgaggctgtgaactgagcgtgaggcctcccaggtgggggaactgcttgggccttgctgagccagggtcctcagggtgaagcaggactgaggagtggccagctctggatagctggctgtggagaggaagcctccatgggctgctttggtctgtgggctccttcattcccttggtgataatttccctttattctgtgggatttttggtggggttttccccccttttttatggagttggccaataggattgagttggggctccagtagagaaggcagggttggtggtgggtgggggcagcctgtatcagacaaaggtaaatcagccagccaggcacccacagcctcagctcctgtgcagttcctgggcagcacagtggaagtgggagcctggtccttcccctgcccatggagagctctttaagggatcccagcctgcccctccacttctctcccaagccaggtcccggcatgggtgggttatgctcatgctggcaatacttgaaacgggtttattaatgctgggtattttgcacaattttatagacctcttttctacatagtcttttttaaatggaaggagaaaatgtcagccacattactgtctgtgtagtgccaggtgaagggttatcagaaggctggttggttttaataagtttattccaagagaccttctggctggaatgagtgagagtgtgtgtgcatgtgtgtgtgtgttcatgtgtgccctgtatgaatgtggctggctcccatatcccctgggctgccccctgccccatcccctttgagtgtcagaagcactctgagccaaggggacagggggcacgtgcactggtcacgagaaaaccctgggctcccactggggctcagcccagcctcctatctttccttcttctatggacttcagacagccagtgtctggggactctgccactctacccccagccctacccaccagcccccaggtgaggcttccagctgggacctgcccagacaggctgagcctgggcgtggtgggtggggtgatggctctggggagcggctgccatcctacaagccacaccccctcctctgagctctgaatatgggacccagtgccaggagctggaagacaagggggagaaacagcttcaccccagcctcagggccctgggccatcactgcagtggccctgggaggtgaggaagaagctggctagaggagggggctcccacctaccttttatttaagccagtattctttgttcctgcttgtaataaaacttcagtttataaga

SEQ ID NO: 429133 - DNA, 2020 bp, Homo sapiens
atcgcttctactgcggcggccgcctcatgctggccggccacggcggcgtcttcgcgctcacgctgctgctcatcctcaccaccaccggcctcttcttcgtctttgactgtccctacctggctcgcaagctgacccttgccatccccatcatcgctgccatcctcttcttcttcgtcatgagctgcctgctgcagacaagcttcaccgaccctgggatcctgccccgggccactgtctgtgaagcagccgccctggagaaacagatcgacaacacaggcagttctacataccggccaccccctcggacccgggaggtgctgatcaacgggcagatggtgaagctgaagtactgcttcacctgcaagatgttccggccaccccgaacctcacactgcagtgtctgcgacaactgtgtggaacgatttgaccatcactgcccctgggtgggcaactgtgtggggagacggaactatcgcttcttctacgcgtttattctctccctctcattcctgacggccttcatcttcgcctgtgtggtcacccacctgacgttgcgcgctcagggaagcaacttcctctccactctgaaggagacaccagcaagcgtgctggagttggtgatctgcttcttctccatctggtccattctgggcctctcagggtttcacacgtacctcgtcgcctccaacctgactactaatgaagacatcaaaggctcgtggtccagcaagaggggcggtgaggcctctgtcaacccctacagccataaaagtattatcaccaactgctgtgctgtgctctgtggccccctacctcccagcctaattgaccggaggggatttgtgcagtccgacaccgtgttgccctcacccatcagaagcgatgagccagcctgcagagccaagcctgatgccagcatggtaggaggccacccctgaccacggctcagtacttgccacctgctggcctgtctgaccctccgcactcacctgccgggaccctccctattccatccaagggaagcagaactgccaaagactcaagtcttttcatatttatttcccatcctgcgtggctttccctgaactgttccgtggctgtgccctctgctccccaaacccaggttcccacagccttgggccctaggtaccccagctgatcagtgccaggagagaccagagcctctggaggctacccagggaccacaccaagtccttgcctgtgccgggcgagccctgtgtgagtgaggctgtgaactgagcgtgaggcctcccaggtgggggaactgcttgggccttgctgagccagggtcctcagggtgaagcaggactgaggagtggccagctctggatagctggctgtggagaggaagcctccatgggctgctttggtctgtgggctccttcattcccttggtgataatttccctttattctgtgggatttttggtggggttttccccccttttttatggagttggccaataggattgagttggggctccagtagagaaggcagggttggtggtgggtgggggcagcctgtatcagacaaaggtaaatcagccagccaggcacccacagcctcagctcctgtgcagttcctgggcagcacagtggaagtgggagcctggtccttcccctgcccatggagagctctttaagggatcccagcctgcccctccacttctctcccaagccaggtcccggcatgggtgggttatgctcatgctggcaatacttgaaacgggtttattaatgctgggtattttgcacaattttatagacctcttttctacaagccacaccccctcctctgagctctgaatatgggacccagtgccaggagctggaagacaagggggagaaacagcttcaccccagcctcagggccctgggccatcactgcagtggccctgggaggtgaggaagaagctggctagaggagggggctcccacctaccttttatttaagccagtattctttgttcctgcttgtaataaaacttcagtttataaga

SEQ ID NO: 429134 - DNA, 1166 bp, Homo sapiens
atcgcttctactgcggcggccgcctcatgctggccggccacggcggcgtcttcgcgctcacgctgctgctcatcctcaccaccaccggcctcttcttcgtctttgactgtccctacctggctcgcaagctgacccttgccatccccatcatcgctgccatcctcttcttcttcgtcatgagctgcctgctgcagacaagcttcaccgaccctgggatcctgccccgggccactgtctgtgaagcagccgccctggagaaacagatcgacaacacaggcagttctacataccggccaccccctcggacccgggaggtgctgatcaacgggcagatggtgaagctgaagtactgcttcacctgcaagatgttccggccaccccgaacctcacactgcagtgtctgcgacaactgtgtggaacgatttgaccatcactgcccctgggtgggcaactgtgtggggagacggaactatcgcttcttctacgcgtttattctctccctctcattcctgacggccttcatcttcgcctgtgtggtcacccacctgacgttgcgcgctcagggaagcaacttcctctccactctgaaggagacaccagcaagcgtgctggagttggtgatctgcttcttctccatctggtccattctgggcctctcagggtttcacacgtacctcgtcgcctccaacctgactactaatgaagacatcaaaggctcgtggtccagcaagaggggcggtgaggcctctgtcaacccctacagccataaaagtattatcaccaactgctgtgctgtgctctgtggccccctacctcccaggtaagtgagcggggtgcggaagaggggtaacagggccatgcctggccagtgatcaaagtgttcctggatatcagccgacctccccctacaccctagatgccctccgtccactaccccctggagggcatttgtcatgtgacggaattccatggagaattgttatttaatcacgtgctcattgtagaaaaaaaaaattaagtacaaaacgtaaaacagaggagcattggatatgacatgtaattctactccccgggggtagccaccatgactgtttcagccatgtttgaatgacactgcccttccggttgcccactgcctggactgggtggcgactccatcctctcct

SEQ ID NO: 429135 - DNA, 773 bp, Homo sapiens
gtgtgtggtgcggtgtgtgtgctggtggtggtagggtctccagggactccccgctaagcagaaggatcgggatatagggcaaggctaaaagcccagccccattgtggactgaggaagtagcttctcgcagagcagctctccagctggaagaggaggtggagggtgaggctggggagaggatggcgaacctgccctgaggtgcttgggtctgtgctggtggggtcctggtatgcaggggccaccggtcactaacactcttatgtcctggctttctgtccccgctgagctttctctcacccgcccgttttctctcctgcttcattgcctgctgcctaagccttggcccttctctcgggcagaggcaggtgctgtggcagcacctctccccaccaccggggcccctgcaggccgcctccctcctcccaggcctgctaaccctctctcttctccttctttgctgtcctgccggggatctccagtgtgtgcgggggcttaagggacctcctgaggaccgctgctctctgcctctccaggaatggcctggggggagccaggcacccggcacctccacctgcctaacctgtggcccatctgccaccatctgtgcctacagggtctgccccccagcctgcccggcctgtgtgctctctaggacccccatagggggcaggggctggcctctttgccccaattcccgctccatgccggccagagtgtagaaagccataacgcagccatcagcaccattaatgtgactctacgctgatatgctc

SEQ ID NO: 429136 - DNA, 3425 bp, Homo sapiens
atcgcttctactgcggcggccgcctcatgctggccggccacggcggcgtcttcgcgctcacgctgctgctcatcctcaccaccaccggcctcttcttcgtctttgactgtccctacctggctcgcaagctgacccttgccatccccatcatcgctgccatcctcttcttcttcgtcatgagctgcctgctgcagacaagcttcaccgaccctgggatcctgccccgggccactgtctgtgaagcagccgccctggagaaacagatcgacaacacaggcagttctacataccggccaccccctcggacccgggaggtgctgatcaacgggcagatggtgaagctgaagtactgcttcacctgcaagatgttccggccaccccgaacctcacactgcagtgtctgcgacaactgtgtggaacgatttgaccatcactgcccctgggtgggcaactgtgtggggagacggaactatcgcttcttctacgcgtttattctctccctctcattcctgacggccttcatcttcgcctgtgtggtcacccacctgacgttgcgcgctcagggaagcaacttcctctccactctgaaggagacaccagcaagcgtgctggagttggtgatctgcttcttctccatctggtccattctgggcctctcagggtttcacacgtacctcgtcgcctccaacctgactactaatgaagacatcaaaggctcgtggtccagcaagaggggcggtgaggcctctgtcaacccctacagccataaaagtattatcaccaactgctgtgctgtgctctgtggccccctacctcccagcctaattgaccggaggggatttgtgcagtccgacaccgtgttgccctcacccatcagaagcgatgagccagcctgcagagccaagcctgatgccagcatggtaggaggccacccctgaccacggctcagtacttgccacctgctggcctgtctgaccctccgcactcacctgccgggaccctccctattccatccaagggaagcagaactgccaaagactcaagtcttttcatatttatttcccatcctgcgtggctttccctgaactgttccgtggctgtgccctctgctccccaaacccaggttcccacagccttgggccctaggtaccccagctgatcagtgccaggagagaccagagcctctggaggctacccagggaccacaccaagtccttgcctgtgccgggcgagccctgtgtgagtgaggctgtgaactgagcgtgaggcctcccaggtgggggaactgcttgggccttgctgagccagggtcctcagggtgaagcaggactgaggagtggccagctctggatagctggctgtggagaggaagcctccatgggctgctttggtctgtgggctccttcattcccttggtgataatttccctttattctgtgggatttttggtggggttttccccccttttttatggagttggccaataggattgagttggggctccagtagagaaggcagggttggtggtgggtgggggcagcctgtatcagacaaaggtaaatcagccagccaggcacccacagcctcagctcctgtgcagttcctgggcagcacagtggaagtgggagcctggtccttcccctgcccatggagagctctttaagggatcccagcctgcccctccacttctctcccaagccaggtcccggcatgggtgggttatgctcatgctggcaatacttgaaacgggtttattaatgctgggtattttgcacaattttatagacctcttttctacatagtcttttttaaatggaaggagaaaatgtcagccacattactgtctgtgtagtgccaggtgaagggttatcagaaggctggttggttttaataagtttattccaagagaccttctggctggaatgagtgagagtgtgtgtgcatgtgtgtgtgtgttcatgtgtgccctgtatgaatgtggctggctcccatatcccctgggctgccccctgccccatcccctttgagtgtcagaagcactctgagccaaggggacagggggcacgtgcactggtcacgagaaaaccctgggctcccactggggctcagcccagcctcctatctttccttcttctatggacttcagacagccagtgtctggggactctgccactctacccccagccctacccaccagcccccaggtgaggcttccagctgggacctgcccagacaggctgagcctgggcgtggtgggtggggtgatggctctggggagcggctgccatcctacaagccacaccccctcctctgagctctgaatatgggacccagtgccaggagctggaagacaaggtgtttctgccaaacggggacctccatccagagaaaaggaagaaggtgcagggtgggccaagaggcaagtgaaggttggcctgagtctgggccggaaactcagaggatgtttctcctctgctgggagctgtagtttcttatcaaaatagatattgttccaccatccccctccttggcccttcaagtgggctgaagcccttggaaagtgacataggaagtccccagatcttgcccttctcactccagaggctagtggtcacagacagctgggaatggcagccacagagggtcccctctgggagaaacagcttcaccccagcctcagggccctgggccatcactgcagtggccctgggaggtgaggaagaagctggctagaggagggggctcccacctaccttttatttaagccagtattctttgttcctgcttgtaataaaacttcagtttataagaaaaaaaaaaaaaaagggggggccggtcgggatctagaaattagtagaaggagaagggcaagaaggagaagggcaagaagaagggggctccccattggaaggggccgggacgaggcctcattaaaccttcctctcccttaaccatttccggaggcatctacgggctcaccattttttgtagccacgaggttccacggacttcaggtcattagtggtcaactttcctcatatgtggtgcatcggccattaattttcctttgattccgaaatcactgtggttcgaaaccgcgctgatatggcattggaatgtggtggacaatcggatgtccgcctatggggggtttaaaaaaacacaaagggggcggctaaaaatccccggggcgcaagttacgcgaccccggtttgtgacaagggggcccagaggcgcgattaaaacaagacgagggcggggtaacacgcggcagggaaacgcacgggaagggagaaaccctcggggggacagtcagcccccaataggcgaacacaaagcagggcaacgcatcgcgggtggttacagaagtgcgcgcacgcggcgccaagagacgacacggcctcggcaagcagagacagagcaaa

SEQ ID NO: 429137 - DNA, 1336 bp, Homo sapiens
atcgcttctactgcggcggccgcctcatgctggccggccacggcggcgtcttcgcgctcacgctgctgctcatcctcaccaccaccggcctcttcttcgtctttgactgtccctacctggctcgcaagctgacccttgccatccccatcatcgctgccatcctcttcttcttcgtcatgagctgcctgctgcagacaagcttcaccgaccctgggatcctgccccgggccactgtctgtgaagcagccgccctggagaaacagatcgacaacacaggcagttctacataccggccaccccctcggacccgggaggtgctgatcaacgggcagatggtgaagctgaagtactgcttcacctgcaagatgttccggccaccccgaacctcacactgcagtgtctgcgacaactgtgtggaacgatttgaccatcactgcccctgggtgggcaactgtgtggggagacggaactatcgcttcttctacgcgtttattctctccctctcattcctgacggccttcatcttcgcctgtgtggtcacccacctgacgttgcgcgctcagggaagcaacttcctctccactctgaaggagacaccagcaagcgtgctggagttggtgatctgcttcttctccatctggtccattctgggcctctcagggtttcacacgtacctcgtcgcctccaacctgactactaatgaagacatcaaaggctcgtggtccagcaagaggggcggtgaggcctctgtcaacccctacagccataaaagtattatcaccaactgctgtgctgtgctctgtggccccctacctcccagcctaattgaccggaggggatttgtgcagtccgacaccgtgttgccctcacccatcagaagcgatgagccagcctgcagagccaagcctgatgccagcatggaggacacctgtcaggattttgccatctcctggcacagcctgaggggagctaacaggcctctttgcagagggttagctgtgtgtgcgggggcttaagggacctcctgaggaccgctgctctctgcctctccaggaatggcctggggggagccaggcacccggcacctccacctgcctaacctgtggcccatctgccaccatctgtgcctacagggtctgccccccagcctgcccggcctgtgtgctctctaggacccccatagggggcaggggctggcctctttgccccaattcccgctccatgccggccagagtgtagaaagccataacgcagccatcagcaccattaatgtgactctacgctgatatgctccctctctcctccactgacttccccttcccggatttgtgaggtg

SEQ ID NO: 429138 - DNA, 875 bp, Homo sapiens
atcgcttctactgcggcggccgcctcatgctggccggccacggcggcgtcttcgcgctcacgctgctgctcatcctcaccaccaccggcctcttcttcgtctttgactgtccctacctggctcgcaagctgacccttgccatccccatcatcgctgccatcctcttcttcttcgtcatgagctgcctgctgcagacaagcttcaccgaccctgggatcctgccccgggccactgtctgtgaagcagccgccctggagaaacagatcgacaacacaggcagttctacataccggccaccccctcggacccgggaggtgctgatcaacgggcagatggtgaagctgaagtactgcttcacctgcaagatgttccggccaccccgaacctcacactgcagtgtctgcgacaactgtgtggaacgatttgaccatcactgcccctgggtgggcaactgtgtggggagacggaactatcgcttcttctacgcgtttattctctccctctcattcctgacggccttcatcttcgcctgtgtggtcacccacctgacgttgcgcgctcagggaagcaacttcctctccactctgaaggagacaccagcaagcgtgctggagttggtgatctgcttcttctccatctggtccattctgggcctctcagggtttcacacgtacctcgtcgcctccaacctgactactaatgaagacatcaaaggctcgtggtccagcaagaggggcggtgaggcctctgtcaacccctacagccataaaagtattatcaccaactgctgtgctgtgctctgtggccccctacctcccagcctaatgccggaggggatttgtgcagtccgattccgtactcccacccggtcacgg

SEQ ID NO: 429139 - DNA, 3516 bp, Homo sapiens
cgcaatactcgcgctgcctccgtggtccctgcctggctgaggtggcagcagggggcgggacgcgcagcgctatggcagagggcagcggggaagtggtcgcagtgtctgcgaccggggctgccaacggcctcaacaatggggcaggcgggacctcggcgacgacctgcaacccgctgtcgcgcaagctgcataagatcctggagacgcggctggacaacgacaaggaattaggaatcctgctgttaagtttctcatggttgttatttgaggactcagtgagagactccaggagatgttagaagctctcaaggcactttcaaccttttttgttgaaaatagtctgcggactcgaagaaatttacgtggagatattgaacgtaaaagtttagccatcaatgaagaatttgtaagcattttcaaggaagtgaaggaggaacttgaaagcataagcgaagatgttcaagcaatgagcaactgttgtcaagatatgacaagtcgcctacaggcagcaaaggaacagactcaagatttaatagtaaaaaccactaagcttcaatctgaaagccaaaaattagagataagagctcaagttgcagatgccttcttatccaagttccaactgacttctgatgaaatgagtcttctccgaggtacaagagaaggacccattactgaggattttttcaaggcactgggaagagtaaaacagattcataatgatgtcaaagttctcttgcgtacaaatcaacaaacggcaggtttagaaattatggaacagatggccttacttcaagaaacggcttatgaaagactttaccgatgggctcaaagtgaatgcagaacattgacacaagaatcatgtgacgtatctccagtattgacacaggcaatggaagccctgcaggacagacctgtcttatataaatataccttagatgaatttggaacagccagaagaagtacagttgttcgtggatttattgatgcgctcacaagagggggccccggaggtacacctagaccaattgaaatgcattctcatgaccctttgaggtatgtaggagatatgttggcttggctccatcaagctactgcttctgaaaaggaacaccttgaagctctcttaaagcatgtaactacacaaggtgttgaagaaaatattcaagaagttgttgggcatatcactgaaggtgtgtgcaggcctctaaaggttcgaattgagcaagtaatagttgctgaacctggggcagttttattatataaaatttctaatctcctcaaattttatcaccatacaatcagtggtattgttggaaatagtgcaactgcattattgactaccattgaagaaatgcatttgctaagcaaaaaaatattcttcaatagcttgagtcttcatgcaagtaaattaatggacaaggttgaactcccaccacctgatcttggaccaagttctgcactaaatcagacactcatgttgctgcgtgaagttttagcatctcacgattcttcagttgtaccattagatgctcgtcaagctgattttgtgcaggttttatcatgtgtcttggatcctctcctacagatgtgtactgtatcagccagcaatttaggcacagctgacatggccactttcatggtcaattcactatatatgatgaagacaacattagctctatttgaattcactgacagacgtctggaaatgctacagtttcagatcgaagcacatttggacacacttataaatgagcaagcctcttatgttttaactagggtaggcttgagttacatctataacactgtacagcaacataaacctgaacagggctctttagctaatatgcccaacctagattctgtgacactgaaggctgcaatggttcagtttgatcgttatctgtcagccccagacaacctattgataccacagctgaactttcttctaagtgccacagtgaaagagcagatcgtaaaacaatctacagaattagtctgcagagcctatggtgaagtgtatgcagccgtgatgaatccaatcaatgaatacaaagatccagagaacattcttcaccgatcgccgcagcaagtgcagacgcttctttcctgattatcttatttcattgtgttagcaaaatatgacctccctaaaacactgaaggttattttttattctttgaatttttactttataatttgatagttacagttttctttgtatcataagattgtaagtcccgataatttttttttttttggtctcagtaacagggaagtaagtaacatgttgacctgagctagtattgctgtgtatctactctaaatgagatgatctatttttttgctagccatctctccagctctgcagttttcactgtattcaggaagcataaagtagtatgaaaggtttgaagaatttttttttacaagactagttctaaattaacagcttataaaaaatttgtctaaatttaataattagtataaggatatgacctaataaatgtctccttacctaaagattcatttgctttcttttaatatgagtaggcatacttagtagcttttctgaacctagcctatgtctctgtccccaaaatagctgcccttaaagagttgttagcagagagaaaaataacagtgaatgtgctcctggtgtatatggcagtgaatctcctttctgttctactttagcatactatatatatttgactgtgtacattcttatgcaattttaagtatacactcagcaataattagaaaaaaaggagagagaaaagtgatttaaacagggtggattccactctgtgggagccttcgatggaactcaaggtggagctcagcctttccaatgagctctaagcatgtagatagcctgagctgtgtctaagcctggtgtttaaagatgggtatttgtcatacaatatgggtcctaaatccaaccaactacacattttatctggtgttcaaaccaaagaaacaatgatctactcaaacattggagaaaaaaactgccagaggaggagttgccaattggcagtgtgtcttatctccatgttgtaactggactctgactttagaccattacctattaggaagattaaaaatgactgtatttttaaaggaataaatcccagtgtgcctgatttgacattcttgtcagcaaaaaaaacttaatttctagtaaatctataaaaatgggtaagtccctaaattacaaatgagaaaattgaagcacaaggaaaaaaataactagtttgaaatattttgaaaagtaataacataaaactagtatttgtagaagattatgtgttgtatataacaaattagtatttatagaatatgacctatttatctgaagtttataattgtttatacctaatacagttctttttggagtaagaatgattatataatcgttatccatttgggtataaatctgtatttttagttttttccctttgattagtatgtgttacatataaagacagaaaataaagtataaatcaagagctt

SEQ ID NO: 429140 - DNA, 5228 bp, Homo sapiens
cgcaatactcgcgctgcctccgtggtccctgcctggctgaggtggcagcagggggcgggacgcgcagcgctatggcagagggcagcggggaagtggtcgcagtgtctgcgaccggggctgccaacggcctcaacaatggggcaggcgggacctcggcgacgacctgcaacccgctgtcgcgcaagctgcataagatcctggagacgcggctggacaacgacaaggagatgttagaagctctcaaggcactttcaaccttttttgttgaaaatagtctgcggactcgaagaaatttacgtggagatattgaacgtaaaagtttagccatcaatgaagaatttgtaagcattttcaaggaagtgaaggaggaacttgaaagcataagcgaagatgttcaagcaatgagcaactgttgtcaagatatgacaagtcgcctacaggcagcaaaggaacagactcaagatttaatagtaaaaaccactaagcttcaatctgaaagccaaaaattagagataagagctcaagttgcagatgccttcttatccaagttccaactgacttctgatgaaatgagtcttctccgaggtacaagagaaggacccattactgaggattttttcaaggcactgggaagagtaaaacagattcataatgatgtcaaagttctcttgcgtacaaatcaacaaacggcaggtttagaaattatggaacagatggccttacttcaagaaacggcttatgaaagactttaccgatgggctcaaagtgaatgcagaacattgacacaagaatcatgtgacgtatctccagtattgacacaggcaatggaagccctgcaggacagacctgtcttatataaatataccttagatgaatttggaacagccagaagaagtacagttgttcgtggatttattgatgcgctcacaagagggggccccggaggtacacctagaccaattgaaatgcattctcatgaccctttgaggtatgtaggagatatgttggcttggctccatcaagctactgcttctgaaaaggaacaccttgaagctctcttaaagcatgtaactacacaaggtgttgaagaaaatattcaagaagttgttgggcatatcactgaaggtgtgtgcaggcctctaaaggttcgaattgagcaagtaatagttgctgaacctggggcagttttattatataaaatttctaatctcctcaaattttatcaccatacaatcagtggtattgttggaaatagtgcaactgcattattgactaccattgaagaaatgcatttgctaagcaaaaaaatattcttcaatagcttgagtcttcatgcaagtaaattaatggacaaggttgaactcccaccacctgatcttggaccaagttctgcactaaatcagacactcatgttgctgcgtgaagttttagcatctcacgattcttcagttgtaccattagatgctcgtcaagctgattttgtgcaggttttatcatgtgtcttggatcctctcctacagatgtgtactgtatcagccagcaatttaggcacagctgacatggccactttcatggtcaattcactatatatgatgaagacaacattagctctatttgaattcactgacagacgtctggaaatgctacagtttcagatcgaagcacatttggacacacttataaatgagcaagcctcttatgttttaactagggtaggcttgagttacatctataacactgtacagcaacataaacctgaacagggctctttagctaatatgcccaacctagattctgtgacactgaaggctgcaatggttcagtttgatcgttatctgtcagccccagacaacctattgataccacagctgaactttcttctaagtgccacagtgaagcgtccacccaacggcccatgatcatcttgtaaccagtgcaggaccttgtgcttctggagccattccagttgtgggaggtgatgtctcggaaaactctgccttggggactggctatagaaatgtggccagatggctttgtcatcttcccctgtctactctgtgactcttcatctggtggaaatgctgtgagggatgaaccaaatggaaactcagatttactcttcagaataatgcggatcataatacgcacacacacagcatgtagagttgctgtgtggcttaaataagtaaatgtatgcaaagcactaaaatggtgtctgtctaagtgtaaacaccaattgtgttggctattatcactattgttgttcttatctcaaatatgtgttactttctaaataactttagtgttcatagattgttaaaagacaagatgacctgaagaaaagtaagccctaaaaatccattattaacttttttctccaccactcttttcttctaaacttcactattctttgtgttttcacaaaagttgcttacttcacctggcagagatagcattacgcaggggatgattaaaatatactcacttgtacttgttggttttaaattttattatttatgaataggtaatagcatgtacactgtaaaaatctcaaaaggcaaaaaaggatatacagtaaacattaagttcctcttaccctggaccttagccatcaagttctcttccccataggcaatccctgttgcctaatttccaattcccctgcatactttaaagatcatctgtgcatctgcactcagaccactcacacgtctaaaacaaatgatagcacactacacacaaagttctgttcctttttatgctcaatgatatgttttgcatcatatttcactgccgtataaataatgctgcctcgatttttaaaataactgaacagtaatacacagtatgaatttactccaatttataatccaatccttagttaatggatattttgattttgttgttaagaatcatgcagcaatgatgtacctgttagacatgagttattaatttctcttcgaagaatcaatatgtcactacgttcaattctttgccttctacttttaaacttcacttcctcataaagcaaccttttgcgatcatctgctccaccctgactcattccaatcacctgctccaccctgactcattctgatcacctgctctgcccagactcattcccatcacctgctccaccctgacttattccaattacctgctccaccctgtctcattctccaccctgactcattccataaccatttttcccaccaaaccagtcaccccctcaccctctttaaattagctaatcggaattagtttagcttgtgtggtctaacctagccaatagatgaatgacacagcagcaggagccacgttcgtcagggataagaacaccttccccttccttgtccaggggtgtactcaccattgctccatctgtgagggcgcacccttctatagaagtaaattgccttgctgagaagaaaaaaagaaaattttatatttgagtgctatttattttgtggcaccaaaactatttataacatacctgatctttattttaaatttttgtttatttaaatattaaatatattatccacctggtattaatttgtttaaataaatgtgaggtagggttccattgctattttttaaccaggtaggttatattgactaaccttcactttgaaagtgatttgaaatacacttttcatttattaaattctcccttgtgtttaggcagtaaggcataatatttgagagtgtgggctctgcagtccagctatctgggtttgaagtttatctcctttatttgcgagtggtacaaacttgaacaaattatgtaatttgtttttctcaattccctcatgcactaagtgaggataaaaatagcaataacaccatgagattgctgataacaaaatgcaaggtaaaaattgtgtaaggcttaaaattgtgtagcctggtatacaagaggctctaaataacataagctattattgcttttctacttattattatttctggcttttgtagtctttttcccattgttgatctttctactattcacaaagcatgagtctagtatctgtagatttataaactaattaatgtaacttttcaatatgttttaatatctcatagatactgttcttcctcattacttttctattttataaatttctatttcatctgcttcataaattttgcattctcataaactaagaatcatctcctgtagttaaaaaatattgtttgtatttttgttgggagtagagtgaattaaaatatattgacttaaggagaactgacatctttataatattgaatcttcctgtttgagattggactttatgtccatattttaaagtctttgtttatgaccctaagtataattttaacgtttttatattaggcttatttctagatactttttgttaatatatcatctaactggttgttcttcatatatataatgactatgaattttttctcagtcttttttctgaattctcacatcatttgtgttatatttttaagttgattctcttgagtttttcaggtaaacaattatatcacctataaaaataatgttgccaccttaaattaagaaaatgtttttctattgtctaattgcatggactgttgcctcaggaacagtataagattgcttacaaaagccttgctttcttgttccagattttaaaaacaaggctttcaatgacaatctcgctagcaagaagctggtatacttacatacatacatacaaacagacagacacccactttctatatgtatatctagatagatttagatagacatatatgtgtgattcctgttaagatgaatctatttttggtatttaagattttaaaaatctagaatgggtattattatattgtattgaagctcttaagcatctatggaaatgaaagtatgattcttctctttcgactaattaatatgtgatccatagtattttagtaacagatttcctaatatcgaatgatctaggcattgattctagcagattatgtctatgggtattttatttaagattttgcatcagtattaataaatgaccatggtctatgggtttgcttttttgtgtgctatgtttgcagagtgtttgtagtttacaagagatttttgcaaacttctatttatgacaatatggtagattatatatctgaaaaaaaaaccttctcattacagaacatatacaaaactgctgaataaaacgaggcaaccaacattttaaatatatggttaataaggtttt

SEQ ID NO: 429141 - DNA, 3451 bp, Homo sapiens
cgcaatactcgcgctgcctccgtggtccctgcctggctgaggtggcagcagggggcgggacgcgcagcgctatggcagagggcagcggggaagtggtcgcagtgtctgcgaccggggctgccaacggcctcaacaatggggcaggcgggacctcggcgacgacctgcaacccgctgtcgcgcaagctgcataagatcctggagacgcggctggacaacgacaaggagatgttagaagctctcaaggcactttcaaccttttttgttgaaaatagtctgcggactcgaagaaatttacgtggagatattgaacgtaaaagtttagccatcaatgaagaatttgtaagcattttcaaggaagtgaaggaggaacttgaaagcataagcgaagatgttcaagcaatgagcaactgttgtcaagatatgacaagtcgcctacaggcagcaaaggaacagactcaagatttaatagtaaaaaccactaagcttcaatctgaaagccaaaaattagagataagagctcaagttgcagatgccttcttatccaagttccaactgacttctgatgaaatgagtcttctccgaggtacaagagaaggacccattactgaggattttttcaaggcactgggaagagtaaaacagattcataatgatgtcaaagttctcttgcgtacaaatcaacaaacggcaggtttagaaattatggaacagatggccttacttcaagaaacggcttatgaaagactttaccgatgggctcaaagtgaatgcagaacattgacacaagaatcatgtgacgtatctccagtattgacacaggcaatggaagccctgcaggacagacctgtcttatataaatataccttagatgaatttggaacagccagaagaagtacagttgttcgtggatttattgatgcgctcacaagagggggccccggaggtacacctagaccaattgaaatgcattctcatgaccctttgaggtatgtaggagatatgttggcttggctccatcaagctactgcttctgaaaaggaacaccttgaagctctcttaaagcatgtaactacacaaggtgttgaagaaaatattcaagaagttgttgggcatatcactgaaggtgtgtgcaggcctctaaaggttcgaattgagcaagtaatagttgctgaacctggggcagttttattatataaaatttctaatctcctcaaattttatcaccatacaatcagtggtattgttggaaatagtgcaactgcattattgactaccattgaagaaatgcatttgctaagcaaaaaaatattcttcaatagcttgagtcttcatgcaagtaaattaatggacaaggttgaactcccaccacctgatcttggaccaagttctgcactaaatcagacactcatgttgctgcgtgaagttttagcatctcacgattcttcagttgtaccattagatgctcgtcaagctgattttgtgcaggttttatcatgtgtcttggatcctctcctacagatgtgtactgtatcagccagcaatttaggcacagctgacatggccactttcatggtcaattcactatatatgatgaagacaacattagctctatttgaattcactgacagacgtctggaaatgctacagtttcagatcgaagcacatttggacacacttataaatgagcaagcctcttatgttttaactagggtaggcttgagttacatctataacactgtacagcaacataaacctgaacagggctctttagctaatatgcccaacctagattctgtgacactgaaggctgcaatggttcagtttgatcgttatctgtcagccccagacaacctattgataccacagctgaactttcttctaagtgccacagtgaaagagcagatcgtaaaacaatctacagaattagtctgcagagcctatggtgaagtgtatgcagccgtgatgaatccaatcaatgaatacaaagatccagagaacattcttcaccgatcgccgcagcaagtgcagacgcttctttcctgattatcttatttcattgtgttagcaaaatatgacctccctaaaacactgaaggttattttttattctttgaatttttactttataatttgatagttacagttttctttgtatcataagattgtaagtcccgataatttttttttttttggtctcagtaacagggaagtaagtaacatgttgacctgagctagtattgctgtgtatctactctaaatgagatgatctatttttttgctagccatctctccagctctgcagttttcactgtattcaggaagcataaagtagtatgaaaggtttgaagaatttttttttacaagactagttctaaattaacagcttataaaaaatttgtctaaatttaataattagtataaggatatgacctaataaatgtctccttacctaaagattcatttgctttcttttaatatgagtaggcatacttagtagcttttctgaacctagcctatgtctctgtccccaaaatagctgcccttaaagagttgttagcagagagaaaaataacagtgaatgtgctcctggtgtatatggcagtgaatctcctttctgttctactttagcatactatatatatttgactgtgtacattcttatgcaattttaagtatacactcagcaataattagaaaaaaaggagagagaaaagtgatttaaacagggtggattccactctgtgggagccttcgatggaactcaaggtggagctcagcctttccaatgagctctaagcatgtagatagcctgagctgtgtctaagcctggtgtttaaagatgggtatttgtcatacaatatgggtcctaaatccaaccaactacacattttatctggtgttcaaaccaaagaaacaatgatctactcaaacattggagaaaaaaactgccagaggaggagttgccaattggcagtgtgtcttatctccatgttgtaactggactctgactttagaccattacctattaggaagattaaaaatgactgtatttttaaaggaataaatcccagtgtgcctgatttgacattcttgtcagcaaaaaaaacttaatttctagtaaatctataaaaatgggtaagtccctaaattacaaatgagaaaattgaagcacaaggaaaaaaataactagtttgaaatattttgaaaagtaataacataaaactagtatttgtagaagattatgtgttgtatataacaaattagtatttatagaatatgacctatttatctgaagtttataattgtttatacctaatacagttctttttggagtaagaatgattatataatcgttatccatttgggtataaatctgtatttttagttttttccctttgattagtatgtgttacatataaagacagaaaataaagtataaatcaagagctt

SEQ ID NO: 429142 - DNA, 3527 bp, Homo sapiens
cgcaatactcgcgctgcctccgtggtccctgcctggctgaggtggcagcagggggcgggacgcgcagcgctatggcagagggcagcggggaagtggtcgcagtgtctgcgaccggggctgccaacggcctcaacaatggggcaggcgggacctcggcgacgacctgcaacccgctgtcgcgcaagctgcataagatcctggagacgcggctggacaacgacaaggagatgttagaagctctcaaggcactttcaaccttttttgttgaaaatagtctgcggactcgaagaaatttacgtggagatattgaacgtaaaagtttagccatcaatgaagaatttgtaagcattttcaaggaagtgaaggaggaacttgaaagcataagcgaagatgttcaagcaatgagcaactgttgtcaagatatgacaagtcgcctacaggcagcaaaggaacagactcaagatttaatagtaaaaaccactaagcttcaatctgaaagccaaaaattagagataagagctcaagttgcagatgccttcttatccaagttccaactgacttctgatgaaatgagtcttctccgaggtacaagagaaggacccattactgaggattttttcaaggcactgggaagagtaaaacagattcataatgatgtcaaagttctcttgcgtacaaatcaacaaacggcaggtttagaaattatggaacagatggccttacttcaagaaacggcttatgaaagactttaccgatgggctcaaagtgaatgcagaacattgacacaagaatcatgtgacgtatctccagtattgacacaggcaatggaagccctgcaggacagacctgtcttatataaatataccttagatgaatttggaacagccagaagaagtacagttgttcgtggatttattgatgcgctcacaagagggggccccggaggtacacctagaccaattgaaatgcattctcatgaccctttgaggtatagtaatcagacagcagaagaggagttgatgtttttccaaaggaaatcttcattaacatttagttttcattaggtatgtaggagatatgttggcttggctccatcaagctactgcttctgaaaaggaacaccttgaagctctcttaaagcatgtaactacacaaggtgttgaagaaaatattcaagaagttgttgggcatatcactgaaggtgtgtgcaggcctctaaaggttcgaattgagcaagtaatagttgctgaacctggggcagttttattatataaaatttctaatctcctcaaattttatcaccatacaatcagtggtattgttggaaatagtgcaactgcattattgactaccattgaagaaatgcatttgctaagcaaaaaaatattcttcaatagcttgagtcttcatgcaagtaaattaatggacaaggttgaactcccaccacctgatcttggaccaagttctgcactaaatcagacactcatgttgctgcgtgaagttttagcatctcacgattcttcagttgtaccattagatgctcgtcaagctgattttgtgcaggttttatcatgtgtcttggatcctctcctacagatgtgtactgtatcagccagcaatttaggcacagctgacatggccactttcatggtcaattcactatatatgatgaagacaacattagctctatttgaattcactgacagacgtctggaaatgctacagtttcagatcgaagcacatttggacacacttataaatgagcaagcctcttatgttttaactagggtaggcttgagttacatctataacactgtacagcaacataaacctgaacagggctctttagctaatatgcccaacctagattctgtgacactgaaggctgcaatggttcagtttgatcgttatctgtcagccccagacaacctattgataccacagctgaactttcttctaagtgccacagtgaaagagcagatcgtaaaacaatctacagaattagtctgcagagcctatggtgaagtgtatgcagccgtgatgaatccaatcaatgaatacaaagatccagagaacattcttcaccgatcgccgcagcaagtgcagacgcttctttcctgattatcttatttcattgtgttagcaaaatatgacctccctaaaacactgaaggttattttttattctttgaatttttactttataatttgatagttacagttttctttgtatcataagattgtaagtcccgataatttttttttttttggtctcagtaacagggaagtaagtaacatgttgacctgagctagtattgctgtgtatctactctaaatgagatgatctatttttttgctagccatctctccagctctgcagttttcactgtattcaggaagcataaagtagtatgaaaggtttgaagaatttttttttacaagactagttctaaattaacagcttataaaaaatttgtctaaatttaataattagtataaggatatgacctaataaatgtctccttacctaaagattcatttgctttcttttaatatgagtaggcatacttagtagcttttctgaacctagcctatgtctctgtccccaaaatagctgcccttaaagagttgttagcagagagaaaaataacagtgaatgtgctcctggtgtatatggcagtgaatctcctttctgttctactttagcatactatatatatttgactgtgtacattcttatgcaattttaagtatacactcagcaataattagaaaaaaaggagagagaaaagtgatttaaacagggtggattccactctgtgggagccttcgatggaactcaaggtggagctcagcctttccaatgagctctaagcatgtagatagcctgagctgtgtctaagcctggtgtttaaagatgggtatttgtcatacaatatgggtcctaaatccaaccaactacacattttatctggtgttcaaaccaaagaaacaatgatctactcaaacattggagaaaaaaactgccagaggaggagttgccaattggcagtgtgtcttatctccatgttgtaactggactctgactttagaccattacctattaggaagattaaaaatgactgtatttttaaaggaataaatcccagtgtgcctgatttgacattcttgtcagcaaaaaaaacttaatttctagtaaatctataaaaatgggtaagtccctaaattacaaatgagaaaattgaagcacaaggaaaaaaataactagtttgaaatattttgaaaagtaataacataaaactagtatttgtagaagattatgtgttgtatataacaaattagtatttatagaatatgacctatttatctgaagtttataattgtttatacctaatacagttctttttggagtaagaatgattatataatcgttatccatttgggtataaatctgtatttttagttttttccctttgattagtatgtgttacatataaagacagaaaataaagtataaatcaagagctt

SEQ ID NO: 429143 - DNA, 3553 bp, Homo sapiens
  misc_feature (1211)..(1212): n is a, c, g, or t
  misc_feature (1307)..(1309): n is a, c, g, or t
  misc_feature (1347)..(1348): n is a, c, g, or t
  misc_feature (1412)..(1412): n is a, c, g, or t
  misc_feature (1422)..(1422): n is a, c, g, or t
  misc_feature (1425)..(1425): n is a, c, g, or t
  misc_feature (1427)..(1427): n is a, c, g, or t
cgcaatactcgcgctgcctccgtggtccctgcctggctgaggtggcagcagggggcgggacgcgcagcgctatggcagagggcagcggggaagtggtcgcagtgtctgcgaccggggctgccaacggcctcaacaatggggcaggcgggacctcggcgacgacctgcaacccgctgtcgcgcaagctgcataagatcctggagacgcggctggacaacgacaaggagatgttagaagctctcaaggcactttcaaccttttttgttgaaaatagtctgcggactcgaagaaatttacgtggagatattgaacgtaaaagtttagccatcaatgaagaatttgtaagcattttcaaggaagtgaaggaggaacttgaaagcataagcgaagatgttcaagcaatgagcaactgttgtcaagatatgacaagtcgcctacaggcagcaaaggaacagactcaagatttaatagtaaaaaccactaagcttcaatctgaaagccaaaaattagagataagagctcaagttgcagatgccttcttatccaagttccaactgacttctgatgaaatgagtcttctccgaggtacaagagaaggacccattactgaggattttttcaaggcactgggaagagtaaaacagattcataatgatgtcaaagttctcttgcgtacaaatcaacaaacggcaggtttagaaattatggaacagatggccttacttcaagaaacggcttatgaaagactttaccgatgggctcaaagtgaatgcagaacattgacacaagaatcatgtgacgtatctccagtattgacacaggcaatggaagccctgcaggacagacctgtcttatataaatataccttagatgaatttggaacagccagaagaagtacagttgttcgtggatttattgatgcgctcacaagagggggccccggaggtacacctagaccaattgaaatgcattctcatgaccctttgaggtatgtaggagatatgttggcttggctccatcaagctactgcttctgaaaaggaacaccttgaagctctcttaaagcatgtaactacacaaggtgttgaagaaaatattcaagaagttgttgggcatatcactgcaacgcgctgttgctagcaagaggcccttcttaaacagggggttcggaaacttcgacgccaaagcttaagtacgcttggctttgaaccnnctggggccaagttttacttatactaaacatttctagatctcctcaaattttatcaccatacaatcagtggtattgttggacacatacgtgcaacnnntgcattcacttgagctgaccattgcacagacaatggcnnatttggctttaagccacaacataacactaatctcttgtcaagttaggcgtctgcaagcttcttntccaattggncanangcttacagactctcaactggggaaacaagggttgaactcccaccacctgatcttggaccaagttctgcactaaatcagacactcatgttgctgcgtgaagttttagcatctcacgattcttcagttgtaccattagatgctcgtcaagctgattttgtgcaggttttatcatgtgtcttggatcctctcctacagatgtgtactgtatcagccagcaatttaggcacagctgacatggccactttcatggtcaattcactatatatgatgaagacaacattagctctatttgaattcactgacagacgtctggaaatgctacagtttcagatcgaagcacatttggacacacttataaatgagcaagcctcttatgttttaactagggtaggcttgagttacatctataacactgtacagcaacataaacctgaacagggctctttagctaatatgcccaacctagattctgtgacactgaaggctgcaatggttcagtttgatcgttatctgtcagccccagacaacctattgataccacagctgaactttcttctaagtgccacagtgaaagagcagatcgtaaaacaatctacagaattagtctgcagagcctatggtgaagtgtatgcagccgtgatgaatccaatcaatgaatacaaagatccagagaacattcttcaccgatcgccgcagcaagtgcagacgcttctttcctgattatcttatttcattgtgttagcaaaatatgacctccctaaaacactgaaggttattttttattctttgaatttttactttataatttgatagttacagttttctttgtatcataagattgtaagtcccgataatttttttttttttggtctcagtaacagggaagtaagtaacatgttgacctgagctagtattgctgtgtatctactctaaatgagatgatctatttttttgctagccatctctccagctctgcagttttcactgtattcaggaagcataaagtagtatgaaaggtttgaagaatttttttttacaagactagttctaaattaacagcttataaaaaatttgtctaaatttaataattagtataaggatatgacctaataaatgtctccttacctaaagattcatttgctttcttttaatatgagtaggcatacttagtagcttttctgaacctagcctatgtctctgtccccaaaatagctgcccttaaagagttgttagcagagagaaaaataacagtgaatgtgctcctggtgtatatggcagtgaatctcctttctgttctactttagcatactatatatatttgactgtgtacattcttatgcaattttaagtatacactcagcaataattagaaaaaaaggagagagaaaagtgatttaaacagggtggattccactctgtgggagccttcgatggaactcaaggtggagctcagcctttccaatgagctctaagcatgtagatagcctgagctgtgtctaagcctggtgtttaaagatgggtatttgtcatacaatatgggtcctaaatccaaccaactacacattttatctggtgttcaaaccaaagaaacaatgatctactcaaacattggagaaaaaaactgccagaggaggagttgccaattggcagtgtgtcttatctccatgttgtaactggactctgactttagaccattacctattaggaagattaaaaatgactgtatttttaaaggaataaatcccagtgtgcctgatttgacattcttgtcagcaaaaaaaacttaatttctagtaaatctataaaaatgggtaagtccctaaattacaaatgagaaaattgaagcacaaggaaaaaaataactagtttgaaatattttgaaaagtaataacataaaactagtatttgtagaagattatgtgttgtatataacaaattagtatttatagaatatgacctatttatctgaagtttataattgtttatacctaatacagttctttttggagtaagaatgattatataatcgttatccatttgggtataaatctgtatttttagttttttccctttgattagtatgtgttacatataaagacagaaaataaagtataaatcaagagctt

SEQ ID NO: 429144 - DNA, 3751 bp, Homo sapiens
cgcaatactcgcgctgcctccgtggtccctgcctggctgaggtggcagcagggggcgggacgcgcagcgctatggcagagggcagcggggaagtggtcgcagtgtctgcgaccggggctgccaacggcctcaacaatggggcaggcgggacctcggcgacgacctgcaacccgctgtcgcgcaagctgcataagatcctggagacgcggctggacaacgacaaggagatgttagaagctctcaaggcactttcaaccttttttgttgaaaatagtctgcggactcgaagaaatttacgtggagatattgaacgtgaacttgaaagcataagcgaagatgttcaagcaatgagcaactgttgtcaagatatgacaagtcgcctacaggcagcaaaggaacagactcaagatttaatagtaaaaaccactaagcttcaatctgaaagccaaaaattagagataagagctcaagttgcagatgccttcttatccaagttccaactgacttctgatgaaatgagtcttctccgaggtacaagagaaggacccattactgaggattttttcaaggcactgggaagagtaaaacagattcataatgatgtcaaagttctcttgcgtacaaatcaacaaacggcagggtgagtaactgctcactgaactaattgcattgctgcttatgtttccaaaattttaaagatattctagattgtttgtgaactatatagcattttgtgaaatagaagtttaatctttatttatctttagagaatggtgaagttatactctgacaggtttaggctaaaacagcagttgataaataagtgatggttaaaatgtgacatttatttaattgtagaaaattattgaaaaatcatcccataaaatgataaaaagttaatatgctgtaatatgtaatatgcaaacaaaataattaggtgcttagatgtatctgttgactaaagtttaaattataatcattaatttttttttagtttagaaattatggaacagatggccttacttcaagaaacggcttatgaaagactttaccgatgggctcaaagtgaatgcagaacattgacacaagaatcatgtgacgtatctccagtattgacacaggcaatggaagccctgcaggacagacctgtcttatataaatataccttagatgaatttggaacagccagaagaagtacagttgttcgtggatttattgatgcgctcacaagagggggccccggaggtacacctagaccaattgaaatgcattctcatgaccctttgaggtatgtaggagatatgttggcttggctccatcaagctactgcttctgaaaaggaacaccttgaagctctcttaaagcatgtaactacacaaggtgttgaagaaaatattcaagaagttgttgggcatatcactgaaggtgtgtgcaggcctctaaaggttcgaattgagcaagtaatagttgctgaacctggggcagttttattatataaaatttctaatctcctcaaattttatcaccatacaatcagtggtattgttggaaatagtgcaactgcattattgactaccattgaagaaatgcatttgctaagcaaaaaaatattcttcaatagcttgagtcttcatgcaagtaaattaatggacaaggttgaactcccaccacctgatcttggaccaagttctgcactaaatcagacactcatgttgctgcgtgaagttttagcatctcacgattcttcagttgtaccattagatgctcgtcaagctgattttgtgcaggttttatcatgtgtcttggatcctctcctacagatgtgtactgtatcagccagcaatttaggcacagctgacatggccactttcatggtcaattcactatatatgatgaagacaacattagctctatttgaattcactgacagacgtctggaaatgctacagtttcagatcgaagcacatttggacacacttataaatgagcaagcctcttatgttttaactagggtaggcttgagttacatctataacactgtacagcaacataaacctgaacagggctctttagctaatatgcccaacctagattctgtgacactgaaggctgcaatggttcagtttgatcgttatctgtcagccccagacaacctattgataccacagctgaactttcttctaagtgccacagtgaaagagcagatcgtaaaacaatctacagaattagtctgcagagcctatggtgaagtgtatgcagccgtgatgaatccaatcaatgaatacaaagatccagagaacattcttcaccgatcgccgcagcaagtgcagacgcttctttcctgattatcttatttcattgtgttagcaaaatatgacctccctaaaacactgaaggttattttttattctttgaatttttactttataatttgatagttacagttttctttgtatcataagattgtaagtcccgataatttttttttttttggtctcagtaacagggaagtaagtaacatgttgacctgagctagtattgctgtgtatctactctaaatgagatgatctatttttttgctagccatctctccagctctgcagttttcactgtattcaggaagcataaagtagtatgaaaggtttgaagaatttttttttacaagactagttctaaattaacagcttataaaaaatttgtctaaatttaataattagtataaggatatgacctaataaatgtctccttacctaaagattcatttgctttcttttaatatgagtaggcatacttagtagcttttctgaacctagcctatgtctctgtccccaaaatagctgcccttaaagagttgttagcagagagaaaaataacagtgaatgtgctcctggtgtatatggcagtgaatctcctttctgttctactttagcatactatatatatttgactgtgtacattcttatgcaattttaagtatacactcagcaataattagaaaaaaaggagagagaaaagtgatttaaacagggtggattccactctgtgggagccttcgatggaactcaaggtggagctcagcctttccaatgagctctaagcatgtagatagcctgagctgtgtctaagcctggtgtttaaagatgggtatttgtcatacaatatgggtcctaaatccaaccaactacacattttatctggtgttcaaaccaaagaaacaatgatctactcaaacattggagaaaaaaactgccagaggaggagttgccaattggcagtgtgtcttatctccatgttgtaactggactctgactttagaccattacctattaggaagattaaaaatgactgtatttttaaaggaataaatcccagtgtgcctgatttgacattcttgtcagcaaaaaaaacttaatttctagtaaatctataaaaatgggtaagtccctaaattacaaatgagaaaattgaagcacaaggaaaaaaataactagtttgaaatattttgaaaagtaataacataaaactagtatttgtagaagattatgtgttgtatataacaaattagtatttatagaatatgacctatttatctgaagtttataattgtttatacctaatacagttctttttggagtaagaatgattatataatcgttatccatttgggtataaatctgtatttttagttttttccctttgattagtatgtgttacatataaagacagaaaataaagtataaatcaagagctt

SEQ ID NO: 429145 - DNA, 3589 bp, Homo sapiens
cgcaatactcgcgctgcctccgtggtccctgcctggctgaggtggcagcagggggcgggacgcgcagcgctatggcagagggcagcggggaagtggtcgcagtgtctgcgaccggggctgccaacggcctcaacaatggggcaggcgggacctcggcgacgacctgcaacccgctgtcgcgcaagctgcataagatcctggagacgcggctggacaacgacaaggagatgttagaagctctcaaggcactttcaaccttttttgttgaaaatagtctgcggactcgaagaaatttacgtggagatattgaacgtaaaagtttagccatcaatgaagaatttgtaagcattttcaaggaagtgaaggaggaacttgaaagcataagcgaagatgttcaagcaatgagcaactgttgtcaagatatgacaagtcgcctacaggcagcaaaggaacagactcaagatttaatagtaaaaaccactaagcttcaatctgaaagccaaaaattagagataagagctcaagttgcagatgccttcttatccaagttccaactgacttctgatgaaatgagtcttctccgaggtacaagagaaggacccattactgaggattttttcaaggcactgggaagagtaaaacagattcataatgatgtcaaagttctcttgcgtacaaatcaacaaacggcaggtttagaaattatggaacagatggccttacttcaagaaacggcttatgaaagactttaccgatgggctcaaagtgaatgcagaacattgacacaagaatcatgtgacgtatctccagtattgacacaggcaatggaagccctgcaggacagacctgtcttatataaatataccttagatgaatttggaacagccagaagaagtacagttgttcgtggatttattgatgcgctcacaagagggggccccggaggtacacctagaccaattgaaatgcattctcatgaccctttgaggtatgtaggagatatgttggcttggctccatcaagctactgcttctgaaaaggaacaccttgaagctctcttaaagcatgtaactacacaaggtgttgaagaaaatattcaagaagttgttgggcatatcactgaaggtgtgtgcaggcctctaaaggttcgaattgagcaagtaatagttgctgaacctggggcagttttattatataaaatttctaatctcctcaaattttatcaccatacaatcagtggtattgttggaaatagtgcaactgcattattgactaccattgaagaaatgcatttgctaagcaaaaaaatattcttcaatagcttgagtcttcatgcaagtaaattaatggacaaggttgaactcccaccacctgatcttggaccaagttctgcactaaatcagacactcatgttgctgcgtgaagttttagcatctcacgattcttcagttgtaccattagatgctcgtcaagctgattttgtgcaggttttatcatgtgtcttggatcctctcctacagatgtgtactgtatcagccagcaatttaggcacagctgacatggccactttcatggtcaattcactatatatgatgaagacaacattagctctatttgaattcactgacagacgtctggaaatgctacagtttcagatcgaagcacatttggacacacttataaatgagcaagcctcttatgttttaactagggtaggcttgagttacatctataacactgtacagcaacataaacctgaacagggctctttagctaatatgcccaacctagattctgtgacactgaaggctgcaatggttcagtttgatcgttatctgtcagccccagacaacctattgataccacagctgaactttcttctaagtgccacagtgaaagagcagatcgtaaaacaatctacagaattagtctgcagagcctatggtgaagtgtatgcagccgtgatgaatccaatcaatgaatacaaagatccagagaacattcttcaccgatcgccgcagcaagtgcagacgcttctttcctgattatcttatttcattgtgttagcaaaatatgacctccctaaaacactgaaggttattttttattctttgaatttttactttataatttgatagttacagttttctttgtatcataagattgtaagtcccgataatttttttttttttggtctcagtaacagggaagtaagtaacatgttgacctgagctagtattgctgtgtatctactctaaatgagatgatctatttttttgctagccatctctccagctctgcagttttcactgtattcaggaagcataaagtagtatgaaaggtttgaagaatttttttttacaagactagttctaaattaacagcttataaaaaatttgtctaaatttaataattagtataaggatatgacctaataaatgtctccttacctaaagattcatttgctttcttttaatatgagtaggcatacttagtagcttttctgaacctagcctatgtctctgtccccaaaatagctgcccttaaagagttgttagcagagagaaaaataacagtgaatgtgctcctggtgtatatggcagtgaatctcctttctgttctactttagcatactatatatatttgactgtgtacattcttatgcaattttaagtatacactcagcaataattagaaaaaaaggagagagaaaagtgatttaaacagggtggattccactctgtgggagccttcgatggaactcaaggtggagctcagcctttccaatgagctctaagcatgtagatagcctgagctgtgtctaagcctggtgtttaaagatgggtatttgtcatacaatatgggtcctaaatccaaccaactacacattttatctggtgttcaaaccaaagaaacaatgatctactcaaacattggagaaaaaaactgccagaggaggagttgccaattggcagtgtgtcttatctccatgttgtaactggactctgactttagaccattacctattaggaagattaaaaatgactgtatttttaaaggaataaatcccagtgtgcctgatttgacattcttgtcagcaaaaaaaacttaatttctagtaaatctataaaaatgggtaagtccctaaattacaaatgagaaaattgaagcacaaggaaaaaaataactagtttgaaatattttgaaaagtaataacataaaactagtatttgtagaagattatgtgttgtatataacaaattagtatttatagaatatgacctatttatctgaagtttataattgtttatacctaatacagttctttttggagtaagaatgattatataatcgttatccatttgggtataaatctgtatttttagttttttccctttgattagtatgtgttacatataaagacagaaaataaagtataaatcaagagcttaaattgtatataatttatttctacagagaaagaagattgataccttgctatgagtgaattcctttgttttatagggaaaatttattgtgctttttacctggttttttcaaataaaatattaaaatatttctaaaaaca

SEQ ID NO: 429146 - DNA, 1424 bp, Homo sapiens
cgcaatactcgcgctgcctccgtggtccctgcctggctgaggtggcagcagggggcgggacgcgcagcgctatggcagagggcagcggggaagtggtcgcagtgtctgcgaccggggctgccaacggcctcaacaatggggcaggcgggacctcggcgacgacctgcaacccgctgtcgcgcaagctgcataagatcctggagacgcggctggacaacgacaaggagatgttagaagctctcaaggcactttcaaccttttttgttgaaaatagtctgcggactcgaagaaatttacgtggagatattgaacgtaaaagtttagccatcaatgaagaatttgtaagcattttcaaggaagtgaaggaggaacttgaaagcataagcgaagatgttcaagcaatgagcaactgttgtcaagatatgacaagtcgcctacaggcagcaaaggaacagactcaagatttaatagtaaaaaccactaagcttcaatctgaaagccaaaaattagagataagagctcaagttgcagatgccttcttatccaagttccaactgacttctgatgaaatgagtcttctccgaggtacaagagaaggacccattactgaggattttttcaaggcactgggaagagtaaaacagattcataatgatgtcaaagttctcttgcgtacaaatcaacaaacggcagggtgagtaactgctcactgaactaattgcattgctgcttatgtttccaaaattttaaagatattctagattgtttgtgaactatatagcattttgtgaaatagaagtttaatctttatttatctttagagaatggtgaagttatactctgacaggtttaggctaaaacagcagttgataaataagtgatggttaaaatgtgacatttatttaattgtagaaaattattgaaaaatcatcccataaaatgataaaaagttaatatgctgtaatatgtaatatgcaaacaaaataattaggtgcttagatgtatctgttgactaaagtttaaattataatcattaatttttttttagtttagaaattatggaacagatggccttacttcaagaaacggcttatgaaagactttaccgatgggctcaaagtgaatgcagaacattgacacaagaatcatgtgacgtatctccagtattgacacaggcaatggaagccctgcaggacagacctgtcttatataagttggtgactttttcttaattaaaaatgaaagcctacttttcttttgatatcttactttaaattttagtattatcaaaagcgtatataatagtttgagtaatatttataataatttacaacaatactgttcaccttaacttgaatttgtttcatggggtatcagcttatttgaattttacatactatagaatacaatatggaaagagaaac

SEQ ID NO: 429147 - DNA, 465 bp, Homo sapiens
atagagatagggttttatatatcacaaatatctgttctgacccacggttttgctaaaagagattgtgaaatattgaaaacatagtagtttgtttttattttttcatcacctaactcaaaagaaaaacaaaaatcctgatttttaaaatatgaaactagagtatttttaattcacaggttatattttacataaaaacttttatttaaatctagatccttttaaagcattctactcagttaaggaactgttttgtttcagtttctgttttgcaacctgaaatattctttgcttttagtggtattgttggaaatagtgcaactgcattattgactaccattgaagaaatgcatttgctaagcaaaaaaatattcttcaatagcttgagtcttcatgcaagtaaattaatggacaaggtatgtttgaaaaatgtaattattaaattatgtgaatgtttcacattaaaaa

SEQ ID NO: 429148 - DNA, 3397 bp, Homo sapiens
cgcaatactcgcgctgcctccgtggtccctgcctggctgaggtggcagcagggggcgggacgcgcagcgctatggcagagggcagcggggaagtggtcgcagtgtctgcgaccggggctgccaacggcctcaacaatggggcaggcgggacctcggcgacgacctgcaacccgctgtcgcgcaagctgcataagatcctggagacgcggctggacaacgacaaggagatgttagaagctctcaaggcactttcaaccttttttgttgaaaatagtctgcggactcgaagaaatttacgtggagatattgaacgtaaaagtttagccatcaatgaagaatttgtaagcattttcaaggaagtgaaggaggaacttgaaagcataagcgaagatgttcaagcaatgagcaactgttgtcaagatatgacaagtcgcctacaggcagcaaaggaacagactcaagatttaatagtaaaaaccactaagcttcaatctgaaagccaaaaattagagataagagctcaagttgcagatgccttcttatccaagttccaactgacttctgatgaaatgagtcttctccgaggtacaagagaaggacccattactgaggattttttcaaggcactgggaagagtaaaacagattcataatgatgtcaaagttctcttgcgtacaaatcaacaaacggcaggtttagaaattatggaacagatggccttacttcaagaaacggcttatgaaagactttaccgatgggctcaaagtgaatgcagaacattgacacaagaatcatgtgacgtatctccagtattgacacaggcaatggaagccctgcaggacagacctgtcttatataaatataccttagatgaatttggaacagccagaagaagtacagttgttcgtggatttattgatgcgctcacaagagggggccccggaggtacacctagaccaattgaaatgcattctcatgaccctttgaggtatgtaggagatatgttggcttggctccatcaagctactgcttctgaaaaggaacaccttgaagctctcttaaagcatgtaactacacaaggtgttgaagaaaatattcaagaagttgttgggcatatcactgaaggtgtgtgcaggcctctaaaggttcgaattgagcaagtaatagttgctgaacctggggcagttttattatataaaatttctaatctcctcaaattttatcaccatacaatcagtggtattgttggaaatagtgcaactgcattattgactaccattgaagaaatgcatttgctaagcaaaaaaatattcttcaatagcttgagtcttcatgcaagtaaattaatggacaaggttgaactcccaccacctgatcttggaccaagttctgcactaaatcagacactcatgttgctgcgtgaagttttagcatctcacgattcttcagttgtaccattagatgctcgtcaagctgattttgtgcaggttttatcatgtgtcttggatcctctcctacagatgtgtactgtatcagccagcaatttaggcacagctgacatggccactttcatggtcaattcactatatatgatgaagacaacattagctctatttgaattcactgacagacgtctggaaatgctacagtttcagatcgaagcacatttggacacacttataaatgagcaagcctcttatgttttaactagggtaggcttgagttacatctataacactgtacagcaacataaacctgaacagggctctttagctaatatgcccaacctagattctgtgacactgaaggctgcaatggttcagtttgatcgttatctgtcagccccagacaacctattgataccacagctgaactttcttctaagtgccacagtgaaagagcagatcgtaaaacaatctacagaattagtctgcagagcctatggtgaagtgtatgcagccgtgatgaatccaatcaatgaatacaaagatccagagaacattcttcaccgatcgccgcagcaagtgcagacgcttctttcctgattatcttatttcattgtgttagcaaaatatgacctccctttacagttttctttgtatcataagattgtaagtcccgataatttttttttttttggtctcagtaacagggaagtaagtaacatgttgacctgagctagtattgctgtgtatctactctaaatgagatgatctatttttttgctagccatctctccagctctgcagttttcactgtattcaggaagcataaagtagtatgaaaggtttgaagaatttttttttacaagactagttctaaattaacagcttataaaaaatttgtctaaatttaataattagtataaggatatgacctaataaatgtctccttacctaaagattcatttgctttcttttaatatgagtaggcatacttagtagcttttctgaacctagcctatgtctctgtccccaaaatagctgcccttaaagagttgttagcagagagaaaaataacagtgaatgtgctcctggtgtatatggcagtgaatctcctttctgttctactttagcatactatatatatttgactgtgtacattcttatgcaattttaagtatacactcagcaataattagaaaaaaaggagagagaaaagtgatttaaacagggtggattccactctgtgggagccttcgatggaactcaaggtggagctcagcctttccaatgagctctaagcatgtagatagcctgagctgtgtctaagcctggtgtttaaagatgggtatttgtcatacaatatgggtcctaaatccaaccaactacacattttatctggtgttcaaaccaaagaaacaatgatctactcaaacattggagaaaaaaactgccagaggaggagttgccaattggcagtgtgtcttatctccatgttgtaactggactctgactttagaccattacctattaggaagattaaaaatgactgtatttttaaaggaataaatcccagtgtgcctgatttgacattcttgtcagcaaaaaaaacttaatttctagtaaatctataaaaatgggtaagtccctaaattacaaatgagaaaattgaagcacaaggaaaaaaataactagtttgaaatattttgaaaagtaataacataaaactagtatttgtagaagattatgtgttgtatataacaaattagtatttatagaatatgacctatttatctgaagtttataattgtttatacctaatacagttctttttggagtaagaatgattatataatcgttatccatttgggtataaatctgtatttttagttttttccctttgattagtatgtgttacatataaagacagaaaataaagtataaatcaagagctt

SEQ ID NO: 429149 - DNA, 2452 bp, Homo sapiens
cgcaatactcgcgctgcctccgtggtccctgcctggctgaggtggcagcagggggcgggacgcgcagcgctatggcagagggcagcggggaagtggtcgcagtgtctgcgaccggggctgccaacggcctcaacaatggggcaggcgggacctcggcgacgacctgcaacccgctgtcgcgcaagctgcataagatcctggagacgcggctggacaacgacaaggagatgttagaagctctcaaggcactttcaaccttttttgttgaaaatagtctgcggactcgaagaaatttacgtggagatattgaacgtaaaagtttagccatcaatgaagaatttgtaagcattttcaaggaagtgaaggaggaacttgaaagcataagcgaagatgttcaagcaatgagcaactgttgtcaagatatgacaagtcgcctacaggcagcaaaggaacagactcaagatttaatagtaaaaaccactaagcttcaatctgaaagccaaaaattagagataagagctcaagttgcagatgccttcttatccaagttccaactgacttctgatgaaatgagtcttctccgaggtacaagagaaggacccattactgaggattttttcaaggcactgggaagagtaaaacagattcataatgatgtcaaagttctcttgcgtacaaatcaacaaacggcaggtttagaaattatggaacagatggccttacttcaagaaacggcttatgaaagactttaccgatgggctcaaagtgaatgcagaacattgacacaagaatcatgtgacgtatctccagtattgacacaggcaatggaagccctgcaggacagacctgtcttatataaatataccttagatgaatttggaacagccagaagaagtacagttgttcgtggatttattgatgcgctcacaagagggggccccggaggtacacctagaccaattgaaatgcattctcatgaccctttgaggtatgtaggagatatgttggcttggctccatcaagctactgcttctgaaaaggaacaccttgaagctctcttaaagcatgtaactacacaaggtgttgaagaaaatattcaagaagttgttgggcatatcactgaaggtgtgtgcaggcctctaaaggttcgaattgagcaagtaatagttgctgaacctggggcagttttattatataaaatttctaatctcctcaaattttatcaccatacaatcagtggtattgttggaaatagtgcaactgcattattgactaccattgaagaaatgcatttgctaagcaaaaaaatattcttcaatagcttgagtcttcatgcaagtaaattaatggacaaggttgaactcccaccacctgatcttggaccaagttctgcactaaatcagacactcatgttgctgcgtgaagttttagcatctcacgattcttcagttgtaccattagatgctcgtcaagctgattttgtgcaggttttatcatgtgtcttggatcctctcctacagatgtgtactgtatcagccagcaatttaggcacagctgacatggccactttcatggtcaattcactatatatgatgaagacaacattagctctatttgaattcactgacagacgtctggaaatgctacagtttcagatcgaagcacatttggacacacttataaatgagcaagcctcttatgttttaactagggtaggcttgagttacatctataacactgtacagcaacataaacctgaacagggctctttagctaatatgcccaacctagattctgtgacactgaaggctgcaatggttcagtttgatcgttatctgtcagccccagacaacctattgataccacagctgaactttcttctaagtgccacagtgaaagagcagatcgtaaaacaatctacagaattagtctgcagagcctatggtgaagtgtatgcagccgtgatgaatccaatcaatgaatacaaagatccagagaacattcttcaccgatcgccgcagcaagtgcagacgcttctttcctgattatcttatttcattgtgttagcaaaatatgacctccctaaaacactgaaggttattttttattctttgaatttttactttataatttgatagttacagttttctttgtatcataagattgtaagtcccgataatttttttttttttggtctcagtaacagggaagtaagtaacatgttgacctgagctagtattgctgtgtatctactctaaatgagatgatctatttttttgctagccatctctccagctctgcagttttcactgtattcaggaagcataaagtagtatgaaaggtttgaagaatttttttttacaagactagttctaaattaacagcttataaaaaatttgtctaaatttaataattagtataaggatatgacctaataaatgtctccttacct

SEQ ID NO: 429150 - DNA, 898 bp, Homo sapiens
tcggggaggaggtggctccagagatggcagtgagcgagaggagggggctcggccgcgggagccccgcggagtgggggcagcggctacttctggtgctgctgttgggtggctgctccgggcgcatccaccggctggcgctgacgggggagaagcgagcggacatccagctgaacagcttcggtttctacaccaatggctctctggaggtggagttgagcgtcctgcggctgggcctccgggaggcagaagagaagtccctgctggtggggttcagtctcagccgggttcggtctggcagagttcgctcctattcaacccgggatttccaggactgccctctccagaaaaacagtagcagtttcctggtcctgttcctcatcaacaccaaggatctgcaggtccaggtgcggaagtatggagagcagaagacgttgtttatctttcccgggctcctcccggaagcaccctccaaaccagggctcccgaagccacaggccacagtcccccgcaaggtggatggcggagggacctctgcagccagcaagcccaagtcaacacccgcagtgattcagggtcctagtgggaaggacaaggacctggtgttgggcctgagccacctcaacaactcctacaacttcagtttccacgtggtgatcggctctcaggcggaagaaggccagtacagcctgaacttccacaactgcaacaattcagtgccaggaaaggagcatccattcgacatcacggtgatgatccgggagaagaacccgagggttccgttggcggggagatgcctttaaagcccaaaggaagtcccgggcggggcggggcatggggggcccccgcggaacacgacagggtcaaaacaacgcgcaggggagggggccaaagaaatccc

SEQ ID NO: 429151 - DNA, 2056 bp, Homo sapiens
tcggggaggaggtggctccagagatggcagtgagcgagaggagggggctcggccgcgggagccccgcggagtgggggcagcggctacttctggtgctgctgttgggtggctgctccgggcgcatccaccggctggcgctgacgggggagaagcgagcggacatccagctgaacagcttcggtttctacaccaatggctctctggaggtggagttgagcgtcctgcggctgggcctccgggaggcagaagagaagtccctgctggtggggttcagtctcagccgggttcggtctggcagagttcgctcctattcaacccgggatttccaggactgccctctccagaaaaacagtagcagtttcctggtcctgttcctcatcaacaccaaggatctgcaggtccaggtgcggaagtatggagagcagaagacgttgtttatctttcccgggctcctcccggaagcaccctccaaaccagggctcccgaagccacaggccacagtcccccgcaaggtggatggcggagggacctctgcagccagcaagcccaagtcaacacccgcagtgattcagggtcctagtgggaaggacaaggacctggtgttgggcctgagccacctcaacaactcctacaacttcagtttccacgtggtgatcggctctcaggcggaagaaggccagtacagcctgaacttccacaactgcaacaattcagtgccaggaaaggagcatccattcgacatcacggtgatgatccgggagaagaaccccgatggcttcctgtcggcagcggagatgccccttttcaagctctacatggtcatgtccgcctgcttcctggccgctggcatcttctgggtgtccatcctctgcaggaacacgtacagcgtcttcaagatccactggctcatggcggccttggccttcaccaagagcatctctctcctcttccacagcatcaactactacttcatcaacagccagggccaccccatcgaaggccttgccgtcatgtactacatcgcacacctgctgaagggcgccctcctcttcatcaccatcgccctgattggctcaggctgggccttcatcaagtacgtcctgtcggataaggagaagaaggtctttgggatcgtgatccccatgcaggtcctggccaacgtggcctacatcatcatcgagtcccgcgaggaaggcgccagcgactacgtgctgtggaaggagattttgttcctggtggacctcatctgctgtggtgccatcctgttccccgtagtctggtccatccggcatctccaggatgcgtctggcacagacgggaaggtggcagtgaacctggccaagctgaagctgttccggcattactatgtcatggtcatctgctacgtctacttcacccgcatcatcgccatcctgctgcaggtggctgtgccctttcagtggcagtggctgtaccagctcttggtggagggctccaccctggccttcttcgtgctcacgggctacaagttccagcccacagggaacaacccgtacctgcagctgccccaggaggacgaggaggatgttcagatggagcaagtaatgacggactctgggttccgggaaggcctctccaaagtcaacaaaacagccagcgggcgggaactgttatgatcacctccacatctcagaccaaagggtcgtcctcccccagcatttctcactcctgcccttcttccacagcgtatgtggggaggtggagggggtccatgtggaccaggcgcccagctccccgggaccccggttcccggacaagcccatttggaagaagagtcccttcctccccccaaatattgggcagccctgtccttaccccgggaccacccctcccttccagctatgtgtacaataatgaccaatctgtttggcttacgccgttgtcttgcctttttgggggttggggtctacacggaggttgtgtttacaatgtagaaacctgttttcgctgtgtgtggcgggggcgcgggcacagggtccgtgtctttgtatattcaataaatattcattcagtaaaa

SEQ ID NO: 429152 - DNA, 2093 bp, Homo sapiens
  misc_feature (1923)..(1923): n is a, c, g, or t
  misc_feature (1925)..(1925): n is a, c, g, or t
  misc_feature (1928)..(1928): n is a, c, g, or t
  misc_feature (1936)..(1936): n is a, c, g, or t
tcggggaggaggtggctccagagatggcagtgagcgagaggagggggctcggccgcgggagccccgcggagtgggggcagcggctacttctggtgctgctgttgggtggctgctccgggcgcatccaccggctggcgctgacgggggagaagcgagcggacatccagctgaacagcttcggtttctacaccaatggctctctggaggtggagttgagcgtcctgcggctgggcctccgggaggcagaagagaagtccctgctggtggggttcagtctcagccgggttcggtctggcagagttcgctcctattcaacccgggatttccaggactgccctctccagaaaaacagtagcagtttcctggtcctgttcctcatcaacaccaaggatctgcaggtccaggtgcggaagtatggagagcagaagacgttgtttatctttcccgggctcctcccggaagcaccctccaaaccagggctcccgaagccacaggccacagtcccccgcaaggtggatggcggagggacctctgcagccagcaagcccaagtcaacacccgcagtgattcagggtcctagtgggaaggacaaggacctggtgttgggcctgagccacctcaacaactcctacaacttcagtttccacgtggtgatcggctctcaggcggaagaaggccagtacagcctgaacttccacaactgcaacaattcagtgccaggaaaggagcatccattcgacatcacggtgatgatccgggagaagaaccccgatggcttcctgtcggcagcggagatgccccttttcaagctctacatggtcatgtccgcctgcttcctggccgctggcatcttctgggtgtccatcctctgcaggaacacgtacagcgtcttcaagatccactggctcatggcggccttggccttcaccaagagcatctctctcctcttccacagcatcaactactacttcatcaacagccagggccaccccatcgaaggccttgccgtcatgtactacatcgcacacctgctgaagggcgccctcctcttcatcaccatcgccctgattggctcaggctgggccttcatcaagtacgtcctgtcggataaggagaagaaggtctttgggatcgtgatccccatgcaggtcctggccaacgtggcctacatcatcatcgagtcccgcgaggaaggcgccagcgactacgtgctgtggaaggagattttgttcctggtggacctcatctgctgtggtgccatcctgttccccgtagtctggtccatccggcatctccaggatgcgtctggcacagacgggaaggtggcagtgaacctggccaagctgaagctgttccggcattactatgtcatggtcatctgctacgtctacttcacccgcatcatcgccatcctgctgcaggtggctgtgccctttcagtggcagtggctgtaccagctcttggtggagggctccaccctggccttcttcgtgctcacgggctacaagttccagcccacagggaacaacccgtacctgcagctgccccaggaggacgaggaggatgttcagatggagcaagtaatgacggactctgggttccgggaaggcctctccaaagtcaacaaaacagccagcgggcgggaactgttatgatcacctccacatctcagaccaaagggtcgtcctcccccagcatttctcactcctgcccttcttccacagcgtatgtggggaggtggagggggtccatgtggaccaggcgcccagctccccgggaccccggttcccggacaagcccatttggaagaagagtcccttcctccccccaaatattgggcagccctgtccttaccccgggaccacccctcccttccagctatgtgtacaataatgaccaatctgtttggctaaaaaaaaaaananaanacaaaaanaaaacacgcgagagaaacaaactgaggtgtgcgggcaaaccggttctaatggccccggcatctaagtggtaccggacacacgtcttggaaacagggaaatttcgcggcacccataggagtcgaatattgcgaacccaggtacgcggatagagaccaa

SEQ ID NO: 429153 - DNA, 2049 bp, Homo sapiens
  misc_feature (1879)..(1879): n is a, c, g, or t
  misc_feature (1881)..(1881): n is a, c, g, or t
  misc_feature (1884)..(1884): n is a, c, g, or t
  misc_feature (1892)..(1892): n is a, c, g, or t
tcggggaggaggtggctccagagatggcagtgagcgagaggagggggctcggccgcgggagccccgcggagtgggggcagcggctacttctggtgctgctgttgggtggctgctccgggcgcatccaccggctggcgctgacgggggagaagcgagcggacatccagctgaacagcttcggtttctacaccaatggctctctggaggtggagttgagcgtcctgcggctgggcctccgggaggcagaagagaagtccctgctggtggggttcagtctcagccgggttcggtctggcagagttcgctcctattcaacccgggatttccaggactgccctctccagaaaaacagtagcagtttcctggtcctgttcctcatcaacaccaaggatctgcaggtccaggtgcggaagtatggagagcagaagacgttgtttatctttcccgggctcctcccggaagcaccctccaaaccagggctcccgaagccacaggccacagtcccccgcaaggtggatggcggagggacctctgcagccagcaagcccaagtcaacacccgcagtgattcagggtcctagtgggaaggacaaggacctggtgttgggcctgagccacctcaacaactcctacaacttcagtttccacgtggtgatcggctctcaggcggaagaaggccagtacagcctgaacttccacaactgcaacaattcagtgccaggaaaggagcatccattcgacatcacggtgatgatccgggagaagaaccccgatggcttcctgtcggcagcggagatgccccttttcaagctctacatggtcatgtccgcctgcttcctggccgctggcatcttctgggtgtccatcctctgcaggaacacgtacagcgtcttcaagatccactggctcatggcggccttggccttcaccaagagcatctctctcctcttccacagcatcaactactacttcatcaacagccagggccaccccatcgaaggccttgccgtcatgtactacatcgcacacctgctgaagggcgccctcctcttcatcaccatcgccctgattggctcaggctgggccttcatcaagtacgtcctgtcggataaggagaagaaggtctttgggatcgtgatccccatgcaggtcctggccaacgtggcctacatcatcatcgagtcccgcgaggaaggcgccagcgactacgtgctgtggaaggagattttgttcctggtggacctcatctgctgtggtgccatcctgttccccgtagtctgtggcagtgaacctggccaagctgaagctgttccggcattactatgtcatggtcatctgctacgtctacttcacccgcatcatcgccatcctgctgcaggtggctgtgccctttcagtggcagtggctgtaccagctcttggtggagggctccaccctggccttcttcgtgctcacgggctacaagttccagcccacagggaacaacccgtacctgcagctgccccaggaggacgaggaggatgttcagatggagcaagtaatgacggactctgggttccgggaaggcctctccaaagtcaacaaaacagccagcgggcgggaactgttatgatcacctccacatctcagaccaaagggtcgtcctcccccagcatttctcactcctgcccttcttccacagcgtatgtggggaggtggagggggtccatgtggaccaggcgcccagctccccgggaccccggttcccggacaagcccatttggaagaagagtcccttcctccccccaaatattgggcagccctgtccttaccccgggaccacccctcccttccagctatgtgtacaataatgaccaatctgtttggctaaaaaaaaaaananaanacaaaaanaaaacacgcgagagaaacaaactgaggtgtgcgggcaaaccggttctaatggccccggcatctaagtggtaccggacacacgtcttggaaacagggaaatttcgcggcacccataggagtcgaatattgcgaacccaggtacgcggatagagaccaa

SEQ ID NO: 429154 - DNA, 1914 bp, Homo sapiens
tcggggaggaggtggctccagagatggcagtgagcgagaggagggggctcggccgcgggagccccgcggagtgggggcagcggctacttctggtgctgctgttgggtggctgctccgggcgcatccaccggctggcgctgacgggggagaagcgagcggacatccagctgaacagcttcggtttctacaccaatggctctctggaggtggagttgagcgtcctgcggctgggcctccgggaggcagaagagaagtccctgctggtggggttcagtctcagccgggttcggtctggcagagttcgctcctattcaacccgggatttccaggactgccctctccagaaaaacagtagcagtttcctggtcctgttcctcatcaacaccaaggatctgcaggtccaggtgcggaagtatggagagcagaagacgttgtttatctttcccgggctcctcccggaagcaccctccaaaccagggctcccgaagccacaggccacagtcccccgcaaggtggatggcggagggacctctgcagccagcaagcccaagtcaacacccgcagtgattcagggtcctagtgggaaggacaaggacctggtgttgggcctgagccacctcaacaactcctacaacttcagtttccacgtggtgatcggctctcaggcggaagaaggccagtacagcctgaacttccacaactgcaacaattcagtgccaggaaaggagcatccattcgacatcacggtgatgatccgggagaagaaccccgatggcttcctgtcggcagcggagatgccccttttcaagctctacatggtcatgtccgcctgcttcctggccgctggcatcttctgggtgtccatcctctgcaggaacacgtacagcgtcttcaagatccactggctcatggcggccttggccttcaccaagagcatctctctcctcttccacagcatcaactactacttcatcaacagccagggccaccccatcgaaggccttgccgtcatgtactacatcgcacacctgctgaagggcgccctcctcttcatcaccatcgccctgattggctcaggctgggccttcatcaagtacgtcctgtcggataaggagaagaaggtctttgggatcgtgatccccatgcaggtcctggccaacgtggcctacatcatcatcgagtcccgcgaggaaggcgccagcgactacgtgctgtggaaggagattttgttcctggtggacctcatctgctgtggtgccatcctgttccccgtagtctggtccatccggcatctccaggatgcgtctggcacagacgggaaggtggcagtgaacctggccaagctgaagctgttccggcattactatgtcatggtcatctgctacgtctacttcacccgcatcatcgccatcctgctgcaggtggctgtgccctttcagtggcagtggctgtaccagctcttggtggagggctccaccctggccttcttcgtgctcacgggctacaagttccagcccacagggaacaacccgtacctgcagctgccccaggaggacgaggaggatgttcagatggagcaagtcgtatgtggggaggtggagggggtccatgtggaccaggcgcccagctccccgggaccccggttcccggacaagcccatttggaagaagagtcccttcctccccccaaatattgggcagccctgtccttaccccgggaccacccctcccttccagctatgtgtacaataatgaccaatctgtttggcttacgccgttgtcttgcctttttgggggttggggtctacacggaggttgtgtttacaatgtagaaacctgttttcgctgtgtgtggcgggggcgcgggcacagggtccgtgtctttgtatattcaataaatattcattcagtaaaa

SEQ ID NO: 429155 - DNA, 1767 bp, Homo sapiens
tcggggaggaggtggctccagagatggcagtgagcgagaggagggggctcggccgcgggagccccgcggagtgggggcagcggctacttctggtgctgctgttgggtggctgctccgggcgcatccaccggctggcgctgacgggggagaagcgagcggacatccagctgaacagcttcggtttctacaccaatggctctctggaggtggagttgagcgtcctgcggctgggcctccgggaggcagaagagaagtccctgctggtggggttcagtctcagccgggttcggtctggcagagttcgctcctattcaacccgggatttccaggactgccctctccagaaaaacagtagcagtttcctggtcctgttcctcatcaacaccaaggatctgcaggtccaggtgcggaagtatggagagcagaagacgttgtttatctttcccgggctcctcccggaagcaccctccaaaccagggctcccgaagccacaggccacagtcccccgcaaggtggatggcggagggacctctgcagccagcaagcccaagtcaacacccgcagtgattcagggtcctagtgggaaggacaaggacctggtgttgggcctgagccacctcaacaactcctacaacttcagtttccacgtggtgatcggctctcaggcggaagaaggccagtacagcctgaacttccacaactgcaacaattcagtgccaggaaaggagcatccattcgacatcacggtgatgatccgggagaagaaccccgatggcttcctgtcggcagcggagatgccccttttcaagctctacatggtcatgtccgcctgcttcctggccgctggcatcttctgggtgtccatcctctgcaggaacacgtacagcgtcttcaagatccactggctcatggcggccttggccttcaccaagagcatctctctcctcttccacagcatcaactactacttcatcaacagccagggccaccccatcgaaggccttgccgtcatgtactacatcgcacacctgctgaagggcgccctcctcttcatcaccatcgccctgattggctcaggctgggccttcatcaagtacgtcctgtcggataaggagaagaaggtctttgggatcgtgatccccatgcaggtcctggccaacgtggcctacatcatcatcgagtcccgcgaggaaggcgccagcgactacgtgctgtggaaggagattttgttcctggtggacctcatctgctgtggtgccatcctgttccccgtagtctggtccatccggcatctccaggatgcgtctggcacagacgggaaggtggcagtgaacctggccaagctgaagctgttccggcattactatgtcatggtcatctgctacgtctacttcacccgcatcatcgccatcctgctgcaggtggctgtgccctttcagtggcagtggctgtaccagcccacagggaacaacccgtacctgcagctgccccaggaggacgaggaggatgttcagatggagcaagtaatgacggactctgggttccgggaaggcctctccaaagtcaacaaaacagccagcgggcgggaactgttatgatcacctccacatctcagaccaaagggtcgtcctcccccagcatttctcactcctgcccttcttccacagcgtatgtggggaggtggagggggtccatgtggaccaggcgcccagctccaggaccccaggacccgactcgcctttagggatcctctaaacgacgcagcac

SEQ ID NO: 429156 - DNA, 1956 bp, Homo sapiens
tcggggaggaggtggctccagagatggcagtgagcgagaggagggggctcggccgcgggagccccgcggagtgggggcagcggctacttctggtgctgctgttgggtggctgctccgggcgcatccaccggctggcgctgacgggggagaagcgagcggacatccagctgaacagcttcggtttctacaccaatggctctctggaggtggagttgagcgtcctgcggctgggcctccgggaggcagaagagaagtccctgctggtggggttcagtctcagccgggttcggtctggcagagttcgctcctattcaacccgggatttccaggactgccctctccagaaaaacagtagcagtttcctggtcctgttcctcatcaacaccaaggatctgcaggtccaggtgcggaagtatggagagcagaagacgttgtttatctttcccgggctcctcccggaagcaccctccaaaccagggctcccgaagccacaggccacagtcccccgcaaggtggatggcggagggacctctgcagccagcaagcccaagtcaacacccgcagtgattcagggtcctagtgggaaggacaaggacctggtgttgggcctgagccacctcaacaactcctacaacttcagtttccacgtggtgatcggctctcaggcggaagaaggccagtacagcctgaacttccacaactgcaacaattcagtgccaggaaaggagcatccattcgacatcacggtgatgatccgggagaagaaccccgatggcttcctgtcggcagcggagatgccccttttcaagctctacatggtcatgtccgcctgcttcctggccgctggcatcttctgggtgtccatcctctgcaggaacacgtacagcgtcttcaagatccactggctcatggcggccttggccttcaccaagagcatctctctcctcttccacagcatcaactactacttcatcaacagccagggccaccccatcgaaggccttgccgtcatgtactacatcgcacacctgctgaagggcgccctcctcttcatcaccatcgccctgattggctcaggctgggccttcatcaagtacgtcctgtcggataaggagaagaaggtctttgggatcgtgatccccatgcaggtcctggccaacgtggcctacatcatcatcgagtcccgcgaggaaggcgccagcgactacgtgctgtggaaggagattttgttcctggtggacctcatctgctgtggtgccatcctgttccccgtagtctggtccatccggcatctccaggatgcgtctggcacagacgggaaggtggcagtgaacctggccaagctgaagctgttccggcattactatgtcatggtggctgtgccctttcagtggcagtggctgtaccagctcttggtggagggctccaccctggccttcttcgtgctcacgggctacaagttccagcccacagggaacaacccgtacctgcagctgccccaggaggacgaggaggatgttcagatggagcaagtaatgacggactctgggttccgggaaggcctctccaaagtcaacaaaacagccagcgggcgggaactgttatgatcacctccacatctcagaccaaagggtcgtcctcccccagcatttctcactcctgcccttcttccacagcgtatgtggggaggtggagggggtccatgtggaccaggcgcccagctccccccaaatattgggcagccctgtccttaccccgggaccacccctcccttccagctatgtgtacaataatgaccaatctgtttggcttacgccgttgtcttgcctttttgggggttggggtctacacggaggttgtgtttacaatgtagaaacctgttttcgctgtgtgtggcgggggcgcgggcacagggtccgtgtctttgtatattcaataaatattcattcagtaaaa

SEQ ID NO: 429157 - DNA, 1986 bp, Homo sapiens
ctcgtgccagacccctggggctgggcaggcggaaagaggtctgaactgcctctgcctccttggtctccggcagggggagaagcgagcggacatccagctgaacagcttcggtttctacaccaatggctctctggaggtggagttgagcgtcctgcggctgggcctccgggaggcagaagagaagtccctgctggtggggttcagtctcagccgggttcggtctggcagagttcgctcctattcaacccgggatttccaggactgccctctccagaaaaacagtagcagtttcctggtcctgttcctcatcaacaccaaggatctgcaggtccaggtgcggaagtatggagagcagaagacgttgtttatctttcccgggctcctcccggaagcaccctccaaaccagggctcccgaagccacaggccacagtcccccgcaaggtggatggcggagggacctctgcagccagcaagcccaagtcaacacccgcagtgattcagggtcctagtgggaaggacaaggacctggtgttgggcctgagccacctcaacaactcctacaacttcagtttccacgtggtgatcggctctcaggcggaagaaggccagtacagcctgaacttccacaactgcaacaattcagtgccaggaaaggagcatccattcgacatcacggtgatgatccgggagaagaaccccgatggcttcctgtcggcagcggagatgccccttttcaagctctacatggtcatgtccgcctgcttcctggccgctggcatcttctgggtgtccatcctctgcaggaacacgtacagcgtcttcaagatccactggctcatggcggccttggccttcaccaagagcatctctctcctcttccacagcatcaactactacttcatcaacagccagggccaccccatcgaaggccttgccgtcatgtactacatcgcacacctgctgaagggcgccctcctcttcatcaccatcgccctgattggctcaggctgggccttcatcaagtacgtcctgtcggataaggagaagaaggtctttgggatcgtgatccccatgcaggtcctggccaacgtggcctacatcatcatcgagtcccgcgaggaaggcgccagcgactacgtgctgtggaaggagattttgttcctggtggacctcatctgctgtggtgccatcctgttccccgtagtctggtccatccggcatctccaggatgcgtctggcacagacgggaaggtggcagtgaacctggccaagctgaagctgttccggcattactatgtcatggtcatctgctacgtctacttcacccgcatcatcgccatcctgctgcaggtggctgtgccctttcagtggcagtggctgtaccagctcttggtggagggctccaccctggccttcttcgtgctcacgggctacaagttccagcccacagggaacaacccgtacctgcagctgccccaggaggacgaggaggatgttcagatggagcaagtaatgacggactctgggttccgggaaggcctctccaaagtcaacaaaacagccagcgggcgggaactgttatgatcacctccacatctcagaccaaagggtcgtcctcccccagcatttctcactcctgcccttcttccacagcgtatgtggggaggtggagggggtccatgtggaccaggcgcccagctccccgggaccccggttcccggacaagcccatttggaagaagagtcccttcctccccccaaatattgggcagccctgtccttaccccgggaccacccctcccttccagctatgtgtacaataatgaccaatctgtttggcttacgccgttgtcttgcctttttgggggttggggtctacacggaggttgtgtttacaatgtagaaacctgttttcgctgtgtgtggcgggggcgcgggcacagggtccgtgtctttgtatattcaataaatattcattcagtaaaa

SEQ ID NO: 429158 - DNA, 1324 bp, Homo sapiens
actgtccgtctctgattgtccaactattcaccccttcagctgtgactgttccctccattttttcagccccgattaccagttttgagtcccacccaccgtcctcattattcaactttctgaccacccatctgatggtgacggtccgtgttcctaatcccccaccaccaccatcagcctcccacccctctgtgcgcctcactgtccgtctgtccatccacccccagatcaactactacttcatcaacagccagggccaccccatcgaaggccttgccgtcatgtactacatcgcacacctgctgaagggcgccctcctcttcatcaccatcgccctgattggctcaggctgggccttcatcaagtacgtcctgtcggataaggagaagaaggtctttgggatcgtgatccccatgcaggtcctggccaacgtggcctacatcatcatcgagtcccgcgaggaaggcgccagcgactacgtgctgtggaaggagattttgttcctggtggacctcatctgctgtggtgccatcctgttccccgtagtctggtccatccggcatctccaggatgcgtctggcacagacgggaaggtggcagtgaacctggccaagctgaagctgttccggcattactatgtcatggtcatctgctacgtctacttcacccgcatcatcgccatcctgctgcaggtggctgtgccctttcagtggcagtggctgtaccagctcttggtggagggctccaccctggccttcttcgtgctcacgggctacaagttccagcccacagggaacaacccgtacctgcagctgccccaggaggacgaggaggatgttcagatggagcaagtaatgacggactctgggttccgggaaggcctctccaaagtcaacaaaacagccagcgggcgggaactgttatgatcacctccacatctcagaccaaagggtcgtcctcccccagcatttctcactcctgcccttcttccacagcgtatgtggggaggtggagggggtccatgtggaccaggcgcccagctccccgggaccccggttcccggacaagcccatttggaagaagagtcccttcctccccccaaatattgggcagccctgtccttaccccgggaccacccctcccttccagctatgtgtacaataatgaccaatctgtttggcttacgccgttgtcttgcctttttgggggttggggtctacacggaggttgtgtttacaatgtagaaacctgttttcgctgtgtgtggcgggggcgcgggcacagggtccgtgtctttgtatattcaataaatattcattcagtaaaa

SEQ ID NO: 429159 - DNA, 769 bp, Homo sapiens
tcggggaggaggtggctccagagatggcagtgagcgagaggagggggctcggccgcgggagccccgcggagtgggggcagcggctacttctggtgctgctgttgggtggctgctccgggcgcatccaccggctggcgctgacgggggagaagcgagcggacatccagctgaacagcttcggtttctacaccaatggctctctggaggtggagttgagcgtcctgcggctgggcctccgggaggcagaagagaagtccctgctggtggggttcagtctcagccgggttcggtctggcagagttcgctcctattcaacccgggatttccaggactgccctctccagaaaaacagtagcagtttcctggtcctgttcctcatcaacaccaaggatctgcaggtccaggtgcggaagtatggagagcagaagacgttgtttatctttcccgggctcctcccggaagcaccctccaaaccagggctcccgaagccacaggccacagtcccccgcaaggtggatggcggagggacctctgcagccagcaagcccaagtcaacacccgcagtgattcagggtcctagtgggaaggacaaggacctggtgttgggcctgagccacctcaacaactcctacaacttcagtttccacgtggtgatcggctctcaggcggaagaaggccagtacagcctgaacttccacaactgcaacaattcagtgccaggaaaggagcatccattcgacatcacggtgagcggagtggagggcagcag

SEQ ID NO: 429160 - DNA, 651 bp, Homo sapiens
tcggggaggaggtggctccagagatggcagtgagcgagaggagggggctcggccgcgggagccccgcggagtgggggcagcggctacttctggtgctgctgttgggtggctgctccgggcgcatccaccggctggcgctgacgggggagaagcgagcggacatccagctgaacagcttcggtttctacaccaatggctctctggaggtggagttgagcgtcctgcggctgggcctccgggaggcagaagagaagtccctgctggtggggttcagtctcagccgggttcggtctggcagagttcgctcctattcaacccgggatttccaggactgccctctccagaaaaacagtagcagtttcctggtcctgttcctcatcaacaccaaggatctgcagtgagttggggaccgggggctcgctcagatccttcgtctgcgtttccctggtgtgatgcccacacgcacctgggctgatcaggtgggatgagaagcagagagagaaagccacttactttttagttttgccttcaagtcttctgattgttggaaggaaggagagagggactccgcgggtgttggtgtctcagggcagaagacccggatacagagggttgttgtgagaatgaataacaattgttcgcacatgttga

SEQ ID NO: 429161 - DNA, 576 bp, Homo sapiens
ctgtggttggggggagtggggcggggcctgagtggttccgggtagagtgggtggggcctgctgccctgcaacgctagacgcctcctcgctgtctgcccccagaatgacggactctgggttccgggaaggcctctccaaagtcaacaaaacagccagcgggcgggaactgttatgatcacctccacatctcagaccaaagggtcgtcctcccccagcatttctcactcctgcccttcttccacagcgtatgtggggaggtggagggggtccatgtggaccaggcgcccagctccccgggaccccggttcccggacaagcccatttggaagaagagtcccttcctccccccaaatattgggcagccctgtccttaccccgggaccacccctcccttccagctatgtgtacaataatgaccaatctgtttggcttacgccgttgtcttgcctttttgggggttggggtctacacggaggttgtgtttacaatgtagaaacctgttttcgctgtgtgtggcgggggcgcgggcacagggtccgtgtctttgtatattcaataaatattcattcagtaaaa

SEQ ID NO: 429162 - DNA, 2012 bp, Homo sapiens
tcggggaggaggtggctccagagatggcagtgagcgagaggagggggctcggccgcgggagccccgcggagtgggggcagcggctacttctggtgctgctgttgggtggctgctccgggcgcatccaccggctggcgctgacgggggagaagcgagcggacatccagctgaacagcttcggtttctacaccaatggctctctggaggtggagttgagcgtcctgcggctgggcctccgggaggcagaagagaagtccctgctggtggggttcagtctcagccgggttcggtctggcagagttcgctcctattcaacccgggatttccaggactgccctctccagaaaaacagtagcagtttcctggtcctgttcctcatcaacaccaaggatctgcaggtccaggtgcggaagtatggagagcagaagacgttgtttatctttcccgggctcctcccggaagcaccctccaaaccagggctcccgaagccacaggccacagtcccccgcaaggtggatggcggagggacctctgcagccagcaagcccaagtcaacacccgcagtgattcagggtcctagtgggaaggacaaggacctggtgttgggcctgagccacctcaacaactcctacaacttcagtttccacgtggtgatcggctctcaggcggaagaaggccagtacagcctgaacttccacaactgcaacaattcagtgccaggaaaggagcatccattcgacatcacggtgatgatccgggagaagaaccccgatggcttcctgtcggcagcggagatgccccttttcaagctctacatggtcatgtccgcctgcttcctggccgctggcatcttctgggtgtccatcctctgcaggaacacgtacagcgtcttcaagatccactggctcatggcggccttggccttcaccaagagcatctctctcctcttccacagcatcaactactacttcatcaacagccagggccaccccatcgaaggccttgccgtcatgtactacatcgcacacctgctgaagggcgccctcctcttcatcaccatcgccctgattggctcaggctgggccttcatcaagtacgtcctgtcggataaggagaagaaggtctttgggatcgtgatccccatgcaggtcctggccaacgtggcctacatcatcatcgagtcccgcgaggaaggcgccagcgactacgtgctgtggaaggagattttgttcctggtggacctcatctgctgtggtgccatcctgttccccgtagtctgtggcagtgaacctggccaagctgaagctgttccggcattactatgtcatggtcatctgctacgtctacttcacccgcatcatcgccatcctgctgcaggtggctgtgccctttcagtggcagtggctgtaccagctcttggtggagggctccaccctggccttcttcgtgctcacgggctacaagttccagcccacagggaacaacccgtacctgcagctgccccaggaggacgaggaggatgttcagatggagcaagtaatgacggactctgggttccgggaaggcctctccaaagtcaacaaaacagccagcgggcgggaactgttatgatcacctccacatctcagaccaaagggtcgtcctcccccagcatttctcactcctgcccttcttccacagcgtatgtggggaggtggagggggtccatgtggaccaggcgcccagctccccgggaccccggttcccggacaagcccatttggaagaagagtcccttcctccccccaaatattgggcagccctgtccttaccccgggaccacccctcccttccagctatgtgtacaataatgaccaatctgtttggcttacgccgttgtcttgcctttttgggggttggggtctacacggaggttgtgtttacaatgtagaaacctgttttcgctgtgtgtggcgggggcgcgggcacagggtccgtgtctttgtatattcaataaatattcattcagtaaaa

SEQ ID NO: 429163 - DNA, 1999 bp, Homo sapiens
tcggggaggaggtggctccagagatggcagtgagcgagaggagggggctcggccgcgggagccccgcggagtgggggcagcggctacttctggtgctgctgttgggtggctgctccgggcgcatccaccggctggcgctgacgggggagaagcgagcggacatccagctgaacagcttcggtttctacaccaatggctctctggaggtggagttgagcgtcctgcggctgggcctccgggaggcagaagagaagtccctgctggtggggttcagtctcagccgggttcggtctggcagagttcgctcctattcaacccgggatttccaggactgccctctccagaaaaacagtagcagtttcctggtcctgttcctcatcaacaccaaggatctgcaggtccaggtgcggaagtatggagagcagaagacgttgtttatctttcccgggctcctcccggaagcaccctccaaaccagggctcccgaagccacaggccacagtcccccgcaaggtggatggcggagggacctctgcagccagcaagcccaagtcaacacccgcagtgattcagggtcctagtgggaaggacaaggacctggtgttgggcctgagccacctcaacaactcctacaacttcagtttccacgtggtgatcggctctcaggcggaagaaggccagtacagcctgaacttccacaactgcaacaattcagtgccaggaaaggagcatccattcgacatcacggtgatgatccgggagaagaaccccgatggcttcctgtcggcagcggagatgccccttttcaagctctacatggtcatgtccgcctgcttcctggccgctggcatcttctgggtgtccatcctctgcaggaacacgtacagcgtcttcaagatccactggctcatggcggccttggccttcaccaagagcatctctctcctcttccacagcatcaactactacttcatcaacagccagggccaccccatcgaaggccttgccgtcatgtactacatcgcacacctgctgaagggcgccctcctcttcatcaccatcgccctgattggctcaggctgggccttcatcaagtacgtcctgtcggataaggagaagaaggtctttgggatcgtgatccccatgcaggtcctggccaacgtggcctacatcatcatcgagtcccgcgaggaaggcgccagcgactacgtgctgtggaaggagattttgttcctggtggacctcatctgctgtggtgccatcctgttccccgtagtctggtccatccggcatctccaggatgcgtctggcacagacgggaaggtggcagtgaacctggccaagctgaagctgttccggcattactatgtcatggtcatctgctacgtctacttcacccgcatcatcgccatcctgctgcaggtggctgtgccctttcagtggcagtggctgtaccagcccacagggaacaacccgtacctgcagctgccccaggaggacgaggaggatgttcagatggagcaagtaatgacggactctgggttccgggaaggcctctccaaagtcaacaaaacagccagcgggcgggaactgttatgatcacctccacatctcagaccaaagggtcgtcctcccccagcatttctcactcctgcccttcttccacagcgtatgtggggaggtggagggggtccatgtggaccaggcgcccagctccccgggaccccggttcccggacaagcccatttggaagaagagtcccttcctccccccaaatattgggcagccctgtccttaccccgggaccacccctcccttccagctatgtgtacaataatgaccaatctgtttggcttacgccgttgtcttgcctttttgggggttggggtctacacggaggttgtgtttacaatgtagaaacctgttttcgctgtgtgtggcgggggcgcgggcacagggtccgtgtctttgtatattcaataaatattcattcagtaaaa

SEQ ID NO: 429164 - DNA, 1947 bp, Homo sapiens
tcggggaggaggtggctccagagatggcagtgagcgagaggagggggctcggccgcgggagccccgcggagtgggggcagcggctacttctggtgctgctgttgggtggctgctccgggcgcatccaccggctggcgctgacgggggagaagcgagcggacatccagctgaacagcttcggtttctacaccaatggctctctggaggtggagttgagcgtcctgcggctgggcctccgggaggcagaagagaagtccctgctggtggggttcagtctcagccgggttcggtctggcagagttcgctcctattcaacccgggatttccaggactgccctctccagaaaaacagtagcagtttcctggtcctgttcctcatcaacaccaaggatctgcaggtccaggtgcggaagtatggagagcagaagacgttgtttatctttcccgggctcctcccggaagcaccctccaaaccagggctcccgaagccacaggccacagtcccccgcaaggtggatggcggagggacctctgcagccagcaagcccaagtcaacacccgcagtgattcagggtcctagtgggaaggacaaggacctggtgttgggcctgagccacctcaacaactcctacaacttcagtttccacgtggtgatcggctctcaggcggaagaaggccagtacagcctgaacttccacaactgcaacaattcagtgccaggaaaggagcatccattcgacatcacggtgatgatccgggagaagaaccccgatggcttcctgtcggcagcggagatgccccttttcaagctctacatggtcatgtccgcctgcttcctggccgctggcatcttctgggtgtccatcctctgcaggaacacgtacagcgtcttcaagatccactggctcatggcggccttggccttcaccaagagcatctctctcctcttccacagcatcaactactacttcatcaacagccagggccaccccatcgaaggccttgccgtcatgtactacatcgcacacctgctgaagggcgccctcctcttcatcaccatcgccctgattggctcaggctgggccttcatcaagtacgtcctgtcggataaggagaagaaggtctttgggatcgtgatccccatgcaggtcctggccaacgtggcctacatcatcatcgagtcccgcgaggaaggcgccagcgactacgtgctgtggaaggagattttgttcctggtggacctcatctgctgtggtgccatcctgttccccgtagtctggtccatccggcatctccaggatgcgtctggcacagacgggaaggtggcagtgaacctggccaagctgaagctgttccggcattactatgtcatggtcatctgctacgtctacttcacccgcatcatcgccatcctgctgcaggtggctgtgccctttcagtggcagtggctgtaccagcccacagggaacaacccgtacctgcagctgccccaggaggacgaggaggatgttcagatggagcaagtaatgacggactctgggttccgggaaggcctctccaaagtcaacaaaacagccagcgggcgggaactgttatgatcacctccacatctcagaccaaagggtcgtcctcccccagcatttctcactcctgcccttcttccacagcgtatgtggggaggtggagggggtccatgtggaccaggcgcccagctccccccaaatattgggcagccctgtccttaccccgggaccacccctcccttccagctatgtgtacaataatgaccaatctgtttggcttacgccgttgtcttgcctttttgggggttggggtctacacggaggttgtgtttacaatgtagaaacctgttttcgctgtgtgtggcgggggcgcgggcacagggtccgtgtctttgtatattcaataaatattcattcagtaaaa

SEQ ID NO: 429165 - DNA, 2217 bp, Homo sapiens
ttcggtcctccggatggagttgccgggtccgcctcgctggggtcggccccctcccttcgggggcgaggctccatctcttggggactacaccccccttccccccaactgggtcttagtcctttaaattcttggaatcacttttggggcgctagagaccctggagccgcacagcggggtcctggggggctatagagtggggtcctctgggcacttaatgggatttggggggttctgttgaaatgttgctgggagctcaactggaatgtaaaagttcttcgggaaggtgaaggtcaggcacgccgagggggagaagcgagcggacatccagctgaacagcttcggtttctacaccaatggctctctggaggtggagttgagcgtcctgcggctgggcctccgggaggcagaagagaagtccctgctggtggggttcagtctcagccgggttcggtctggcagagttcgctcctattcaacccgggatttccaggactgccctctccagaaaaacagtagcagtttcctggtcctgttcctcatcaacaccaaggatctgcaggtccaggtgcggaagtatggagagcagaagacgttgtttatctttcccgggctcctcccggaagcaccctccaaaccagggctcccgaagccacaggccacagtcccccgcaaggtggatggcggagggacctctgcagccagcaagcccaagtcaacacccgcagtgattcagggtcctagtgggaaggacaaggacctggtgttgggcctgagccacctcaacaactcctacaacttcagtttccacgtggtgatcggctctcaggcggaagaaggccagtacagcctgaacttccacaactgcaacaattcagtgccaggaaaggagcatccattcgacatcacggtgatgatccgggagaagaaccccgatggcttcctgtcggcagcggagatgccccttttcaagctctacatggtcatgtccgcctgcttcctggccgctggcatcttctgggtgtccatcctctgcaggaacacgtacagcgtcttcaagatccactggctcatggcggccttggccttcaccaagagcatctctctcctcttccacagcatcaactactacttcatcaacagccagggccaccccatcgaaggccttgccgtcatgtactacatcgcacacctgctgaagggcgccctcctcttcatcaccatcgccctgattggctcaggctgggccttcatcaagtacgtcctgtcggataaggagaagaaggtctttgggatcgtgatccccatgcaggtcctggccaacgtggcctacatcatcatcgagtcccgcgaggaaggcgccagcgactacgtgctgtggaaggagattttgttcctggtggacctcatctgctgtggtgccatcctgttccccgtagtctggtccatccggcatctccaggatgcgtctggcacagacgggaaggtggcagtgaacctggccaagctgaagctgttccggcattactatgtcatggtcatctgctacgtctacttcacccgcatcatcgccatcctgctgcaggtggctgtgccctttcagtggcagtggctgtaccagctcttggtggagggctccaccctggccttcttcgtgctcacgggctacaagttccagcccacagggaacaacccgtacctgcagctgccccaggaggacgaggaggatgttcagatggagcaagtaatgacggactctgggttccgggaaggcctctccaaagtcaacaaaacagccagcgggcgggaactgttatgatcacctccacatctcagaccaaagggtcgtcctcccccagcatttctcactcctgcccttcttccacagcgtatgtggggaggtggagggggtccatgtggaccaggcgcccagctccccgggaccccggttcccggacaagcccatttggaagaagagtcccttcctccccccaaatattgggcagccctgtccttaccccgggaccacccctcccttccagctatgtgtacaataatgaccaatctgtttggcttacgccgttgtcttgcctttttgggggttggggtctacacggaggttgtgtttacaatgtagaaacctgttttcgctgtgtgtggcgggggcgcgggcacagggtccgtgtctttgtatattcaataaatattcattcagtaaaa

SEQ ID NO: 429166 - DNA, 1973 bp, Homo sapiens
tcggggaggaggtggctccagagatggcagtgagcgagaggagggggctcggccgcgggagccccgcggagtgggggcagcggctacttctggtgctgctgttgggtggctgctccgggcgcatccaccggctggcgctgacgggggagaagcgagcggacatccagctgaacagcttcggtttctacaccaatggctctctggaggtggagttgagcgtcctgcggctgggcctccgggaggcagaagagaagtccctgctggtggggttcagtctcagccgggttcggtctggcagagttcgctcctattcaggtccaggtgcggaagtatggagagcagaagacgttgtttatctttcccgggctcctcccggaagcaccctccaaaccagggctcccgaagccacaggccacagtcccccgcaaggtggatggcggagggacctctgcagccagcaagcccaagtcaacacccgcagtgattcagggtcctagtgggaaggacaaggacctggtgttgggcctgagccacctcaacaactcctacaacttcagtttccacgtggtgatcggctctcaggcggaagaaggccagtacagcctgaacttccacaactgcaacaattcagtgccaggaaaggagcatccattcgacatcacggtgatgatccgggagaagaaccccgatggcttcctgtcggcagcggagatgccccttttcaagctctacatggtcatgtccgcctgcttcctggccgctggcatcttctgggtgtccatcctctgcaggaacacgtacagcgtcttcaagatccactggctcatggcggccttggccttcaccaagagcatctctctcctcttccacagcatcaactactacttcatcaacagccagggccaccccatcgaaggccttgccgtcatgtactacatcgcacacctgctgaagggcgccctcctcttcatcaccatcgccctgattggctcaggctgggccttcatcaagtacgtcctgtcggataaggagaagaaggtctttgggatcgtgatccccatgcaggtcctggccaacgtggcctacatcatcatcgagtcccgcgaggaaggcgccagcgactacgtgctgtggaaggagattttgttcctggtggacctcatctgctgtggtgccatcctgttccccgtagtctggtccatccggcatctccaggatgcgtctggcacagacgggaaggtggcagtgaacctggccaagctgaagctgttccggcattactatgtcatggtcatctgctacgtctacttcacccgcatcatcgccatcctgctgcaggtggctgtgccctttcagtggcagtggctgtaccagctcttggtggagggctccaccctggccttcttcgtgctcacgggctacaagttccagcccacagggaacaacccgtacctgcagctgccccaggaggacgaggaggatgttcagatggagcaagtaatgacggactctgggttccgggaaggcctctccaaagtcaacaaaacagccagcgggcgggaactgttatgatcacctccacatctcagaccaaagggtcgtcctcccccagcatttctcactcctgcccttcttccacagcgtatgtggggaggtggagggggtccatgtggaccaggcgcccagctccccgggaccccggttcccggacaagcccatttggaagaagagtcccttcctccccccaaatattgggcagccctgtccttaccccgggaccacccctcccttccagctatgtgtacaataatgaccaatctgtttggcttacgccgttgtcttgcctttttgggggttggggtctacacggaggttgtgtttacaatgtagaaacctgttttcgctgtgtgtggcgggggcgcgggcacagggtccgtgtctttgtatattcaataaatattcattcagtaaaa

SEQ ID NO: 429167 - DNA, 1407 bp, Homo sapiens
ttcggtcctccggatggagttgccgggtccgcctcgctggggtcggccccctcccttcgggggcgaggctccatctcttggggactacaccccccttccccccaactgggtcttagtcctttaaattcttggaatcacttttggggcgctagagaccctggagccgcacagcggggtcctggggggctatagagtggggtcctctgggcacttaatgggatttggggggttctgttgaaatgttgctgggagctcaactggaatgtaaaagttcttcaccaagagcatctctctcctcttccacagcatcaactactacttcatcaacagccagggccaccccatcgaaggccttgccgtcatgtactacatcgcacacctgctgaagggcgccctcctcttcatcaccatcgccctgattggctcaggctgggccttcatcaagtacgtcctgtcggataaggagaagaaggtctttgggatcgtgatccccatgcaggtcctggccaacgtggcctacatcatcatcgagtcccgcgaggaaggcgccagcgactacgtgctgtggaaggagattttgttcctggtggacctcatctgctgtggtgccatcctgttccccgtagtctggtccatccggcatctccaggatgcgtctggcacagacgggaaggtggcagtgaacctggccaagctgaagctgttccggcattactatgtcatggtcatctgctacgtctacttcacccgcatcatcgccatcctgctgcaggtggctgtgccctttcagtggcagtggctgtaccagctcttggtggagggctccaccctggccttcttcgtgctcacgggctacaagttccagcccacagggaacaacccgtacctgcagctgccccaggaggacgaggaggatgttcagatggagcaagtaatgacggactctgggttccgggaaggcctctccaaagtcaacaaaacagccagcgggcgggaactgttatgatcacctccacatctcagaccaaagggtcgtcctcccccagcatttctcactcctgcccttcttccacagcgtatgtggggaggtggagggggtccatgtggaccaggcgcccagctccccgggaccccggttcccggacaagcccatttggaagaagagtcccttcctccccccaaatattgggcagccctgtccttaccccgggaccacccctcccttccagctatgtgtacaataatgaccaatctgtttggcttacgccgttgtcttgcctttttgggggttggggtctacacggaggttgtgtttacaatgtagaaacctgttttcgctgtgtgtggcgggggcgcgggcacagggtccgtgtctttgtatattcaataaatattcattcagtaaaa

SEQ ID NO: 429168 - DNA, 270 bp, Homo sapiens
acctcatctgctgtggtgccatcctgttccccgtagtctggtgaggaccctgcccccgggctgaggctctgccctgtgcacatgggcgatgtccgcgctgaccgtaccctgtgtcctccacttgtcccaggtccatccggcatctccaggatgcgtctggcacagacgggaagggtgaggccctgcgcctgcaggccctctgctcatggccccattcctcctccgggcccttctttctgccccttggatgcccctcctggcctctctgcc

SEQ ID NO: 429169 - DNA, 449 bp, Homo sapiens
gttgtacgtgtgatgacttagtggtacagagaaataagggggtctaggtttctagtagatcaactggtagctgtagaaaaggaagatggcagaaaatgatagtggttaggtagtcaagatctaggactttctgaagcccttagaaaagcaaaaaagcaacaaactagaataagaaatattctctttgaggaccagtaaagcattgtggttaagggtgcagttgttgcaaccagactacacaggtttgaatcttggctctactatttactagctggattgggtaagctacttccctttgctggctcacatctgtaaaatgggtatggtaggagttgactgcactgggttgcttggaggagttaatgagctaatccgcataatgtgcttagaaccttgcccgataccaagtaagaggcctacaaatcttatctgtcaccatcaggtggtca

SEQ ID NO: 429170 - DNA, 6583 bp, Homo sapiens
cttgccatcgtgagagattggtacatgatgtgtaaattcagttcagcatatgtttcttcattatgaaaccactagcaatcccagctaaccatggagttatgggccagcaggagaaacactcacttcctgcagatttcacaaaactgcatcttactgacagtctccacccacaggtgacccacgtttcttctagccattcaggatgtagtatcactagtgattctgggagcagcagtctttctgatatctaccaggccacagaaagcgaggctggtgatatggacctgagtgggttgccagaaacagcagtggattccgaagacgacgacgatgaagaagacattgagagagcatcagatcctctgatgagcagggacattgtgagagactgcctagagaaggacccaattgaccggacagatgatgacattgaacaactcttggaatttatgcaccagttgcctgcttttgccaatatgacaatgtcagtgaggcgagaactctgtgctgtgatggtgttcgcagtggtggaaagagcagggaccatagtgttaaatgatggtgaagagctggactcctggtcagtgattctcaatggatctgtggaagtgacttatccagatggaaaagcagaaatactgtgcatgggaaatagttttggtgtctctcctaccatggacaaagaatacatgaaaggagtgatgagaacaaaggtggatgactgccagtttgtctgcatagcccagcaagattactgccgtattctcaatcaagtagaaaagaacatgcaaaaagttgaagaggaaggagagattgttatggtgaaagaacaccgagaacttgatcgaactggaacaagaaagggacacattgtcatcaagggtacctcagaaaggttaacaatgcatttggtggaagagcattcagtagtagatccaacattcatagaagactttctgttgacctataggacttttctttctagcccaatggaagtgggcaaaaagttattggagtggtttaatgacccgagcctcagggataaggttacacgggtagtattattgtgggtaaataatcacttcaatgactttgaaggagatcctgcaatgactcgatttttagaagaatttgaaaacaatctggaaagagagaaaatgggtggacacctaaggctgttgaatatcgcgtgtgctgctaaagcaaaaagaagattgatgacgttaacaaaaccatcccgagaagctcctttgccttttatcttacttggaggctctgagaagggatttggaatctttgttgacagtgtagattcaggtagcaaagcaactgaagcaggcttgaaacggggggatcagatattagaagtaaatggccaaaactttgaaaacattcagctgtcaaaagctatggaaattcttagaaataacacacatttatctatcactgtgaaaaccaatttatttgtatttaaagaacttctaacaagattgtcagaagagaaaagaaatggtgccccccaccttcctaaaattggtgacattaaaaaggccagtcgctactccattccagatcttgctgtagatgtagaacaggtgataggacttgaaaaagtgaacaaaaaaagtaaagccaacactgtgggaggaaggaacaagctgaaaaagatactcgacaagactcggatcagtatcttgccacagaaaccatacaatgatattgggattggtcagtctcaagatgacagcatagtaggattaaggcagacaaagcacatcccaactgcattgcctgtcagtggaaccttatcatccagtaatcctgatttattgcagtcacatcatcgcattttagacttcagtgctactcctgacttgccagatcaagtgctaagggtttttaaggctgatcagcaaagccgctacatcatgatcagtaaggacactacagcaaaggaagtggtcattcaggctatcagggagtttgctgttactgccaccccggatcaatattcactatgtgaggtctctgtcacacctgagggagtaatcaaacaaagaagacttccagatcagctttccaaacttgcagacagaatacaactgagtggaaggtattatctgaaaaacaacatggaaacagaaactctttgttcagatgaagatgctcaggagttgttgagagagagtcaaatttccctccttcagctcagcactgtggaagttgcaacacagctctctatgcgaaattttgaactctttcgcaacattgaacctactgaatatatagatgatttatttaaactcagatcaaaaaccagctgtgccaacctgaagagatttgaagaagtcattaaccaggaaacattttgggtagcatctgaaattctcagagaaacaaaccagctgaagaggatgaagatcattaagcatttcatcaagatagcactgcactgtagggaatgcaagaattttaactcaatgtttgcaatcatcagtggcctaaacctggcaccagtggcaagactgcgaacgacctgggagaaacttcccaataaatacgaaaaactatttcaagatctccaagacctgtttgatccttccagaaacatggcaaaatatcgtaatgttctcaatagtcaaaatctacaacctcccataatccctctattcccagttatcaaaaaggatctcaccttccttcacgaaggaaatgactcaaaagtagacgggctggtcaattttgagaagctaaggatgattgcaaaagaaattcgtcacgttggccgaatggcttcagtgaacatggaccctgccctcatgttcaggactcggaagaagaaatggcggagtttggggtctctcagccagggtagtacaaatgcaacagtgctagatgttgctcagacaggtggtcataaaaagcgggtacgtcgtagttcctttctcaatgccaaaaagctttatgaagatgcccaaatggctcgaaaagtgaagcagtacctttccaatttggagctagaaatggacgaggagagtcttcagacattatctctgcagtgtgagccagcaaccaacacattgcctaagaatcctggtgacaaaaagcctgtcaaatccgagacctctccagtagctccaagggcagggtcacaacagaaagctcagtccctgccacagccccagcagcagccaccaccagcacataaaatcaaccagggactacaggttcccgccgtgtccctttatccttcacggaagaaagtgcccgtaaaggatctcccaccttttggcataaactctccacaagctttaaaaaaaattctttctttgtctgaagaaggaagtttggaacgtcacaagaaacaggctgaagatacaatatcaaatgcatcttcgcagctttcttctcctcctacttctccacagagttctccaaggaaaggctatactttggctcccagtggtactgtggataatttttcagattctggtcacagtgaaatttcttcacgatccagtattgttagcaattcgtcttttgactcagtgccagtctcactgcacgatgagaggcgccagaggcattctgtcagcatcgtggaaacaaacctagggatgggcaggatggagaggcggaccatgattgaacctgatcagtatagcttggggtcctatgcaccaatgtccgagggccgaggcttatatgctacagctacagtaatttcttctccaagcacagaggaactttcccaggatcagggggatcgcgcgtcacttgatgctgctgacagtggccgtgggagctggacgtcatgctcaagtggctcccatgataatatacagacgatccagcaccagagaagctgggagactcttccattcgggcatactcactttgattattcaggggatcctgcaggtttatgggcatcaagcagccatatggaccaaattatgttttctgatcatagcacaaagtataacaggcaaaatcaaagtagagagagccttgaacaagcccagtcccgagcaagctgggcgtcttccacaggttactggggagaagactcagaaggtgacacaggcacaataaagcggaggggtggaaaggatgtttccattgaagccgaaagcagtagcctaacgtctgtgactacggaagaaaccaagcctgtccccatgcctgcccacatagctgtggcatcaagtactacaaaggggctcattgcacgaaaggagggcaggtatcgagagcccccgcccacccctcccggctacattggaattcccattactgactttccagaagggcactcccatccagccaggaaaccgccggactacaacgtggcccttcagagatcgcggatggtcgcacgatcctccgacacagctgggccttcatccgtacagcagccacatgggcatcccaccagcagcaggcctgtgaacaaacctcagtggcataaaccgaacgagtctgacccgcgcctcgccccctatcagtcccaagggttttccaccgaggaggatgaagatgaacaagtttctgctgtttgaggcacagacttttctggaagcagagcgagccacctgaaaggagagcacaagaagacgtcctgagcattggagccttggaactcacattctgaggacggtggaccagtttgcctccttccctgccttaaaagcagcatggggcttcttctccccttcttcctttcccctttgcatgtgaaatactgtgaagaaattgccctggcacttttcagactttgttgcttgaaatgcacagtgcagcaatcttcgagctcccactgttgctgcctgccacatcacacagtatcattccaaattccaagatcatcacaacaagatgattcactctggctgcacttctcaatgcctggaaggattttttttaatcttccttttagatttcaatccagtcctagcacttgatctcattgggataatgagaaaagctagccattgaactacttggggcctttaacccaccaaggaagacaaagaaaaacaatgaaatcctttgagtacagtgcttgtccacttgtttacaatgtcctccttttaaaaaaaaaaatgagtttaaagattttgttcagagagtaaatatatatccatttaatgattacagtattattttaaaccttaagtagggttgccagcctggtttctgaaaaaccaaatatgccggacagggtgtggccacaccaagaagacgggaagacctggcttgtgaccctggcttcccatgtccttctggtctcacccgcgaagtgccctatcctggaagtatgaaatgttagccaattaataccaagacacctcatctgctccttccccagtggatggggttcttctgtaaaactgtttgcacatggccaggggagggaactaggacccttgtgtcctgtctgagccttatggaggcaggacggtgtcattggcggatgtgtcctgctccattgagatggatggcaaaccccatttttaagttatatttctttgatttttgttaatttagaggtgtaggttttgttttttgttttttgtttttttttaagagaaacatttataactggatagcattgcagtgaaagcagcttgggatgttggagctaatgccagctgtttatactgctctttcaagacagcctccctttattgaattggcattagggaataaacaagcctttaaacgtgataaaagatcaaaaacctggttagacatgccagcctttgcaaggcaggttagtcaccaaagactaacctccaagtggctttatggacgctgcatatagagaaggcctaagtgtagcaaccatctgctcacagctgctattaaccctataatgactgaaatgacccctccactctatttttgtgttgttttgcacagactccggaaaagtgaaggctgccaatctgagtagtactcaaatgtgaggaactgctggtcttggattttttttccattaaattcagctgatcatattgatcagtagataaacgtaaatagcttcaaattttaaaagtggaattgcagtgttttttcactgtatcaaacaatgtcagtgctttatttaataattctcttctgtatcatggcatttgtctacttgcttattacattgtcaattatgcatttgtaattttacatgtaatatgcattatttgccagttttattatataggctatggacctcatgtgcatatagaaagacagaaatctagctctaccacaagttgcacaaatgttatctaagcattaagtaattgtagaacataggactgctaatctcagttcgctctgtgatgtcaagtgcagaatgtacaattaactggtgatttcctcatacttttgatactacttgtacctgtatgtcttttagaaagacattggtggagtctgtatcccttttgtatttttaatacaataattgtacatattggttatatttttgttgaagatggtagaaatgtactatgtttatgcttctacatccagtttgtacaagctggaaaataaataaatataacataaagccttgcctata

SEQ ID NO: 429171 - DNA, 3643 bp, Homo sapiens
tgtgaaaggacaaagttcagagcttgatatacacaccctatgataccaggcaattggtaatggttttccattacccacatgtacctctttcttttctttttcccttctcctgttgccctttctttatttcctcttttaccctcttactccctttattcttttcccttgttttcttctccactgcctgtgtcttaggcctgccagtgacacccaggcattgcttagccctgccctccacccttcaagtggggaatgaacacttggatacccatgtgcacaattaggtatgaatttccctcacagactgcaaagtgccagtttaaatagatctcacctgttaaagcaaatctatgttagactcacctcttcctggaatcataggctctaatagcacttagaatgtaagaaacagttttggatgagaatacagtttgctgtggataaattgaaaattgattacactatatgtggtttgaagtttaattttatttcattcatcatctgtaatgttttacttaaatacaaattataatgtcatgcccaaaggaaaataatcctatgatataaactgtcattgacttttataagtgaattcttacttgaatttttattttatactagggtactgagatcatatagtactttcatgggcttacagcaatttgaaacccatgagatttacagaaacttaaaacctcagtaaagcaattcagagattttctgaacaggtacggtggctcatgcctgtaatcccagcacttgggaggccgaggcaggcggatcatgaggtcaggagttcgagaccagcctggtgaaatcccgtctgtactaaaaatacaaaaaaattacctgggcatggtggtgcgcacctgtacaatcccagctactcgggaggctgaagcaggagaatcatttgaacccaggagccagaggttgcagtgagccaagatcacgccactgccctccagcctgggcgatagagtgagattctctcaaaaaaaaaaaaaactcaaagattttcaactgacttcatcatattagttaaaattaaatgttacctgtggatttcatattagatctataaatttgttatagcaaaaataagttgcttatttaaaaaagataaatattttcaagtaaaatgtatttcttttaaggtaccagttctatatgaccatattagaaattcagtttgggatttttttttttttcctttttggatggtgttccagcttgctatagaataaatgccaaaatgtctgtctagacactaagaatttcaaatcaaatgtattctaatttaaaaaagtctgtagtcaagattaattttagtacatttctcttcataaagcatttttcccttatatctacttattcagttgaattcagggatgtatttcttttttagaagataaatgagaaaatgagtatttaattatgttctctaaaactgagcacaagaaagaacacctagaattatttggaaataaaaccattctaaatctcttatatgtatttgggaataattttgctgctgtgtacaaagaaataaaatattttttagataagaaactaaggatcatgtattttgaaacattacacacctgtggtcagtgttaaggaaattgctcagaaataatgttaacagtttatttataaaattaatgtgatactataagcaatatttttaaaaatgtaatatcagagctctaaaggtatttttaatataattaaagtatgcataattactagtacaaaaaaagcctatatcttttgatttttaactttttgcttcaaaatgctgaatagaaaaactagtgagattagccaactctgggagaaatatgatactgcaatatgctgttcctcttatgaactgctgcttctacttaaaatctattgattatgcggaaagcatgaaaaatatagaaagatactaaaatgaaagtcgctcataatttgcattgctcagaaataatattaacagtttatttccctccaagattttgatgtgcatgtataatttattttaaaatggccagcatgtagttatgagacatcaggctgtttactcatctgtacagtggggataatagcaccttcctcatggtttgattaggaggatgaattgaaaaagttccataaggctgccacagtgtgatggtgatggtggtgatgatgatgttgtcattatgattatcgtaatatttagtatagtatcttttttaaaaaattaatatgagcaatataaaaagaataatgtattatcagagctctaaatgccctatgaaatcatgatttcaggtggttgcatcatattttatcttatttacaatataatttaaccacctcctttttcatcttcttcacattaaaggaggaaaagaaataccatgcttctttccatttccgaatgatctcttgtctcctcactgacctctagttaatttctataataagtgatttctatcattcattcttaactttctttaaaacttctaagaaatgtaatttcttaagtggtttgccctaagctctgaaattttttatatttggggtcagggagagtaatgacttcatatgcagatttttagctttttctttaagagcaaggattacccttaataccagttataaggataatgttttgagctataacacatatgtggtttgtgttttgaccttctttgaacaagctttctaaaatggtgtttcatcaatataattagcaaattaatatatctactccataggtatctttgagtgtctgtatctttcattaaaatcattctcattcaaaaattgttgcttcttcaaattcttttaattcactagatgataattaagtttttacatctattctcctacaattccactccccctactgcagtgttttttaattgtgaaagaagcatgaaaaagctatcttctaattatgtcttttgatttttaaaattattaggattttgaatgtaaaatacatataagtattctaaaaatgaaacttttcttgaccaaggaagaaatacattaaaagtagagaagtctgattaaggttcattacagcattaatttagaaagtatgggaaagacagggaaaaatgtcagttttaaataattaaaacactgaattattagtactgctaggtcttttgcaagcactttatcattaacatgtgacttatgttttattccagtttgtctgcatagcccagcaagattactgccgtattctcaatcaagtagaaaagaacatgcaaaaagttgaagaggaaggagagattgttatggtgaaagaacaccgagaacttgatcgaactggaacaagaaagggacacattgtcatcaagggtacctcagaaaggttaacaatgcatttggtggaagagcattcagtagtagatccaacattcatagaagactttctgttgacctataggacttttctttctagcccaatggaagtgggcaaaaagttattggagtggtttaatgacccgagcctcagggataaggttggaaatatattctattttgtctcttaaatatgaaatgtaaacctaaagatactttaatgtgtatatttgtcacagcaattatgtccagattaatgtaatgaaataggagaatgtaattctgaagc

SEQ ID NO: 429172 - DNA, 3210 bp, Homo sapiens
cagtggcaatcagctgagatcttttggctccgggcagttggacttaaccagttcctcctcttctcttggaagctatactttggctcccagtggtactgtggataatttttcagattctggtcacagtgaaatttcttcacgatccagtattgttagcaattcgtcttttgactcagtgccagtctcactgcacgatgagaggcgccagaggcattctgtcagcatcgtggaaacaaacctagggatgggcaggatggagaggcggaccatgattgaacctgatcagtatagcttggggtcctatgcaccaatgtccgagggccgaggcttatatgctacagctacagtaatttcttctccaagcacagaggaactttcccaggatcagggggatcgcgcgtcacttgatgctgctgacagtggccgtgggagctggacgtcatgctcaagtggctcccatgataatatacagacgatccagcaccagagaagctgggagactcttccattcgggcatactcactttgattattcaggggatcctgcaggtttatgggcatcaagcagccatatggaccaaattatgttttctgatcatagcacaaagtataacaggcaaaatcaaagtagagagagccttgaacaagcccagtcccgagcaagctgggcgtcttccacaggttactggggagaagactcagaaggtgacacaggcacaataaagcggaggggtggaaaggatgtttccattgaagccgaaagcagtagcctaacgtctgtgactacggaagaaaccaagcctgtccccatgcctgcccacatagctgtggcatcaagtactacaaaggggctcattgcacgaaaggagggcaggtatcgagagcccccgcccacccctcccggctacattggaattcccattactgactttccagaagggcactcccatccagccaggaaaccgccggactacaacgtggcccttcagagatcgcggatggtcgcacgatcctccgacacagctgggccttcatccgtacagcagccacatgggcatcccaccagcagcaggcctgtgaacaaacctcagtggcataaaccgaacgagtctgacccgcgcctcgccccctatcagtcccaagggttttccaccgaggaggatgaagatgaacaagtttctgctgtttgaggcacagacttttctggaagcagagcgagccacctgaaaggagagcacaagaagacgtcctgagcattggagccttggaactcacattctgaggacggtggaccagtttgcctccttccctgccttaaaagcagcatggggcttcttctccccttcttcctttcccctttgcatgtgaaatactgtgaagaaattgccctggcacttttcagactttgttgcttgaaatgcacagtgcagcaatcttcgagctcccactgttgctgcctgccacatcacacagtatcattccaaattccaagatcatcacaacaagatgattcactctggctgcacttctcaatgcctggaaggattttttttaatcttccttttagatttcaatccagtcctagcacttgatctcattgggataatgagaaaagctagccattgaactacttggggcctttaacccaccaaggaagacaaagaaaaacaatgaaatcctttgagtacagtgcttgtccacttgtttacaatgtcctccttttaaaaaaaaaaatgagtttaaagattttgttcagagagtaaatatatatccatttaatgattacagtattattttaaaccttaagtagggttgccagcctggtttctgaaaaaccaaatatgccggacagggtgtggccacaccaagaagacgggaagacctggcttgtgaccctggcttcccatgtccttctggtctcacccgcgaagtgccctatcctggaagtatgaaatgttagccaattaataccaagacacctcatctgctccttccccagtggatggggttcttctgtaaaactgtttgcacatggccaggggagggaactaggacccttgtgtcctgtctgagccttatggaggcaggacggtgtcattggcggatgtgtcctgctccattgagatggatggcaaaccccatttttaagttatatttctttgatttttgttaatttagaggtgtaggttttgttttttgttttttgtttttttttaagagaaacatttataactggatagcattgcagtgaaagcagcttgggatgttggagctaatgccagctgtttatactgctctttcaagacagcctccctttattgaattggcattagggaataaacaagcctttaaacgtgataaaagatcaaaaacctggttagacatgccagcctttgcaaggcaggttagtcaccaaagactaacctccaagtggctttatggacgctgcatatagagaaggcctaagtgtagcaaccatctgctcacagctgctattaaccctataatgactgaaatgacccctccactctatttttgtgttgttttgcacagactccggaaaagtgaaggctgccaatctgagtagtactcaaatgtgaggaactgctggtcttggattttttttccattaaattcagctgatcatattgatcagtagataaacgtaaatagcttcaaattttaaaagtggaattgcagtgttttttcactgtatcaaacaatgtcagtgctttatttaataattctcttctgtatcatggcatttgtctacttgcttattacattgtcaattatgcatttgtaattttacatgtaatatgcattatttgccagttttattatataggctatggacctcatgtgcatatagaaagacagaaatctagctctaccacaagttgcacaaatgttatctaagcattaagtaattgtagaacataggactgctaatctcagttcgctctgtgatgtcaagtgcagaatgtacaattaactggtgatttcctcatacttttgatactacttgtacctgtatgtcttttagaaagacattggtggagtctgtatcccttttgtatttttaatacaataattgtacatattggttatatttttgttgaagatggtagaaatgtactatgtttatgcttctacatccagtttgtacaagctggaaaataaataaatataacataaagccttgcctata

SEQ ID NO: 429173 - DNA, 2374 bp, Homo sapiens
tatgtgtatctgatcgtatattttttttaaatggcacatgctattttacaactttttaaaatgaatttaacaactttctgaacaaaaatatataatgcatatctttttaatattgtgtgtatatatgtaaagatatgtattgcatacattttaacctttttgttgttcgtcattgtttaggaaaaaaagacaaggattctaagtgagctatactaaaaagaataactatgatagttttatttagcacatcagtgaatatattctctatagcacaagaaattacttgcttgctcattgatttctttttcttccctgctgtatttgcagaagatgaacaagtttctgctgtttgaggcacagacttttctggaagcagagcgagccacctgaaaggagagcacaagaagacgtcctgagcattggagccttggaactcacattctgaggacggtggaccagtttgcctccttccctgccttaaaagcagcatggggcttcttctccccttcttcctttcccctttgcatgtgaaatactgtgaagaaattgccctggcacttttcagactttgttgcttgaaatgcacagtgcagcaatcttcgagctcccactgttgctgcctgccacatcacacagtatcattccaaattccaagatcatcacaacaagatgattcactctggctgcacttctcaatgcctggaaggattttttttaatcttccttttagatttcaatccagtcctagcacttgatctcattgggataatgagaaaagctagccattgaactacttggggcctttaacccaccaaggaagacaaagaaaaacaatgaaatcctttgagtacagtgcttgtccacttgtttacaatgtcctccttttaaaaaaaaaaatgagtttaaagattttgttcagagagtaaatatatatccatttaatgattacagtattattttaaaccttaagtagggttgccagcctggtttctgaaaaaccaaatatgccggacagggtgtggccacaccaagaagacgggaagacctggcttgtgaccctggcttcccatgtccttctggtctcacccgcgaagtgccctatcctggaagtatgaaatgttagccaattaataccaagacacctcatctgctccttccccagtggatggggttcttctgtaaaactgtttgcacatggccaggggagggaactaggacccttgtgtcctgtctgagccttatggaggcaggacggtgtcattggcggatgtgtcctgctccattgagatggatggcaaaccccatttttaagttatatttctttgatttttgttaatttagaggtgtaggttttgttttttgttttttgtttttttttaagagaaacatttataactggatagcattgcagtgaaagcagcttgggatgttggagctaatgccagctgtttatactgctctttcaagacagcctccctttattgaattggcattagggaataaacaagcctttaaacgtgataaaagatcaaaaacctggttagacatgccagcctttgcaaggcaggttagtcaccaaagactaacctccaagtggctttatggacgctgcatatagagaaggcctaagtgtagcaaccatctgctcacagctgctattaaccctataatgactgaaatgacccctccactctatttttgtgttgttttgcacagactccggaaaagtgaaggctgccaatctgagtagtactcaaatgtgaggaactgctggtcttggattttttttccattaaattcagctgatcatattgatcagtagataaacgtaaatagcttcaaattttaaaagtggaattgcagtgttttttcactgtatcaaacaatgtcagtgctttatttaataattctcttctgtatcatggcatttgtctacttgcttattacattgtcaattatgcatttgtaattttacatgtaatatgcattatttgccagttttattatataggctatggacctcatgtgcatatagaaagacagaaatctagctctaccacaagttgcacaaatgttatctaagcattaagtaattgtagaacataggactgctaatctcagttcgctctgtgatgtcaagtgcagaatgtacaattaactggtgatttcctcatacttttgatactacttgtacctgtatgtcttttagaaagacattggtggagtctgtatcccttttgtatttttaatacaataattgtacatattggttatatttttgttgaagatggtagaaatgtactatgtttatgcttctacatccagtttgtacaagctggaaaataaataaatataacataaagccttgcctata

SEQ ID NO: 429174 - DNA, 6529 bp, Homo sapiens
cttgccatcgtgagagattggtacatgatgtgtaaattcagttcagcatatgtttcttcattatgaaaccactagcaatcccagctaaccatggagttatgggccagcaggagaaacactcacttcctgcagatttcacaaaactgcatcttactgacagtctccacccacaggtgacccacgtttcttctagccattcaggatgtagtatcactagtgattctgggagcagcagtctttctgatatctaccaggccacagaaagcgaggctggtgatatggacctgagtgggttgccagaaacagcagtggattccgaagacgacgacgatgaagaagacattgagagagcatcagatcctctgatgagcagggacattgtgagagactgcctagagaaggacccaattgaccggacagatgatgacattgaacaactcttggaatttatgcaccagttgcctgcttttgccaatatgacaatgtcagtgaggcgagaactctgtgctgtgatggtgttcgcagtggtggaaagagcagggaccatagtgttaaatgatggtgaagagctggactcctggtcagtgattctcaatggatctgtggaagtgacttatccagatggaaaagcagaaatactgtgcatgggaaatagttttggtgtctctcctaccatggacaaagaatacatgaaaggagtgatgagaacaaaggtggatgactgccagtttgtctgcatagcccagcaagattactgccgtattctcaatcaagtagaaaagaacatgcaaaaagttgaagaggaaggagagattgttatggtgaaagaacaccgagaacttgatcgaactggaacaagaaagggacacattgtcatcaagggtacctcagaaaggttaacaatgcatttggtggaagagcattcagtagtagatccaacattcatagaagactttctgttgacctataggacttttctttctagcccaatggaagtgggcaaaaagttattggagtggtttaatgacccgagcctcagggataaggttacacgggtagtattattgtgggtaaataatcacttcaatgactttgaaggagatcctgcaatgactcgatttttagaagaatttgaaaacaatctggaaagagagaaaatgggtggacacctaaggctgttgaatatcgcgtgtgctgctaaagcaaaaagaagattgatgacgttaacaaaaccatcccgagaagctcctttgccttttatcttacttggaggctctgagaagggatttggaatctttgttgacagtgtagattcaggtagcaaagcaactgaagcaggcttgaaacggggggatcagatattagaagtaaatggccaaaactttgaaaacattcagctgtcaaaagctatggaaattcttagaaataacacacatttatctatcactgtgaaaaccaatttatttgtatttaaagaacttctaacaagattgtcagaagagaaaagaaatggtgccccccaccttcctaaaattggtgacattaaaaaggccagtcgctactccattccagatcttgctgtagatgtagaacaggtgataggacttgaaaaagtgaacaaaaaaagtaaagccaacactgtgggaggaaggaacaagctgaaaaagatactcgacaagactcggatcagtatcttgccacagaaaccatacaatgatattgggattggtcagtctcaagatgacagcatagtaggattaaggcagacaaagcacatcccaactgcattgcctgtcagtggaaccttatcatccagtaatcctgatttattgcagtcacatcatcgcattttagacttcagtgctactcctgacttgccagatcaagtgctaagggtttttaaggctgatcagcaaagccgctacatcatgatcagtaaggacactacagcaaaggaagtggtcattcaggctatcagggagtttgctgttactgccaccccggatcaatattcactatgtgaggtctctgtcacacctgagggagtaatcaaacaaagaagacttccagatcagctttccaaacttgcagacagaatacaactgagtggaaggtattatctgaaaaacaacatggaaacagaaactctttgttcagatgaagatgctcaggagttgttgagagagagtcaaatttccctccttcagctcagcactgtggaagttgcaacacagctctctatgcgaaattttgaactctttcgcaacattgaacctactgaatatatagatgatttatttaaactcagatcaaaaaccagctgtgccaacctgaagagatttgaagaagtcattaaccaggaaacattttgggtagcatctgaaattctcagagaaacaaaccagctgaagaggatgaagatcattaagcatttcatcaagatagcactgcactgtagggaatgcaagaattttaactcaatgtttgcaatcatcagtggcctaaacctggcaccagtggcaagactgcgaacgacctgggagaaacttcccaataaatacgaaaaactatttcaagatctccaagacctgtttgatccttccagaaacatggcaaaatatcgtaatgttctcaatagtcaaaatctacaacctcccataatccctctattcccagttatcaaaaaggatctcaccttccttcacgaaggaaatgactcaaaagtagacgggctggtcaattttgagaagctaaggatgattgcaaaagaaattcgtcacgttggccgaatggcttcagtgaacatggaccctgccctcatgttcaggactcggaagaagaaatggcggagtttggggtctctcagccagggtagtacaaatgcaacagtgctagatgttgctcagacaggtggtcataaaaagcgggtacgtcgtagttcctttctcaatgccaaaaagctttatgaagatgcccaaatggctcgaaaagtgaagcagtacctttccaatttggagctagaaatggacgaggagagtcttcagacattatctctgcagtgtgagccagcaaccaacacattgcctaagaatcctggtgacaaaaagcctgtcaaatccgagacctctccagtagctccaagggcagggtcacaacagaaagctcagtccctgccacagccccagcagcagccaccaccagcacataaaatcaaccagggactacaggttcccgccgtgtccctttatccttcacggaagaaagtgcccgtaaaggatctcccaccttttggcataaactctccacaagctttaaaaaaaattctttctttgtctgaagaaggaagtttggaacgtcacaagaaacaggctgaagatacaatatcaaatgcatcttcgcagctttcttctcctcctacttctccacagagttctccaaggaaaggctatactttggctcccagtggtactgtggataatttttcagattctggtcacagtgaaatttcttcacgatccagtattgttagcaattcgtcttttgactcagtgccagtctcactgcacgatgagaggcgccagaggcattctgtcagcatcgtggaaacaaacctagggatgggcaggatggagaggcggaccatgattgaacctgatcagtatagcttggggtcctatgcaccaatgtccgagggccgaggcttatatgctacagctacagtaatttcttctccaagcacagaggaactttcccaggatcagggggatcgcgcgtcacttgatgctgctgacagtggccgtgggagctggacgtcatgctcaagtggctcccatgataatatacagacgatccagcaccagagaagctgggagactcttccattcgggcatactcactttgattattcaggggatcctgcaggtttatgggcatcaagcagccatatggaccaaattatgttttctgatcatagcacaaagtataacaggcaaaatcaaagtagagagagccttgaacaagcccagtcccgagcaagctgggcgtcttccacaggttactggggagaagactcagaaggtgacacaggcacaataaagcggaggggtggaaaggatgtttccattgaagccgaaagcagtagcctaacgtctgtgactacggaagaaaccaagcctgtccccatgcctgcccacatagctgtggcatcaagtactacaaaggggctcattgcacgaaaggagggcaggtatcgagagcccccgcccacccctcccggctacattggaattcccattactgactttccagaagggcactcccatccagccaggaaaccgccggactacaacgtggcccttcagagatcgcggatggtcgcacgatcctccgacacagctgggccttcatccgtacagcagccacatgggcatcccaccagcagcaggcctgtgaacaaacctcagtggcataaaccgaacgagtctgacccgcgcctcgccccctatcagtcccaagggttttccaccgaggaggatgaagatgaacaagtttctgctgtttgaggcacagacttttctggaagcagagcgagccacctgaaaggagagcacaagaagacgtcctgagcattggagccttggaactcacattctgaggacggtggaccagtttgcctccttccctgcctttactgtgaagaaattgccctggcacttttcagactttgttgcttgaaatgcacagtgcagcaatcttcgagctcccactgttgctgcctgccacatcacacagtatcattccaaattccaagatcatcacaacaagatgattcactctggctgcacttctcaatgcctggaaggattttttttaatcttccttttagatttcaatccagtcctagcacttgatctcattgggataatgagaaaagctagccattgaactacttggggcctttaacccaccaaggaagacaaagaaaaacaatgaaatcctttgagtacagtgcttgtccacttgtttacaatgtcctccttttaaaaaaaaaaatgagtttaaagattttgttcagagagtaaatatatatccatttaatgattacagtattattttaaaccttaagtagggttgccagcctggtttctgaaaaaccaaatatgccggacagggtgtggccacaccaagaagacgggaagacctggcttgtgaccctggcttcccatgtccttctggtctcacccgcgaagtgccctatcctggaagtatgaaatgttagccaattaataccaagacacctcatctgctccttccccagtggatggggttcttctgtaaaactgtttgcacatggccaggggagggaactaggacccttgtgtcctgtctgagccttatggaggcaggacggtgtcattggcggatgtgtcctgctccattgagatggatggcaaaccccatttttaagttatatttctttgatttttgttaatttagaggtgtaggttttgttttttgttttttgtttttttttaagagaaacatttataactggatagcattgcagtgaaagcagcttgggatgttggagctaatgccagctgtttatactgctctttcaagacagcctccctttattgaattggcattagggaataaacaagcctttaaacgtgataaaagatcaaaaacctggttagacatgccagcctttgcaaggcaggttagtcaccaaagactaacctccaagtggctttatggacgctgcatatagagaaggcctaagtgtagcaaccatctgctcacagctgctattaaccctataatgactgaaatgacccctccactctatttttgtgttgttttgcacagactccggaaaagtgaaggctgccaatctgagtagtactcaaatgtgaggaactgctggtcttggattttttttccattaaattcagctgatcatattgatcagtagataaacgtaaatagcttcaaattttaaaagtggaattgcagtgttttttcactgtatcaaacaatgtcagtgctttatttaataattctcttctgtatcatggcatttgtctacttgcttattacattgtcaattatgcatttgtaattttacatgtaatatgcattatttgccagttttattatataggctatggacctcatgtgcatatagaaagacagaaatctagctctaccacaagttgcacaaatgttatctaagcattaagtaattgtagaacataggactgctaatctcagttcgctctgtgatgtcaagtgcagaatgtacaattaactggtgatttcctcatacttttgatactacttgtacctgtatgtcttttagaaagacattggtggagtctgtatcccttttgtatttttaatacaataattgtacatattggttatatttttgttgaagatggtagaaatgtactatgtttatgcttctacatccagtttgtacaagctggaaaataaataaatataacataaagccttgcctata

SEQ ID NO: 429175 - DNA, 1740 bp, Homo sapiens
  misc_feature (23)..(23): n is a, c, g, or t
actagtccacggttggctactgnctttccatatgaccgaaagcagtagcctaacgtctgtgactactggaaggattttttttaatcttccttttagatttcaatccagtcctagcacttgatctcattgggataatgagaaaagctagccattgaactacttggggcctttaacccaccaaggaagacaaagaaaaacaatgaaatcctttgagtacagtgcttgtccacttgtttacaatgtcctccttttaaaaaaaaaaatgagtttaaagattttgttcagagagtaaatatatatccatttaatgattacagtattattttaaaccttaagtagggttgccagcctggtttctgaaaaaccaaatatgccggacagggtgtggccacaccaagaagacgggaagacctggcttgtgaccctggcttcccatgtccttctggtctcacccgcgaagtgccctatcctggaagtatgaaatgttagccaattaataccaagacacctcatctgctccttccccagtggatggggttcttctgtaaaactgtttgcacatggccaggggagggaactaggacccttgtgtcctgtctgagccttatggaggcaggacggtgtcattggcggatgtgtcctgctccattgagatggatggcaaaccccatttttaagttatatttctttgatttttgttaatttagaggtgtaggttttgttttttgttttttgtttttttttaagagaaacatttataactggatagcattgcagtgaaagcagcttgggatgttggagctaatgccagctgtttatactgctctttcaagacagcctccctttattgaattggcattagggaataaacaagcctttaaacgtgataaaagatcaaaaacctggttagacatgccagcctttgcaaggcaggttagtcaccaaagactaacctccaagtggctttatggacgctgcatatagagaaggcctaagtgtagcaaccatctgctcacagctgctattaaccctataatgactgaaatgacccctccactctatttttgtgttgttttgcacagactccggaaaagtgaaggctgccaatctgagtagtactcaaatgtgaggaactgctggtcttggattttttttccattaaattcagctgatcatattgatcagtagataaacgtaaatagcttcaaattttaaaagtggaattgcagtgttttttcactgtatcaaacaatgtcagtgctttatttaataattctcttctgtatcatggcatttgtctacttgcttattacattgtcaattatgcatttgtaattttacatgtaatatgcattatttgccagttttattatataggctatggacctcatgtgcatatagaaagacagaaatctagctctaccacaagttgcacaaatgttatctaagcattaagtaattgtagaacataggactgctaatctcagttcgctctgtgatgtcaagtgcagaatgtacaattaactggtgatttcctcatacttttgatactacttgtacctgtatgtcttttagaaagacattggtggagtctgtatcccttttgtatttttaatacaataattgtacatattggttatatttttgttgaagatggtagaaatgtactatgtttatgcttctacatccagtttgtacaagctggaaaataaataaatataacataaagccttgcctata

SEQ ID NO: 429176 - DNA, 1174 bp, Homo sapiens
cttgccatcgtgagagattggtacatgatgtgtaaattcagttcagcatatgtttcttcattatgaaaccactagcaatcccagctaaccatggagttatgggccagcaggagaaacactcacttcctgcagatttcacaaaactgcatcttactgacagtctccacccacaggtgacccacgtttcttctagccattcaggatgtagtatcactagtgattctgggagcagcagtctttctgatatctaccaggccacagaaagcgaggctggtgatatggacctgagtgggttgccagaaacagcagtggattccgaagacgacgacgatgaagaagacattgagagagcatcagatcctctgatgagcagggacattgtgagagactgcctagagaaggacccaattgaccggacagatgatgacattgaacaactcttggaatttatgcaccagttgcctgcttttgccaatatgacaatgtcagtgaggcgagaactctgtgctgtgatggtgttcgcagtggtggaaagagcagggaccatagtgttaaatgatggtgaagagctggactcctggtcagtgattctcaatggatctgtggaagtgacttatccagatggaaaagcagaaatactgtgcatgggaaatagttttggtgtctctcctaccatggacaaagaatacatgaaaggagtgatgagaacaaaggtggatgactgccagtttgtctgcatagcccagcaagattactgccgtattctcaatcaagtagaaaagaacatgcaaaaagttgaagaggaaggagagattgttatggtgaaagaacaccgagaacttgatcgaactggaacaagaaagggacacattgtcatcaagggtacctcagaaaggttaacaatgcatttggtggaagagcattcagtagtagatccaacattcatagaagactttctgttgacctataggacttttctttctagcccaatggaagtgggcaaaaagttattggagtggtttaatgacccgagcctcagggataaggttggaaatatattctattttgtctcttaaatatgaaatgtaaacctaaagatactttaatgtgtatatttgtcacagcaattatgtccagattaatgtaatgaaataggagaatgtaattctgaagc

SEQ ID NO: 429177 - DNA, 236 bp, Homo sapiens
gagaagactcagaaggtgacacaggcacaataaagcggaggggtggaaaggatgtttccattgaagccgaaagcagtagcctaacgtctgtgactacggaagaaaccaagcctgtccccatgcctgcccacatagctgtggcatcaagtactacaaaggggctcattggtaagttttaaaattgggggactttgtcatgtctggatcatgtctttaatgtaacttattacaatagt

SEQ ID NO: 429178 - DNA, 385 bp, Homo sapiens
ttattccttattctgtgaacttgttaaacagtaaacttgagttacttgttttatctccaaaatggaagatctgctaattcatttttagggaccatactggcacttacagctgtatgatcatgatgttactttctgctttgtctttatttttttggattagctggactcctggtcagtgattctcaatggatctgtggaagtgacttatccagatggaaaagcagaaatactgtgcatgggaaatagttttggtgtctctcctaccatggacaaagaatacatgaaaggagtgatgagaacaaaggtggatgactgccaggtataaaatatatcattaaaaatatatattttattcttaataaagaacacttatatgccattgtga

SEQ ID NO: 429179 - DNA, 4386 bp, Homo sapiens
tcgttattcctgaccaaaaatttaataggaggtggaatcactcatattttgttaaagtaattgttacatgtagtttctggtgcatacatagttgttggatggaaaaataaatataacaagcattattttgaatgaggcttgctcttgtttctttgggccccaaagatttatttacttaaaatagtttttaatttttgtgtgtgtgtcttaaggccacagaaagcgaggctggtgatatggacctgagtgggttgccagaaacagcagtggattccgaagacgacgacgatgaagaagacattgagagagcatcagatcctctgatgagcagggacattgtgagagactgcctagagaaggacccaattgaccggacagatgatgacattggtaagcttgaacaggaaaatgaatctacgaaggtaaacataaggcagagggtttccatctttgcttgaagaagcacagaataaatgccatgtgatttccttttcctcctctgtcaatttcaggaaatgactcaaaagtagacgggctggtcaattttgagaagctaaggatgattgcaaaagaaattcgtcacgttggccgaatggcttcagtgaacatggaccctgccctcatgttcaggactcggaagaagaaatggcggagtttggggtctctcagccagggtagtacaaatgcaacagtgctagatgttgctcagacaggtggtcataaaaagcgggtacgtcgtagttcctttctcaatgccaaaaagctttatgaagatgcccaaatggctcgaaaagtgaagcagtacctttccaatttggagctagaaatggacgaggagagtcttcagacattatctctgcagtgtgagccagcaaccaacacattgcctaagaatcctggtgacaaaaagcctgtcaaatccgagacctctccagtagctccaagggcagggtcacaacagaaagctcagtccctgccacagccccagcagcagccaccaccagcacataaaatcaaccagggactacaggttcccgccgtgtccctttatccttcacggaagaaagtgcccgtaaaggatctcccaccttttggcataaactctccacaagctttaaaaaaaattctttctttgtctgaagaaggaagtttggaacgtcacaagaaacaggctgaagatacaatatcaaatgcatcttcgcagctttcttctcctcctacttctccacagagttctccaaggaaaggctatactttggctcccagtggtactgtggataatttttcagattctggtcacagtgaaatttcttcacgatccagtattgttagcaattcgtcttttgactcagtgccagtctcactgcacgatgagaggcgccagaggcattctgtcagcatcgtggaaacaaacctagggatgggcaggatggagaggcggaccatgattgaacctgatcagtatagcttggggtcctatgcaccaatgtccgagggccgaggcttatatgctacagctacagtaatttcttctccaagcacagaggaactttcccaggatcagggggatcgcgcgtcacttgatgctgctgacagtggccgtgggagctggacgtcatgctcaagtggctcccatgataatatacagacgatccagcaccagagaagctgggagactcttccattcgggcatactcactttgattattcaggggatcctgcaggtttatgggcatcaagcagccatatggaccaaattatgttttctgatcatagcacaaagtataacaggcaaaatcaaagtagagagagccttgaacaagcccagtcccgagcaagctgggcgtcttccacaggttactggggagaagactcagaaggtgacacaggcacaataaagcggaggggtggaaaggatgtttccattgaagccgaaagcagtagcctaacgtctgtgactacggaagaaaccaagcctgtccccatgcctgcccacatagctgtggcatcaagtactacaaaggggctcattgcacgaaaggagggcaggtatcgagagcccccgcccacccctcccggctacattggaattcccattactgactttccagaagggcactcccatccagccaggaaaccgccggactacaacgtggcccttcagagatcgcggatggtcgcacgatcctccgacacagctgggccttcatccgtacagcagccacatgggcatcccaccagcagcaggcctgtgaacaaacctcagtggcataaaccgaacgagtctgacccgcgcctcgccccctatcagtcccaagggttttccaccgaggaggatgaagatgaacaagtttctgctgtttgaggcacagacttttctggaagcagagcgagccacctgaaaggagagcacaagaagacgtcctgagcattggagccttggaactcacattctgaggacggtggaccagtttgcctccttccctgccttaaaagcagcatggggcttcttctccccttcttcctttcccctttgcatgtgaaatactgtgaagaaattgccctggcacttttcagactttgttgcttgaaatgcacagtgcagcaatcttcgagctcccactgttgctgcctgccacatcacacagtatcattccaaattccaagatcatcacaacaagatgattcactctggctgcacttctcaatgcctggaaggattttttttaatcttccttttagatttcaatccagtcctagcacttgatctcattgggataatgagaaaagctagccattgaactacttggggcctttaacccaccaaggaagacaaagaaaaacaatgaaatcctttgagtacagtgcttgtccacttgtttacaatgtcctccttttaaaaaaaaaaatgagtttaaagattttgttcagagagtaaatatatatccatttaatgattacagtattattttaaaccttaagtagggttgccagcctggtttctgaaaaaccaaatatgccggacagggtgtggccacaccaagaagacgggaagacctggcttgtgaccctggcttcccatgtccttctggtctcacccgcgaagtgccctatcctggaagtatgaaatgttagccaattaataccaagacacctcatctgctccttccccagtggatggggttcttctgtaaaactgtttgcacatggccaggggagggaactaggacccttgtgtcctgtctgagccttatggaggcaggacggtgtcattggcggatgtgtcctgctccattgagatggatggcaaaccccatttttaagttatatttctttgatttttgttaatttagaggtgtaggttttgttttttgttttttgtttttttttaagagaaacatttataactggatagcattgcagtgaaagcagcttgggatgttggagctaatgccagctgtttatactgctctttcaagacagcctccctttattgaattggcattagggaataaacaagcctttaaacgtgataaaagatcaaaaacctggttagacatgccagcctttgcaaggcaggttagtcaccaaagactaacctccaagtggctttatggacgctgcatatagagaaggcctaagtgtagcaaccatctgctcacagctgctattaaccctataatgactgaaatgacccctccactctatttttgtgttgttttgcacagactccggaaaagtgaaggctgccaatctgagtagtactcaaatgtgaggaactgctggtcttggattttttttccattaaattcagctgatcatattgatcagtagataaacgtaaatagcttcaaattttaaaagtggaattgcagtgttttttcactgtatcaaacaatgtcagtgctttatttaataattctcttctgtatcatggcatttgtctacttgcttattacattgtcaattatgcatttgtaattttacatgtaatatgcattatttgccagttttattatataggctatggacctcatgtgcatatagaaagacagaaatctagctctaccacaagttgcacaaatgttatctaagcattaagtaattgtagaacataggactgctaatctcagttcgctctgtgatgtcaagtgcagaatgtacaattaactggtgatttcctcatacttttgatactacttgtacctgtatgtcttttagaaagacattggtggagtctgtatcccttttgtatttttaatacaataattgtacatattggttatatttttgttgaagatggtagaaatgtactatgtttatgcttctacatccagtttgtacaagctggaaaataaataaatataacataaagccttgcctata

SEQ ID NO: 429180 - DNA, 6565 bp, Homo sapiens
cttgccatcgtgagagattggtacatgatgtgtaaattcagttcagcatatgtttcttcattatgaaaccactagcaatcccagctaaccatggagttatgggccagcaggagaaacactcacttcctgcagatttcacaaaactgcatcttactgacagtctccacccacaggtgacccacgtttcttctagccattcaggatgtagtatcactagtgattctgggagcagcagtctttctgatatctaccaggccacagaaagcgaggctggtgatatggacctgagtgggttgccagaaacagcagtggattccgaagacgacgacgatgaagaagacattgagagagcatcagatcctctgatgagcagggacattgtgagagactgcctagagaaggacccaattgaccggacagatgatgacattgaacaactcttggaatttatgcaccagttgcctgcttttgccaatatgacaatgtcagtgaggcgagaactctgtgctgtgatggtgttcgcagtggtggaaagagcagggaccatagtgttaaatgatggtgaagagctggactcctggtcagtgattctcaatggatctgtggaagtgacttatccagatggaaaagcagaaatactgtgcatgggaaatagttttggtgtctctcctaccatggacaaagaatacatgaaaggagtgatgagaacaaaggtggatgactgccagtttgtctgcatagcccagcaagattactgccgtattctcaatcaagtagaaaagaacatgcaaaaagttgaagaggaaggagagattgttatggtgaaagaacaccgagaacttgatcgaactggaacaagaaagggacacattgtcatcaagggtacctcagaaaggttaacaatgcatttggtggaagagcattcagtagtagatccaacattcatagaagactttctgttgacctataggacttttctttctagcccaatggaagtgggcaaaaagttattggagtggtttaatgacccgagcctcagggataaggttacacgggtagtattattgtgggtaaataatcacttcaatgactttgaaggagatcctgcaatgactcgatttttagaagaatttgaaaacaatctggaaagagagaaaatgggtggacacctaaggctgttgaatatcgcgtgtgctgctaaagcaaaaagaagattgatgacgttaacaaaaccatcccgagaagctcctttgccttttatcttacttggaggctctgagaagggatttggaatctttgttgacagtgtagattcaggtagcaaagcaactgaagcaggcttgaaacggggggatcagatattagaagtaaatggccaaaactttgaaaacattcagctgtcaaaagctatggaaattcttagaaataacacacatttatctatcactgtgaaaaccaatttatttgtatttaaagaacttctaacaagattgtcagaagagaaaagaaatggtgccccccaccttcctaaaattggtgacattaaaaaggccagtcgctactccattccagatcttgctgtagatgtagaacaggtgataggacttgaaaaagtgaacaaaaaaagtaaagccaacactgtgggaggaaggaacaagctgaaaaagatactcgacaagactcggatcagtatcttgccacagaaaccatacaatgatattgggattggtcagtctcaagatgacagcatagtaggattaaggcagacaaagcacatcccaactgcattgcctgtcagtggaaccttatcatccagtaatcctgatttattgcagtcacatcatcgcattttagacttcagtgctactcctgacttgccagatcaagtgctaagggtttttaaggctgatcagcaaagccgctacatcatgatcagtaaggacactacagcaaaggaagtggtcattcaggctatcagggagtttgctgttactgccaccccggatcaatattcactatgtgaggtctctgtcacacctgagggagtaatcaaacaaagaagacttccagatcagctttccaaacttgcagacagaatacaactgagtggaaggtattatctgaaaaacaacatggaaacagaaactctttgttcagatgaagatgctcaggagttgttgagagagagtcaaatttccctccttcagctcagcactgtggaagttgcaacacagctctctatgcgaaattttgaactctttcgcaacattgaacctactgaatatatagatgatttatttaaactcagatcaaaaaccagctgtgccaacctgaagagatttgaagaagtcattaaccaggaaacattttgggtagcatctgaaattctcagagaaacaaaccagctgaagaggatgaagatcattaagcatttcatcaagatagcactgcactgtagggaatgcaagaattttaactcaatgtttgcaatcatcagtggcctaaacctggcaccagtggcaagactgcgaacgacctgggagaaacttcccaataaatacgaaaaactatttcaagatctccaagacctgtttgatccttccagaaacatggcaaaatatcgtaatgttctcaatagtcaaaatctacaacctcccataatccctctattcccagttatcaaaaaggatctcaccttccttcacgaaggaaatgactcaaaagtagacgggctggtcaattttgagaagctaaggatgattgcaaaagaaattcgtcacgttggccgaatggcttcagtgaacatggaccctgccctcatgttcaggactcggaagaagaaatggcggagtttggggtctctcagccagggtagtacaaatgcaacagtgctagatgttgctcagacaggtggtcataaaaagcgggtacgtcgtagttcctttctcaatgccaaaaagctttatgaagatgcccaaatggctcgaaaagtgaagcagtacctttccaatttggagctagaaatggacgaggagagtcttcagacattatctctgcagtgtgagccagcaaccaacacattgcctaagaatcctggtgacaaaaagcctgtcaaatccgagacctctccagtagctccaagggcagggtcacaacagaaagctcagtccctgccacagccccagcagcagccaccaccagcacataaaatcaaccagggactacaggttcccgccgtgtccctttatccttcacggaagaaagtgcccgtaaaggatctcccaccttttggcataaactctccacaagctttaaaaaaaattctttctttgtctgaagaaggaagtttggaacgtcacaagaaacaggctgaagatacaatatcaaatgcatcttcgcagctttcttctcctcctacttctccacagagttctccaaggaaaggctatactttggctcccagtggtactgtggataatttttcagattctggtcacagtgaaatttcttcacgatccagtattgttagcaattcgtcttttgactcagtgccagtctcactgcacgatgagaggcgccagaggcattctgtcagcatcgtggaaacaaacctagggatgggcaggatggagaggcggaccatgattgaacctgatcagtatagcttggggtcctatgcaccaatgtccgagggccgaggcttatatgctacagctacagtaatttcttctccaagcacagaggaactttcccaggatcagggggatcgcgcgtcacttgatgctgctgacagtggccgtgggagctggacgtcatgctcaagtggctcccatgataatatacagacgatccagcaccagagaagctgggagactcttccattcgggcatactcactttgattattcaggggatcctgcaggtttatgggcatcaagcagccatatggaccaaattatgttttctgatcatagcacaaagtataacaggcaaaatcaaagtagagagagccttgaacaagcccagtcccgagcaagctgggcgtcttccacaggttactggggagaagactcagaaggtgacacaggcacaataaagcggaggggtggaaaggatgtttccattgaagccgaaagcagtagcctaacgtctgtgactacggaagaaaccaagcctgtccccatgcctgcccacatagctgtggcatcaagtactacaaaggggctcattgcacgaaaggagggcaggtatcgagagcccccgcccacccctcccggctacattggaattcccattactgactttccagaagggcactcccatccagccaggaaaccgccggactacaacgtggcccttcagagatcgcggatggtcgcacgatcctccgacacagctgggccttcatccgtacagcagccacatgggcatcccaccagcagcaggcctgtgaacaaacctcagtggcataaaccgaacgagtctgacccgcgcctcgccccctatcagtcccaagggttttccaccgaggaggatgaagatgaacaagtttctgctgtttgaggcacagacttttctggaagcagagcgagccacctgaaaggagagcacaagaagacgtcctgagcattggagccttggaactcacattctgaggacggtggaccagtttgcctccttccctgccttaaaagcagcatggggcttcttctccccttcttcctttcccctttgcatgtgaaatactgtgaagaaattgccctggcacttttcagactttgttgcttgaaatgcacagtgcagcaatcttcgagctcccactgttgctgcctgccacatcacacagtatcattccaaattccaagatcatcacaacaagatgattcactctggctgcacttctcaatgcctggaaggattttttttaatcttccttttagatttcaatccagtcctagcacttgatctcattgggataatgagaaaagctagccattgaactacttggggcctttaacccaccaaggaagacaaagaaaaacaatgaaatcctttgagtacagtgcttgtccacttgtttacaatgtcctccttttaaaaaaaaaaatgagtttaaagattttgttcagagagtaaatatatatccatttaatgattacagtattattttaaaccttaagtagggttgccagcctggtttctgaaaaaccaaatatgccggacagggtgtggccacaccaagaagacgggaagacctggcttgtgaccctggcttcccatgtccttctggtctcacccgcgaagtgccctatcctggaagtatgaaatgttagccaattaataccaagacacctcatctgctccttccccagtggatggggttcttatggccaggggagggaactaggacccttgtgtcctgtctgagccttatggaggcaggacggtgtcattggcggatgtgtcctgctccattgagatggatggcaaaccccatttttaagttatatttctttgatttttgttaatttagaggtgtaggttttgttttttgttttttgtttttttttaagagaaacatttataactggatagcattgcagtgaaagcagcttgggatgttggagctaatgccagctgtttatactgctctttcaagacagcctccctttattgaattggcattagggaataaacaagcctttaaacgtgataaaagatcaaaaacctggttagacatgccagcctttgcaaggcaggttagtcaccaaagactaacctccaagtggctttatggacgctgcatatagagaaggcctaagtgtagcaaccatctgctcacagctgctattaaccctataatgactgaaatgacccctccactctatttttgtgttgttttgcacagactccggaaaagtgaaggctgccaatctgagtagtactcaaatgtgaggaactgctggtcttggattttttttccattaaattcagctgatcatattgatcagtagataaacgtaaatagcttcaaattttaaaagtggaattgcagtgttttttcactgtatcaaacaatgtcagtgctttatttaataattctcttctgtatcatggcatttgtctacttgcttattacattgtcaattatgcatttgtaattttacatgtaatatgcattatttgccagttttattatataggctatggacctcatgtgcatatagaaagacagaaatctagctctaccacaagttgcacaaatgttatctaagcattaagtaattgtagaacataggactgctaatctcagttcgctctgtgatgtcaagtgcagaatgtacaattaactggtgatttcctcatacttttgatactacttgtacctgtatgtcttttagaaagacattggtggagtctgtatcccttttgtatttttaatacaataattgtacatattggttatatttttgttgaagatggtagaaatgtactatgtttatgcttctacatccagtttgtacaagctggaaaataaataaatataacataaagccttgcctata

SEQ ID NO: 429181 - DNA, 3338 bp, Homo sapiens
  misc_feature (2617)..(2617): n is a, c, g, or t
  misc_feature (2726)..(2726): n is a, c, g, or t
attgtttttcagggtttttttgttttttgttttttaagcaagggctctattttcccttgagagttctggaactaagccttggagaaacactactgagtgtatttaggctccctggttttcttgcccaacaacaatctgaagggtagggggtgggggctgtgtcttactcaggggcagcacctagctgtcttgcctacagtgggtgcacgatatataaatggaattgatttttgtcaacactgtcaagagtggcattgactattggagcataccccgtccacatgatgcttgaactatgtaacttcaggggttgagggctcaaggttcaggttaaagaggcactgtcaacttactatacaagcataatttaggtttttcctttttctacttgaaaaggaccagcttaaacacaaacccttatgtaaattaaaaggtttgaatccaaagcagagagaactgcttctggaaaagtgtagtttaattttaactattctaaaagcaatgagcaaaggcccttgtccaaggcgttgacagttttctaaagtggttatgctgtatatctggatgcatgcctttgggctgccactgcttgattcctttcatgtacagataatattacttcagtttagatttcccactttaaaatgcagtgatttgtgttgaatacatcttgattgtgctttacctaaagtattttcttaaaaggcttgtgtaaaatttaaatgtatatattttcctgtagacttccatcatgattttcagagattagccttaaaaaatttggccctaagaaattcattcagtgtttttctagatgacctctgtacatagaggtcattatagtggagaccctttaccagcagcattttaagatttaaattagatagaaagtttcttaggattcaactgaaaattggctagtaaaatatgtcccaggtaataaagcatgctgactttgctaaggcactgcccatttttatttaactaaagtcatggagattttgagtttaaaggatgcagtatagatagtggtttagtgtttaggctctaatgccagtctaaaaggcaagtcatttaaccttgggagcctcagtttcctcactgtaaaacagggataataatagtaactacctcagggttgttgtaaggattaaatgagatgatatttgtaagatacttagctcaagtgcctggcacacaatgagcacactctataaatgttctactactactattattaacacctagtctagggatgcacagcagaatcccctagggttaaaaaacaaaacaaaacaaacaaaaaaaactgacggaatagccccactccagatcagaattcccagtgggctggggtctcggccagtgtattctccagtaatctcgccaggtgtttgaaacacccagtgctatctgaaaactatcagtaccccaaccctttgctttatagattaagaaactagcagaagatggttaaattacttgcctattgtctcagaacggttaattagtggcagagccaaggctagaattcaagtctcttgactttatggttgtggggtctttccaccatacctgctgccatgtgagacactgcaaaaaagtggctcagaccgacaatcagcctgtgtggtgctgcacactttctaaagcacatgctcctgacactttgaccttaaggggcttgaatgtggagtaatgggaacacaagccaagcaagcactcagtagaattcagtcatttaaaaaattcaatggggtcattcttttggacagacctcagcaacacagcaatgtgcactttgtagtaaagaaataccaacttgagtttttaaaaaacctagttagtcctacattcccttttctttaaaaaaactttattgttcacattattttaatgactatgagataatgtatatgacagcactttgagaaaatatcaactgtaatataactataaggttgtagtattgtctgtttaaaagataagacagttgattcaatgtggatggaccctgtggggtacctgaaaatgtagatacgtaagaatcacctctgtcatttatcacatttagaaatatgaaactgcttaacaggtatgagcaggtatagcaagtgtttgctaaagttgtagttcagagctgaattacttcaggaaactagggaccaactttttggtttaattccgatctttaaaaagtaagaatgtgtactcactccagaacacagaagctcttccaaggaccttgactcaagaaggatgaggtcctcttactcttctccatttatccactatatgcttggccatttatcctaaatgtggtgggaacagacttgttatctgttgatgttgacagtgtcttttttaacctatgtcctgcatagttttgttaggtttacagggggaggtggatggccataaaaccagtgcactttgggaattacttttctaggatttcctaccagttataaatgacattgacatttgtcatcttttttttctttttctaaaaagaatagctgaatttaattcacctattataaaatactcaaaagtaaattgcattggtggccacttctgaattatagctacatttcattatgaccccttctgctcncttccattttgctactgatgtcattcttgttatcaggctgtgcccctaccaggagttcatattgggttgacagggttatctatatttttgttcttgatttttgagtttnatcatcttgcattaaattgttccacctggatttggggttcatctctgtgccctaaggatctgctatgaccaatcctctttttgtaggtgggtctctggcttaagtattgataggcttcagcggtttgtgtctctgtcttagcttgtatcaagccagtagtagctcacttcctttgtaaattcctgcttcagtctgggatccgtaggagtatgtgagaacttctgaaacgtctccaactcttaacagtcaagatatctatatcatttggatagagttctggttttccaactactagacttaaagaaattctggccgggtgcggtggctcacgcctgtaatcccagcactttggggggctgaggcgggtggatcacgaggtcaggagattgagaccatcctggctaacacggtgaaaccccacctctactaaaaatacaaaaacttagctgggcgtggtggcgggcgcctgtagtcccagctactggggaggctgaggcaggagaatggcgtgaacccaggaggcggagcttgcagtgagcccagatcgcgccactgcactccagcctgggtgacagtgagactccgtctcaaaaaaaaaaaaaaaaaaaaaaa

SEQ ID NO: 429182 - DNA, 3086 bp, Homo sapiens
  misc_feature (2617)..(2617): n is a, c, g, or t
  misc_feature (2726)..(2726): n is a, c, g, or t
  misc_feature (3056)..(3056): n is a, c, g, or t
attgtttttcagggtttttttgttttttgttttttaagcaagggctctattttcccttgagagttctggaactaagccttggagaaacactactgagtgtatttaggctccctggttttcttgcccaacaacaatctgaagggtagggggtgggggctgtgtcttactcaggggcagcacctagctgtcttgcctacagtgggtgcacgatatataaatggaattgatttttgtcaacactgtcaagagtggcattgactattggagcataccccgtccacatgatgcttgaactatgtaacttcaggggttgagggctcaaggttcaggttaaagaggcactgtcaacttactatacaagcataatttaggtttttcctttttctacttgaaaaggaccagcttaaacacaaacccttatgtaaattaaaaggtttgaatccaaagcagagagaactgcttctggaaaagtgtagtttaattttaactattctaaaagcaatgagcaaaggcccttgtccaaggcgttgacagttttctaaagtggttatgctgtatatctggatgcatgcctttgggctgccactgcttgattcctttcatgtacagataatattacttcagtttagatttcccactttaaaatgcagtgatttgtgttgaatacatcttgattgtgctttacctaaagtattttcttaaaaggcttgtgtaaaatttaaatgtatatattttcctgtagacttccatcatgattttcagagattagccttaaaaaatttggccctaagaaattcattcagtgtttttctagatgacctctgtacatagaggtcattatagtggagaccctttaccagcagcattttaagatttaaattagatagaaagtttcttaggattcaactgaaaattggctagtaaaatatgtcccaggtaataaagcatgctgactttgctaaggcactgcccatttttatttaactaaagtcatggagattttgagtttaaaggatgcagtatagatagtggtttagtgtttaggctctaatgccagtctaaaaggcaagtcatttaaccttgggagcctcagtttcctcactgtaaaacagggataataatagtaactacctcagggttgttgtaaggattaaatgagatgatatttgtaagatacttagctcaagtgcctggcacacaatgagcacactctataaatgttctactactactattattaacacctagtctagggatgcacagcagaatcccctagggttaaaaaacaaaacaaaacaaacaaaaaaaactgacggaatagccccactccagatcagaattcccagtgggctggggtctcggccagtgtattctccagtaatctcgccaggtgtttgaaacacccagtgctatctgaaaactatcagtaccccaaccctttgctttatagattaagaaactagcagaagatggttaaattacttgcctattgtctcagaacggttaattagtggcagagccaaggctagaattcaagtctcttgactttatggttgtggggtctttccaccatacctgctgccatgtgagacactgcaaaaaagtggctcagaccgacaatcagcctgtgtggtgctgcacactttctaaagcacatgctcctgacactttgaccttaaggggcttgaatgtggagtaatgggaacacaagccaagcaagcactcagtagaattcagtcatttaaaaaattcaatggggtcattcttttggacagacctcagcaacacagcaatgtgcactttgtagtaaagaaataccaacttgagtttttaaaaaacctagttagtcctacattcccttttctttaaaaaaactttattgttcacattattttaatgactatgagataatgtatatgacagcactttgagaaaatatcaactgtaatataactataaggttgtagtattgtctgtttaaaagataagacagttgattcaatgtggatggaccctgtggggtacctgaaaatgtagatacgtaagaatcacctctgtcatttatcacatttagaaatatgaaactgcttaacaggtatgagcaggtatagcaagtgtttgctaaagttgtagttcagagctgaattacttcaggaaactagggaccaactttttggtttaattccgatctttaaaaagtaagaatgtgtactcactccagaacacagaagctcttccaaggaccttgactcaagaaggatgaggtcctcttactcttctccatttatccactatatgcttggccatttatcctaaatgtggtgggaacagacttgttatctgttgatgttgacagtgtcttttttaacctatgtcctgcatagttttgttaggtttacagggggaggtggatggccataaaaccagtgcactttgggaattacttttctaggatttcctaccagttataaatgacattgacatttgtcatcttttttttctttttctaaaaagaatagctgaatttaattcacctattataaaatactcaaaagtaaattgcattggtggccacttctgaattatagctacatttcattatgaccccttctgctcncttccattttgctactgatgtcattcttgttatcaggctgtgcccctaccaggagttcatattgggttgacagggttatctatatttttgttcttgatttttgagtttnatcatcttgcattaaattgttccacctggatttggggttcatctctgtgccctaaggatctgctatgaccaatcctctttttgtaggtgggtctctggcttaagtattgataggcttcagcggtttgtgtctctgtcttagcttgtatcaagccagtagtagctcacttcctttgtaaattcctgcttcagtctgggatccgtaggagtatgtgagaacttctgaaacgtctccaactcttaacagtcaagatatctatatcatttggatagagttctggttttccaactactagacttaaagaaattctggccgggtgcggtggccctncgtgtatcctctagagtcagctatgaaatg

SEQ ID NO: 429183 - DNA, 1682 bp, Homo sapiens
ccagagcaggctgctaggcctggggccaccactgcccctgggtgctacacccagtgtgctgggtcactgggaacttcctgaagtggtgtcacctgaactgggcccccaaggatggggtgcgggcagtaccgcaggaagaggagcagcccctgtgaagattgagagctgccagaggctctgtgattggctgcggcacgatgacccgcgcacggattggctgcttcgggccggggggccgggcccgggggacagaatccgcccccgaaccttcaaagagggtaccccccggcaggagcggggcagacctaggaggtgcgacagacccgcggggcaaacggactggggccaagagccgggagcgcgggcgcaaaggcaccagggcccgcccagggcgccgcgcagcacggccttgggggttctgcgggccttcgggtgcgcgtctcgcctctagccatggggtccgcagcgttggagatcctgggcctggtgctgtgcctggtgggctgggggggtctgatcctggcgtgcgggctgcccatgtggcaggtgaccgccttcctggaccacaacatcgtgacggcgcagaccacctggaaggggctgtggatgtcgtgcgtggtgcagagcaccgggcacatgcagtgcaaagtgtacgactcggtgctggctctgagcaccgaggtgcaggcggcgcgggcgctcaccgtgagcgccgtgctgctggcgttcgttgcgctcttcgtgaccctggcgggcgcgcagtgcaccacctgcgtggccccgggcccggccaaggcgcgtgtggccctcacgggaggcgtgctctacctgttttgcgggctgctggcgctcgtgccactctgctggttcgccaacattgtcgtccgcgagttttacgacccgtctgtgcccgtgtcgcagaagtacgagctgggcgcagcgctgtacatcggctgggcggccaccgcgctgctcatggtaggcggctgcctcttgtgctgcggcgcctgggtctgcaccggccgtcccgacctcagcttccccgtgaagtactcagcgccgcggcggcccacggccaccggcgactacgacaagaagaactacgtctgagggcgctgggcacggccgggcccctcctgccagccacgcctgcgaggcgttggataagcctggggagccccgcatggaccgcggcttccgccgggtagcgcggcgcgcaggctcctcggaacgtccggctctgcgccccgacgcggctcctggatccgctcctgcctgcgcccgcagctgaccttctcctgccactagcccggccctgcccttaacagacggaatgaagtttccttttctgtgcgcggcgctgtttccataggcagagcgggtgtcagactgaggatttcgcttcccctccaagacgctgggggtcttggctgctgccttacttcccagaggctcctgctgacttcggaggggcggatgcagagcccagggcccccaccggaagatgtgtacagctggtctttactccatcggcagggcccgagcccagggaccagtgacttggcctggacctcccggtctcactccagcatctccccaggcaaggcttgtgggcaccggagcttgagagagggcgggagtgggaaggctaagaatctgcttagtaaatggtttgaactctc

SEQ ID NO: 429184 - DNA, 1893 bp, Homo sapiens
  misc_feature (1691)..(1691): n is a, c, g, or t
ccagagcaggctgctaggcctggggccaccactgcccctgggtgctacacccagtgtgctgggtcactgggaacttcctgaagtggtgtcacctgaactgggcccccaaggatggggtgcgggcagtaccgcaggaagaggagcagcccctgtgaagattgagagctgccagaggctctgtgattggctgcggcacgatgacccgcgcacggattggctgcttcgggccggggggccgggcccgggggacagaatccgcccccgaaccttcaaagagggtaccccccggcaggagcggggcagacctaggaggtgcgacagacccgcggggcaaacggactggggccaagagccgggagcgcgggcgcaaaggcaccagggcccgcccagggcgccgcgcagcacggccttgggggttctgcgggccttcgggtgcgcgtctcgcctctagccatggggtccgcagcgttggagatcctgggcctggtgctgtgcctggtgggctgggggggtctgatcctggcgtgcgggctgcccatgtggcaggtgaccgccttcctggaccacaacatcgtgacggcgcagaccacctggaaggggctgtggatgtcgtgcgtggtgcagagcaccgggcacatgcagtgcaaagtgtacgactcggtgctggctctgagcaccgaggtgcaggcggcgcgggcgctcaccgtgagcgccgtgctgctggcgttcgttgcgctcttcgtgaccctggcgggcgcgcagtgcaccacctgcgtggccccgggcccggccaaggcgcgtgtggccctcacgggaggcgtgctctacctgttttgcgggctgctggcgctcgtgccactctgctggttcgccaacattgtcgtccgcgagttttacgacccgtctgtgcccgtgtcgcagaagtacgagctgggcgcagcgctgtacatcggctgggcggccaccgcgctgctcatggtaggcggctgcctcttgtgctgcggcgcctgggtctgcaccggccgtcccgacctcagcttccccgtgaagtactcagcgccgcggcggcccacggccaccggcgactacgacaagaagaactacgtctgagggcgctgggcacggccgggcccctcctgccagccacgcctgcgaggcgttggataagcctggggagccccgcatggaccgcggcttccgccgggtagcgcggcgcgcaggctcctcggaacgtccggctctgcgccccgacgcggctcctggatccgctcctgcctgcgcccgcagctgaccttctcctgccactagcccggccctgcccttaacagacggaatgaagtttccttttctgtgcgcggcgctgtttccataggcagagcgggtgtcagactgaggatttcgcttcccctccaagacgctgggggtcttggctgctgccttacttcccagaggctcctgctgacttcggaggggcggatgcagagcccagggcccccaccggaagatgtgtacagctggtctttactccatcggcagggcccgagcccagggaccagtgacttggcctggacctcccggtctcactccagcatctccccaggcaaggcttgtgggcaccggagcttgagagagggcgggagtgggaaggctaagaatctgcttagtaaatggtttgaactctcaaaaaaaanaaaactcgagggggccggtaccaatcggccaagtgagtgatacactcctggcgacgtcacgcctgatggcacctgggaccataatcctgagatcccttgaccgggataaaagtcaaaggctcacaggccactgaggactggcgagcgcatgtagcatacacgggaccatggtggcgccatgctggccattgcgggggtggtg

SEQ ID NO: 429185 - DNA, 779 bp, Homo sapiens
ccagagcaggctgctaggcctggggccaccactgcccctgggtgctacacccagtgtgctgggtcactgggaacttcctgaagtggtgtcacctgaactgggcccccaaggatggggtgcgggcagtaccgcaggaagaggagcagcccctgtgaagattgagagctgccagaggctctgtgattggctgcggcacgatgacccgcgcacggattggctgcttcgggccggggggccgggcccgggggacagaatccgcccccgaaccttcaaagagggtaccccccggcaggagcggggcagacctaggaggtgcgacagacccgcggggcaaacggactggggccaagagccgggagcgcgggcgcaaaggcaccagggcccgcccagggcgccgcgcagcacggccttgggggttctgcgggccttcgggtgcgcgtctcgcctctagccatggggtccgcagcgttggagatcctgggcctggtgctgtgcctggtgggctgggggggtctgatcctggcgtgcgggctgcccatgtggcaggtgaccgccttcctggaccacaacatcgtgacggcgcagaccaccccaccggaagatgtgtacagctggtctttactccatcggcagggcccgagcccagggaccagtgacttggcctggacctcccggtctcactccagcatctccccaggcaaggcttgtgggcaccggagcttgagagagggcgggagtgggaaggctaagaatctgcttagtaaatggtttgaactctc

SEQ ID NO: 429186 - DNA, 484 bp, Homo sapiens
cggcacgagtccttttctgtgcgcggcgctgtttccataggcagagcgggtgtcagactgaggatttcgcttcccctccaagacgctgggggtcttggctgctgccttacttcccagaggctgccagccacgcctgcgaggcgttggataagcctggggagccccgcatggaccgcggcttccgccgggtagcgcggcgcgcaggctcctcggaacgtccggctctgcgccccgacgcggctcctggatccgctcctgcctgcgcccgcagctgaccttctcctgccactagccccccaccggaagatgtgtacagctggtctttactccatcggcagggcccgagcccagggaccagtgacttggcctggacctcccggtctcactccagcatctccccaggcaaggcttgtgggcaccggagcttgagagagggcgggagtgggaaggctaagaatctgcttagtaaatggtttgaactctc

SEQ ID NO: 429187 - DNA, 1918 bp, Homo sapiens
ccagagcaggctgctaggcctggggccaccactgcccctgggtgctacacccagtgtgctgggtcactgggaacttcctgaagtggtgtcacctgaactgggcccccaaggatggggtgcgggcagtaccgcaggaagaggagcagcccctgtgaagattgagagctgccagaggctctgtgattggctgcggcacgatgacccgcgcacggattggctgcttcgggccggggggccgggcccgggggacagaatccgcccccgaaccttcaaagagggtaccccccggcaggagcggggcagacctaggaggtgcgacagacccgcggggcaaacggactggggccaagagccgggagcgcgggcgcaaaggcaccagggcccgcccagggcgccgcgcagcacggccttgggggttctgcgggccttcgggtgcgcgtctcgcctctagccatggggtccgcagcgttggagatcctgggcctggtgctgtgcctggtgggctgggggggtctgatcctggcgtgcgggctgcccatgtggcaggtgaccgccttcctggaccacaacatcgtgacggcgcagaccacctggaaggggctgtggatgtcgtgcgtggtgcagagcaccgggcacatgcagtgcaaagtgtacgactcggtgctggctctgagcaccgaggtgcaggcggcgcgggcgctcaccgtgagcgccgtgctgctggcgttcgttgcgctcttcgtgaccctggcgggcgcgcagtgcaccacctgcgtggccccgggcccggccaaggcgcgtgtggccctcacgggaggcgtgctctacctgttttgcgggctgctggcgctcgtgccactctgctggttcgccaacattgtcgtccgcgagttttacgacccgtctgtgcccgtgtcgcagaagtacgagctgggcgcagcgctgtacatcggctgggcggccaccgcgctgctcatggtaggcggctgcctcttgtgctgcggcgcctgggtctgcaccggccgtcccgacctcagcttccccgtgaagtactcagcgccgcggcggcccacggccaccggcgactacgacaagaagaactacgtctgagggcgctgggcacggccgggcccctcctgccagccacgcctgcgaggcgttggataagcctggggagccccgcatggaccgcggcttccgccgggtagcgcggcgcgcaggctcctcggaacgtccggctctgcgccccgacgcggctcctggatccgctcctgcctgcgcccgcagctgaccttctcctgccactagcccggccctgcccttaacagacggaatgaagtttccttttctgtgcgcggcgctgtttccataggcagagcgggtgtcagactgaggatttcgcttcccctccaagacgctgggggtcttggctgctgccttacttcccagaggctcctgctgacttcggaggggcggatgcagagcccagggcccccaccggaagatgtgtacagctggtctttactccatcggcagggcccgagcccagggaccagtgacttggcctggacctcccggtctcactccagcatctccccaggcaaggcttgtgggcaccggagcttgagagagggcgggagtgggaaggctaagaatctgcttagtaaatggtttgaactctcaaaaaaaaaaaaaaaaaaaaaaaaaaaaaaaaaaaaaaaaaaaaaaaaaaaaaaaaaaaaaaaaaaaaaaaaaaagaaaaaaaaacaaaacaaagaaggaaaaaaaaaaaaacaacgaaagagggggggcgaacacaaaagaagtctacccacaaggagagaacgcggcaaaaaaagagaacacaagcacaacacaatgagagcaaaaaaagaaaagcaaccacgaaaaaaaggcg

SEQ ID NO: 429188 - DNA, 1194 bp, Homo sapiens
tcaagcttctaacgatgtacggggacatgtcttactactttgaccgcgatgatgtggctttgaagaactttgccaaatactttcttcaccaatctcatgaaaggcttttattgaaaactaagcaaacaaagatataggagcctgtattataatgaaaaatgcctaagttaaagatgcaattaagttaaatattttaaaaccaaagattaaagaggcagtctagacaattagactgtgcctacaacagtctgtctctaggaatcaggttcattcaggacatcaaggaatgtctgaagaggtttttagagcatgcttcagtgttaggacaggagcaatggaagaatgagacaataaactaagtaattgggaaggagaaagcttttttggagaaaaagttgatagagaacaagtcaaatagatataaaaggaaaaatgaaattgaagaacagaccaacacataaaagggaaaagatgttgtacttagggtttaattcatattagcagttgtttttttaagtggctaaacgttttcaagtttatttggggacagaaatggcaacttggacccaaagaaatctaacaagaatagaaggaaaatctcagcaaactgtactgactcctagatggagcaagagcataggccactattggcgaaggactctatgtagctctaagctacatagagactccttgataaaaaccactgggaactgctcttcaaagactgggacagtgatacgaagtgtaccctgaaagtcaggacaatttgagaggaaatatcagatgaaagcaaaacattcaaggaattattggatgaatttccagttgttactataattatagataggcatacaagagcttcttgtgtcccaaaggaaatgtgcctgagaaatttttagaattaagacagaattaaggcaacaagatggaagataacagaagagagccaggcaggacagtgataaatggaatccaagctcagatcagctgttaatccaattagaaaatgcaagccagttaagattatctaactcagaaaggtgagggcggccaagattttttggacaatggttgcttttggcagaccaaaacctactgacttatctctcacaactgaagtccccattagataaatctagaaccaaatgttagataagcacatgtccggcccagaaaagagagaaagttaaaaaa

SEQ ID NO: 429189 - DNA, 2242 bp, Homo sapiens
ggggactagccttgcagtgttttagactgttttgaaattctgttctttagaagagattttttttttcttcttaatatcaaacaaagaactgctgctattcctttgggctggcgcagcaggggccggtgaaatgcaggctgacgacggcgcgccaggggctgagctcgccccggtcggcgacgcgcacacaccttgagtgacagcgacctcttctctacaggttttccccgcgggagcgtggccctagcgggcgttcggttttctttggaaatcgcggagggggctggccgggcgcagcgatccccaccccgggactccagccccggccgtgcgcgtcgccgcggacgggctctgcgggccacggggaaggtgcgaggaggcgcgagcaggctgtgagccgctgggcgctcccgcgagcccgctcctctccgtcgggagcagggcaaaggcgccaggaacagggcagaggcacagcgcccaccgcctctgcggccgcctgatgtgcgagcagcccgcgacgaggcagtgcacgctcagacgccccgctcctcccgccagcgcgcggcctcgctcctcctagaggacgctctctgcgcgggccctcggaggaggcggcggcggggcgagctgcagcgccgggacaggaggtttgtccccgcccgcgcgccgtaccgcggcggagatgggcgagaccatgtcaaagaggctgaagctccacctgggaggggaggcagaaatggaggaacgggcgttcgtcaaccccttcccggactacgaggccgccgccggggcgctgctcgcctccggagcggccgaagagacaggctgtgttcgtcccccggcgaccacggatgagcccggcctcccttttcatcaggacgggaagatcattcataatttcataagacggatccagaccaaaattaaagatcttctgcagcaaatggaagaagggctgaagacagctgatccccatgactgctctgcttatactggctggacaggcatagcccttttgtacctgcagttgtaccgggtcacatgtgaccaaacctacctgctccgatccctggattacgtaaaaagaacacttcggaatctgaatggccgcagggtcaccttcctctgtggggatgctggccccctggctgttggagctgtgatttatcacaaactcagaagtgactgtgagtcccaggaatgtgtcacaaaacttttgcagctccagagatcggttgtctgccaagaatcagaccttcctgatgagctgctttatggacgggcaggttatctgtatgccttactgtacctgaacacagagataggtccaggcaccgtgtgtgagtcagctattaaagaggtagtcaatgctattattgaatcgggtaagactttgtcaagggaagaaagaaaaacggagcgctgcccgctgttgtaccagtggcaccggaagcagtacgttggagcagcccatggcatggctggaatttactatatgttaatgcagccggcagcaaaagtggaccaagaaaccttgacagaaatggtgaaacccagtattgattatgtgcgccacaaaaaattccgatctgggaattacccatcatcattaagcaatgaaacagaccggctggtgcactggtgccacggcgccccgggggtcatccacatgctcatgcaggcgtacaaggtctttaaggaggagaagtacttgaaagaggccatggagtgtagcgatgtgatttggcagcgaggtttgctgcggaagggctacgggatatgccatgggactgctggcaacggctattccttcctgtccctttaccgtctcacgcaggataagaagtacctctaccgagcttgcaagtttgcagagtggtgtctagattacggagcacacgggtgccgcattcctgacagaccctattcgctctttgaaggcatggctggcgctattcactttctctctgatgtcctgggaccagagacatcacggtttccagcatttgaacttgactcttcgaagagggattaaaaggtgcaaaaagacaactaaaatacccatttggaccaaaagccgccagattgcttagtgcctgacacagaaacaactgggaatcctgaaagagaagcagacaccgtcacaggcccctctggttagactagcatgagtgaccgaagccatccatcaacattttctaacagcaccctcatcaatataaaatatgacttcttcacatac

SEQ ID NO: 429190 - DNA, 610 bp, Homo sapiens
ctttaacatagaaaaacaaaagggtttccggaagccctcaacaaaggaagggtcaacaaggtttcaacaaccacaaaggtggcctaggatgcgggtgtctccccaggtgagtccatccacacacgtttgaaaaacactattagtctttctaacacactgagggaaagattaaaatctgtggaataaaggaggagattttatttacagatttttttaaaagccacctgggttgacaccttcctacttatccactagatgtcatcagaggtgctgttccgtggttctgcattaacccctgcctcatgtctgtaacatgtgacagtaattccagctcggtccctccaggcaaaggagaaacgggacttacttcacaggacagaggattgacagaagtcagtttaagataagtgtttgaatcagatttcagaacatctcattcatttcttagatttgtgttcacaattgtgttctctaaaatgtgtctaaattttaaaaatatgtacatgcataatgtcattttaaaatctgaaggaaagaatttgaagtccacaaaaagtgtttgaggttctttggttttgttagtaaaagccagttctgtggtgatgaccta

SEQ ID NO: 429191 - DNA, 963 bp, Homo sapiens
ggggactagccttgcagtgttttagactgttttgaaattctgttctttagaagagattttttttttcttcttaatatcaaacaaagaactgctgctattcctttgggctggcgcagcaggggccggtgaaatgcaggctgacgacggcgcgccaggggctgagctcgccccggtcggcgacgcgcacacaccttgagtgacagcgacctcttctctacaggttttccccgcgggagcgtggccctagcgggcgttcggttttctttggaaatcgcggagggggctggccgggcgcagcgatccccaccccgggactccagccccggccgtgcgcgtcgccgcggacgggctctgcgggccacggggaaggtgcgaggaggcgcgagcaggctgtgagccgctgggcgctcccgcgagcccgctcctctccgtcgggagcagggcaaaggcgccaggaacagggcagaggcacagcgcccaccgcctctgcggccgcctgatgtgcgagcagcccgcgacgaggcagtgcacgctcagacgccccgctcctcccgccagcgcgcggcctcgctcctcctagaggacgctctctgcgcgggccctcggaggaggcggcggcggggcgagctgcagcgccgggacaggaggtttgtccccgcccgcgcgccgtaccgcggcggagatgggcgagaccatgtcaaagaggctgaagctccacctgggaggggaggcagaaatggaggaacgggcgttcgtcaaccccttcccggactacgaggccgccgccggggcgctgctcgcctccggagcggccgaagagacaggctgtgttcgtcccccggcgaccacggatgagcccggcctcccttttcatcaggacgggaagggtccacattccacagagagacacaattttgtgggtatagcccggcctggattttagtcgtctgtagtcgtgacttg

SEQ ID NO: 429192 - DNA, 3785 bp, Homo sapiens
accacagttctcagcctccagcccagaagagttacattaggaactctagagaaaacatgctctcagggagatgataagcaactcatgctgaagaatttttttttcagagcttccaaatattctactttcatatccgtttgactcaacatctttaaagaaatggataatgatgaaagacttcaaaaagtgttaaggattaatttgaaagagaagttatataccctgaatagaaaaattgaagaaagaagaagctagatatttggagaaatttaaaaagcaaaatgaggctgggtgcagtggttcacgcctgttaatcccagcactttgggaggccaaggcatagcccttttgtacctgcagttgtaccgggtcacatgtgaccaaacctacctgctccgatccctggattacgtaaaaagaacacttcggaatctgaatggccgcagggtcaccttcctctgtggggatgctggccccctggctgttggagctgtgatttatcacaaactcagaagtgactgtgagtcccaggaatgtgtcacaaaacttttgcagctccagagatcggttgtctgccaagaatcagaccttcctgatgagctgctttatggacgggcaggttatctgtatgccttactgtacctgaacacagagataggtccaggcaccgtgtgtgagtcagctattaaagaggtagtcaatgctattattgaatcgggtaagactttgtcaagggaagaaagaaaaacggagcgctgcccgctgttgtaccagtggcaccggaagcagtacgttggagcagcccatggcatggctggaatttactatatgttaatgcagccggcagcaaaagtggaccaagaaaccttgacagaaatggtgaaacccagtattgattatgtgcgccacaaaaaattccgatctgggaattacccatcatcattaagcaatgaaacagaccggctggtgcactggtgccacggcgccccgggggtcatccacatgctcatgcaggcgtacaaggtctttaaggaggagaagtacttgaaagaggccatggagtgtagcgatgtgatttggcagcgaggtttgctgcggaagggctacgggatatgccatgggactgctggcaacggctattccttcctgtccctttaccgtctcacgcaggataagaagtacctctaccgagcttgcaagtttgcagagtggtgtctagattacggagcacacgggtgccgcattcctgacagaccctattcgctctttgaaggcatggctggcgctattcactttctctctgatgtcctgggaccagagacatcacggtttccagcatttgaacttgactcttcgaagagggattaaaaggtgcaaaaagacaactaaaatacccatttggaccaaaagccgccagattgcttagtgcctgacacagaaacaactgggaatcctgaaagagaagcagacaccgtcacaggcccctctggttagactagcatgagtgaccgaagccatccatcaacattttctaacagcaccctcatcaatataaaatatgacttcttcacatacagattctctgtagtgtttgcatgtttcttggtgtttgttgtctccaggtgtaagctgttttaaatggaaggcccttctattcctgagggctcagagctgaccatgcatgaatgtatggcagtgtccacttttctgtataaaatgtataaagtggggtttcttccatattgacaaatgagggaacaggtggtgtctatcttgtatatcagaaagattatctagggtctatcctagtgataatacattgtcagccttttctgtggcaccttccagatgagaatgagggagcgaccactccaaggacggacaggaccagcagttctgcaggggcgtgctggggtggtttgggagtgcacagctgaacgcttcctgtttggattttacactcaccttcgtgttttaaagaagcctcagagtgcactgcagctctgtcagggccccattcccagcagaggcttcaggtgctttgtgtagagtccagggcagctggagctttgttggggagacttctggacccaaagggagctttcccaagaagcctttgatggccacactgtaggcagcagtgactaagcactggcagttccagaacatttacccaggtatatgttactaaaacaggctccacctcagtttatcaacattataagttactgttctaagaaaagtaaatacagttccagatgggttattgcagattaacagaaagacactcaactggactcatgtccctgcaattaaacttacttcaaccttttggaaagttatcaaaatctaaatttggaatgaatgcatttcctattttttgtctacttttgggtgataaaaagtactagcccttatttatagatatgagaaacataatgttctaaccaacaacattatggtatttgtgtgacttttatttgaaaaaatgtgagcagtaatttgggttagcctaccttcattaattctatcacatagatttcagtttttagaagggtttctgtcatcatggaagaggtggtctgggactaggtacttctcgtcttgtgagctaaggcttgtgtcatgaaagacaagaggcctctcttaacagcccagtccttgtctgcagggggaggcctgagcatttcccagccccagtgtccacacctctcagaaaagagaaaaaagaatgtcagtttaggagaaaagcttcctttttacttgtgtggttatgtgtggggctggcacccgaaatgtgtgacattcagcttctaaacgatgcctggagagtctgtttgctgcagacacccttgctcctgagtcattattttctttcatgttagattgatgacttctgtgaatagaaatcatcctgatcctattttacctggcctccagggcctgttgatgggctttgcaggcagtccagcagcccacacctgcaggcaggatgctgtcgtcaatgagctgagggtagctgctttgctgaagacctcacacgatgtccaatctcatccaaataacattgttcccatcctccccacccaccacatcaaaacataacacatcacagcactcagtagaggtcctgcctccccatttctcaagggaagccagtaggcaacacagccagcacggtgctctccagggcagcccctctcagacgaggaggcagcgggtgcagccaggtgtctgcagagcagccacaaaggtggcctaggatgcgggtgtctccccaggtgagtccatccacacacgtttgaaaaacactattagtctttctaacacactgagggaaagattaaaatctgtggaataaaggaggagattttatttacagatttttttaaaagccacctgggttgacaccttcctacttatccactagatgtcatcagaggtgctgttccgtggttctgcattaacccctgcctcatgtctgtaacatgtgacagtaattccagctcggtccctccaggcaaaggagaaacgggacttacttcacaggacagaggattgacagaagtcagtttaagataagtgtttgaatcagatttcagaacatctcattcatttcttagatttgtgttcacaattgtgttctctaaaatgtgtctaaattttaaaaatatgtacatgcataatgtcattttaaaatctgaaggaaagaatttgaagtccacaaaaagtgtttgaggttctttggttttgttagtaaaagccagttctgtggtgatgaccta

SEQ ID NO: 429193 - DNA, 2620 bp, Homo sapiens
aacatctattactttctgaagacttctcaaccccatttgcagagtggtgtctagattacggagcacacgggtgccgcattcctgacagaccctattcgctctttgaaggcatggctggcgctattcactttctctctgatgtcctgggaccagagacatcacggtttccagcatttgaacttgactcttcgaagagggattaaaaggtgcaaaaagacaactaaaatacccatttggaccaaaagccgccagattgcttagtgcctgacacagaaacaactgggaatcctgaaagagaagcagacaccgtcacaggcccctctggttagactagcatgagtgaccgaagccatccatcaacattttctaacagcaccctcatcaatataaaatatgacttcttcacatacagattctctgtagtgtttgcatgtttcttggtgtttgttgtctccaggtgtaagctgttttaaatggaaggcccttctattcctgagggctcagagctgaccatgcatgaatgtatggcagtgtccacttttctgtataaaatgtataaagtggggtttcttccatattgacaaatgagggaacaggtggtgtctatcttgtatatcagaaagattatctagggtctatcctagtgataatacattgtcagccttttctgtggcaccttccagatgagaatgagggagcgaccactccaaggacggacaggaccagcagttctgcaggggcgtgctggggtggtttgggagtgcacagctgaacgcttcctgtttggattttacactcaccttcgtgttttaaagaagcctcagagtgcactgcagctctgtcagggccccattcccagcagaggcttcaggtgctttgtgtagagtccagggcagctggagctttgttggggagacttctggacccaaagggagctttcccaagaagcctttgatggccacactgtaggcagcagtgactaagcactggcagttccagaacatttacccaggtatatgttactaaaacaggctccacctcagtttatcaacattataagttactgttctaagaaaagtaaatacagttccagatgggttattgcagattaacagaaagacactcaactggactcatgtccctgcaattaaacttacttcaaccttttggaaagttatcaaaatctaaatttggaatgaatgcatttcctattttttgtctacttttgggtgataaaaagtactagcccttatttatagatatgagaaacataatgttctaaccaacaacattatggtatttgtgtgacttttatttgaaaaaatgtgagcagtaatttgggttagcctaccttcattaattctatcacatagatttcagtttttagaagggtttctgtcatcatggaagaggtggtctgggactaggtacttctcgtcttgtgagctaaggcttgtgtcatgaaagacaagaggcctctcttaacagcccagtccttgtctgcagggggaggcctgagcatttcccagccccagtgtccacacctctcagaaaagagaaaaaagaatgtcagtttaggagaaaagcttcctttttacttgtgtggttatgtgtggggctggcacccgaaatgtgtgacattcagcttctaaacgatgcctggagagtctgtttgctgcagacacccttgctcctgagtcattattttctttcatgttagattgatgacttctgtgaatagaaatcatcctgatcctattttacctggcctccagggcctgttgatgggctttgcaggcagtccagcagcccacacctgcaggcaggatgctgtcgtcaatgagctgagggtagctgctttgctgaagacctcacacgatgtccaatctcatccaaataacattgttcccatcctccccacccaccacatcaaaacataacacatcacagcactcagtagaggtcctgcctccccatttctcaagggaagccagtaggcaacacagccagcacggtgctctccagggcagcccctctcagacgaggaggcagcgggtgcagccaggtgtctgcagagcagccacaaaggtggcctaggatgcgggtgtctccccaggtgagtccatccacacacgtttgaaaaacactattagtctttctaacacactgagggaaagattaaaatctgtggaataaaggaggagattttatttacagatttttttaaaagccacctgggttgacaccttcctacttatccactagatgtcatcagaggtgctgttccgtggttctgcattaacccctgcctcatgtctgtaacatgtgacagtaattccagctcggtccctccaggcaaaggagaaacgggacttacttcacaggacagaggattgacagaagtcagtttaagataagtgtttgaatcagatttcagaacatctcattcatttcttagatttgtgttcacaattgtgttctctaaaatgtgtctaaattttaaaaatatgtacatgcataatgtcattttaaaatctgaaggaaagaatttgaagtccacaaaaagtgtttgaggttctttggttttgttagtaaaagccagttctgtggtgatgaccta

SEQ ID NO: 429194 - DNA, 1196 bp, Homo sapiens
cggtgctctccagggcagcccctctcagacgaggaggcaccgggtgcagccaggtgtcttcagagcagccacaaaggtggcctaggatgcgggtgtctccccaggtgagtctgtccacacctctcagaaaagagaaaaaagaatgtcagtttaggagaaaagcttcctttttacttgtgtggttatgtgtggggctggcacccgaaatgtgtgacattcagcttctaaacgatgcctggagagtctgtttgctgcagacacccttgctcctgagtcattattttctttcatgttagattgatgacttctgtgaatagaaatcatcctgatcctattttacctggcctccagggcctgttgatgggctttgcaggcagtccagcagcccacacctgcaggcaggatgctgtcgtcaatgagctgagggtagctgctttgctgaagacctcacacgatgtccaatctcatccaaataacattgttcccatcctccccacccaccacatcaaaacataacacatcacagcactcagtagaggtcctgcctccccatttctcaagggaagccagtaggcaacacagccagcacggtgctctccagggcagcccctctcagacgaggaggcagcgggtgcagccaggtgtctgcagagcagccacaaaggtggcctaggatgcgggtgtctccccaggtgagtccatccacacacgtttgaaaaacactattagtctttctaacacactgagggaaagattaaaatctgtggaataaaggaggagattttatttacagatttttttaaaagccacctgggttgacaccttcctacttatccactagatgtcatcagaggtgctgttccgtggttctgcattaacccctgcctcatgtctgtaacatgtgacagtaattccagctcggtccctccaggcaaaggagaaacgggacttacttcacaggacagaggattgacagaagtcagtttaagataagtgtttgaatcagatttcagaacatctcattcatttcttagatttgtgttcacaattgtgttctctaaaatgtgtctaaattttaaaaatatgtacatgcataatgtcattttaaaatctgaaggaaagaatttgaagtccacaaaaagtgtttgaggttctttggttttgttagtaaaagccagttctgtggtgatgaccta

SEQ ID NO: 429195 - DNA, 4452 bp, Homo sapiens
ggggactagccttgcagtgttttagactgttttgaaattctgttctttagaagagattttttttttcttcttaatatcaaacaaagaactgctgctattcctttgggctggcgcagcaggggccggtgaaatgcaggctgacgacggcgcgccaggggctgagctcgccccggtcggcgacgcgcacacaccttgagtgacagcgacctcttctctacaggttttccccgcgggagcgtggccctagcgggcgttcggttttctttggaaatcgcggagggggctggccgggcgcagcgatccccaccccgggactccagccccggccgtgcgcgtcgccgcggacgggctctgcgggccacggggaaggtgcgaggaggcgcgagcaggctgtgagccgctgggcgctcccgcgagcccgctcctctccgtcgggagcagggcaaaggcgccaggaacagggcagaggcacagcgcccaccgcctctgcggccgcctgatgtgcgagcagcccgcgacgaggcagtgcacgctcagacgccccgctcctcccgccagcgcgcggcctcgctcctcctagaggacgctctctgcgcgggccctcggaggaggcggcggcggggcgagctgcagcgccgggacaggaggtttgtccccgcccgcgcgccgtaccgcggcggagatgggcgagaccatgtcaaagaggctgaagctccacctgggaggggaggcagaaatggaggaacgggcgttcgtcaaccccttcccggactacgaggccgccgccggggcgctgctcgcctccggagcggccgaagagacaggctgtgttcgtcccccggcgaccacggatgagcccggcctcccttttcatcaggacgggaagatcattcataatttcataagacggatccagaccaaaattaaagatcttctgcagcaaatggaagaagggctgaagacagctgatccccatgactgctctgcttatactggctggacaggcatagcccttttgtacctgcagttgtaccgggtcacatgtgaccaaacctacctgctccgatccctggattacgtaaaaagaacacttcggaatctgaatggccgcagggtcaccttcctctgtggggatgctggccccctggctgttggagctgtgatttatcacaaactcagaagtgactgtgagtcccaggaatgtgtcacaaaacttttgcagctccagagatcggttgtctgccaagaatcagaccttcctgatgagctgctttatggacgggcaggttatctgtatgccttactgtacctgaacacagagataggtccaggcaccgtgtgtgagtcagctattaaagaggtagtcaatgctattattgaatcgggtaagactttgtcaagggaagaaagaaaaacggagcgctgcccgctgttgtaccagtggcaccggaagcagtacgttggagcagcccatggcatggctggaatttactatatgttaatgcagccggcagcaaaagtggaccaagaaaccttgacagaaatggtgaaacccagtattgattatgtgcgccacaaaaaattccgatctgggaattacccatcatcattaagcaatgaaacagaccggctggtgcactggtgccacggcgccccgggggtcatccacatgctcatgcaggcgtacaaggtctttaaggaggagaagtacttgaaagaggccatggagtgtagcgatgtgatttggcagcgaggtttgctgcggaagggctacgggatatgccatgggactgctggcaacggctattccttcctgtccctttaccgtctcacgcaggataagaagtacctctaccgagcttgcaagtttgcagagtggtgtctagattacggagcacacgggtgccgcattcctgacagaccctattcgctctttgaaggcatggctggcgctattcactttctctctgatgtcctgggaccagagacatcacggtttccagcatttgaacttgactcttcgaagagggattaaaaggtgcaaaaagacaactaaaatacccatttggaccaaaagccgccagattgcttagtgcctgacacagaaacaactgggaatcctgaaagagaagcagacaccgtcacaggcccctctggttagactagcatgagtgaccgaagccatccatcaacattttctaacagcaccctcatcaatataaaatatgacttcttcacatacagattctctgtagtgtttgcatgtttcttggtgtttgttgtctccaggtgtaagctgttttaaatggaaggcccttctattcctgagggctcagagctgaccatgcatgaatgtatggcagtgtccacttttctgtataaaatgtataaagtggggtttcttccatattgacaaatgagggaacaggtggtgtctatcttgtatatcagaaagattatctagggtctatcctagtgataatacattgtcagccttttctgtggcaccttccagatgagaatgagggagcgaccactccaaggacggacaggaccagcagttctgcaggggcgtgctggggtggtttgggagtgcacagctgaacgcttcctgtttggattttacactcaccttcgtgttttaaagaagcctcagagtgcactgcagctctgtcagggccccattcccagcagaggcttcaggtgctttgtgtagagtccagggcagctggagctttgttggggagacttctggacccaaagggagctttcccaagaagcctttgatggccacactgtaggcagcagtgactaagcactggcagttccagaacatttacccaggtatatgttactaaaacaggctccacctcagtttatcaacattataagttactgttctaagaaaagtaaatacagttccagatgggttattgcagattaacagaaagacactcaactggactcatgtccctgcaattaaacttacttcaaccttttggaaagttatcaaaatctaaatttggaatgaatgcatttcctattttttgtctacttttgggtgataaaaagtactagcccttatttatagatatgagaaacataatgttctaaccaacaacattatggtatttgtgtgacttttatttgaaaaaatgtgagcagtaatttgggttagcctaccttcattaattctatcacatagatttcagtttttagaagggtttctgtcatcatggaagaggtggtctgggactaggtacttctcgtcttgtgagctaaggcttgtgtcatgaaagacaagaggcctctcttaacagcccagtccttgtctgcagggggaggcctgagcatttcccagccccagtgtccacacctctcagaaaagagaaaaaagaatgtcagtttaggagaaaagcttcctttttacttgtgtggttatgtgtggggctggcacccgaaatgtgtgacattcagcttctaaacgatgcctggagagtctgtttgctgcagacacccttgctcctgagtcattattttctttcatgttagattgatgacttctgtgaatagaaatcatcctgatcctattttacctggcctccagggcctgttgatgggctttgcaggcagtccagcagcccacacctgcaggcaggatgctgtcgtcaatgagctgagggtagctgctttgctgaagacctcacacgatgtccaatctcatccaaataacattgttcccatcctccccacccaccacatcaaaacataacacatcacagcactcagtagaggtcctgcctccccatttctcaagggaagccagtaggcaacacagccagcacggtgctctccagggcagcccctctcagacgaggaggcagcgggtgcagccaggtgtctgcagagcagccacaaaggtggcctaggatgcgggtgtctccccaggtgagtccatccacacacgtttgaaaaacactattagtctttctaacacactgagggaaagattaaaatctgtggaataaaggaggagattttatttacagatttttttaaaagccacctgggttgacaccttcctacttatccactagatgtcatcagaggtgctgttccgtggttctgcattaacccctgcctcatgtctgtaacatgtgacagtaattccagctcggtccctccaggcaaaggagaaacgggacttacttcacaggacagaggattgacagaagtcagtttaagataagtgtttgaatcagatttcagaacatctcattcatttcttagatttgtgttcacaattgtgttctctaaaatgtgtctaaattttaaaaatatgtacatgcataatgtcattttaaaatctgaaggaaagaatttgaagtccacaaaaagtgtttgaggttctttggttttgttagtaaaagccagttctgtggtgatgaccta

SEQ ID NO: 429196 - DNA, 4576 bp, Homo sapiens
ggggactagccttgcagtgttttagactgttttgaaattctgttctttagaagagattttttttttcttcttaatatcaaacaaagaactgctgctattcctttgggctggcgcagcaggggccggtgaaatgcaggctgacgacggcgcgccaggggctgagctcgccccggtcggcgacgcgcacacaccttgagtgacagcgacctcttctctacaggttttccccgcgggagcgtggccctagcgggcgttcggttttctttggaaatcgcggagggggctggccgggcgcagcgatccccaccccgggactccagccccggccgtgcgcgtcgccgcggacgggctctgcgggccacggggaaggtgcgaggaggcgcgagcaggctgtgagccgctgggcgctcccgcgagcccgctcctctccgtcgggagcagggcaaaggcgccaggaacagggcagaggcacagcgcccaccgcctctgcggccgcctgatgtgcgagcagcccgcgacgaggcagtgcacgctcagacgccccgctcctcccgccagcgcgcggcctcgctcctcctagaggacgctctctgcgcgggccctcggaggaggcggcggcggggcgagctgcagcgccgggacaggaggtttgtccccgcccgcgcgccgtaccgcggcggagatgggcgagaccatgtcaaagaggctgaagctccacctgggaggggaggcagaaatggaggaacgggcgttcgtcaaccccttcccggactacgaggccgccgccggggcgctgctcgcctccggagcggccgaagagacaggctgtgttcgtcccccggcgaccacggatgagcccggcctcccttttcatcaggacgggaagatcattcataatttcataagacggatccagaccaaaattaaagatcttctgcagcaaatggaagaagggctgaagacagctgatccccatgactgctctgcttatactggctggacaggcatagcccttttgtacctgcagttgtaccgggtcacatgtgaccaaacctacctgctccgatccctggattacgtaaaaagaacacttcggaatctgaatggccgcagggtcaccttcctctgtggggatgctggccccctggctgttggagctgtgatttatcacaaactcagaagtgactgtgagtcccaggaatgtgtcacaaaacttttgcagctccagagatcggttgtctgccaagaatcagaccttcctgatgagctgctttatggacgggcaggttatctgtatgccttactgtacctgaacacagagataggtccaggcaccgtgtgtgagtcagctattaaagaggtagtcaatgctattattgaatcgggtaagactttgtcaagggaagaaagaaaaacggagcgctgcccgctgttgtaccagtggcaccggaagcagtacgttggagcagcccatggcatggctggaatttactatatgttaatgcagccggcagcaaaagtggaccaagaaaccttgacagaaatggtgaaacccagtattgattatgtgcgccacaaaaaattccgatctgggaattacccatcatcattaagcaatgaaacagaccggctggtgcactggtgccacggcgccccgggggtcatccacatgctcatgcaggcgtacaaggtctttaaggaggagaagtacttgaaagaggccatggagtgtagcgatgtgatttggcagcgaggtttgctgcggaagggctacgggatatgccatgggactgctggcaacggctattccttcctgtccctttaccgtctcacgcaggataagaagtacctctaccgagcttgcaagtttgcagagtggtgtctagattacggagcacacgggtgccgcattcctgacagaccctattcgctctttgaaggcatggctggcgctattcactttctctctgatgtcctgggaccagagacatcacggtttccagcatttgaacttgactcttcgaagagggattaaaaggtgcaaaaagacaactaaaatacccatttggaccaaaagccgccagattgcttagtgcctgacacagaaacaactgggaatcctgaaagagaagcagacaccgtcacaggcccctctggttagactagcatgagtgaccgaagccatccatcaacattttctaacagcaccctcatcaatataaaatatgacttcttcacatacagattctctgtagtgtttgcatgtttcttggtgtttgttgtctccaggtgtaagctgttttaaatggaaggcccttctattcctgagggctcagagctgaccatgcatgaatgtatggcagtgtccacttttctgtataaaatgtataaagtggggtttcttccatattgacaaatgagggaacaggtggtgtctatcttgtatatcagaaagattatctagggtctatcctagtgataatacattgtcagccttttctgtggcaccttccagatgagaatgagggagcgaccactccaaggacggacaggaccagcagttctgcaggggcgtgctggggtggtttgggagtgcacagctgaacgcttcctgtttggattttacactcaccttcgtgttttaaagaagcctcagagtgcactgcagctctgtcagggccccattcccagcagaggcttcaggtgctttgtgtagagtccagggcagctggagctttgttggggagacttctggacccaaagggagctttcccaagaagcctttgatggccacactgtaggcagcagtgactaagcactggcagttccagaacatttacccaggtatatgttactaaaacaggctccacctcagtttatcaacattataagttactgttctaagaaaagtaaatacagttccagatgggttattgcagattaacagaaagacactcaactggactcatgtccctgcaattaaacttacttcaaccttttggaaagttatcaaaatctaaatttggaatgaatgcatttcctattttttgtctacttttgggtgataaaaagtactagcccttatttatagatatgagaaacataatgttctaaccaacaacattatggtatttgtgtgacttttatttgaaaaaatgtgagcagtaatttgggttagcctaccttcattaattctatcacatagatttcagtttttagaagggtttctgtcatcatggaagaggtggtctgggactaggtacttctcgtcttgtgagctaaggcttgtgtcatgaaagacaagaggcctctcttaacagcccagtccttgtctgcagggggaggcctgagcatttcccagccccagtgtccacacctctcagaaaagagaaaaaagaatgtcagtttaggagaaaagcttcctttttacttgtgtggttatgtgtggggctggcacccgaaatgtgtgacattcagcttctaaacgatgcctggagagtctgtttgctgcagacacccttgctcctgagtcattattttctttcatgttagattgatgacttctgtgaatagaaatcatcctgatcctattttacctggcctccagggcctgttgatgggctttgcaggcagtccagcagcccacacctgcaggcaggatgctgtcgtcaatgagctgagggtagctgctttgctgaagacctcacacgatgtccaatctcatccaaataacattgttcccatcctccccacccaccacatcaaaacataacacatcacagcactcagtagaggtcctgcctccccatttctcaagggaagccagtaggcaacacagccagcacggtgctctccagggcagcccctctcagacgaggaggcagcgggtgcagccaggtgtctgcagagcagccacaaaggtggcctaggatgcgggtgtctccccaggtgagtccatccacacacgtttgaaaaacactattagtctttctaacacactgagggaaagattaaaatctgtggaataaaggaggagattttatttacagatttttttaaaagccacctgggttgacaccttcctacttatccactagatgtcatcagaggtgctgttccgtggttctgcattaacccctgcctcatgtctgtaacatgtgacagtaattccagctcggtccctccaggcaaaggagaaacgggacttacttcacaggacagaggattgacagaagtcagtttaagataagtgtttgaatcagatttcagaacatctcattcatttcttagatttgtgttcacaattgtgttctctaaaatgtgtctaaattttaaaaatatgtacatgcataatgtcattttaaaatctgaaggaaagaatttgaagtccacaaaaagtgtttgaggttctttggttttgttagtaaaagccagttctgtggtgatgacctaaaaaaaaaacacaaaggggggcgtttaaagtacctcagggccacttccttccgttttgcaagggccaacggggataataggcgccgtacatcgtggactggctcggctggagcccctgggcatg

SEQ ID NO: 429197 - DNA, 1379 bp, Homo sapiens
  misc_feature (1348)..(1348): n is a, c, g, or t
  misc_feature (1351)..(1351): n is a, c, g, or t
  misc_feature (1359)..(1359): n is a, c, g, or t
ggggactagccttgcagtgttttagactgttttgaaattctgttctttagaagagattttttttttcttcttaatatcaaacaaagaactgctgctattcctttgggctggcgcagcaggggccggtgaaatgcaggctgacgacggcgcgccaggggctgagctcgccccggtcggcgacgcgcacacaccttgagtgacagcgacctcttctctacaggttttccccgcgggagcgtggccctagcgggcgttcggttttctttggaaatcgcggagggggctggccgggcgcagcgatccccaccccgggactccagccccggccgtgcgcgtcgccgcggacgggctctgcgggccacggggaaggtgcgaggaggcgcgagcaggctgtgagccgctgggcgctcccgcgagcccgctcctctccgtcgggagcagggcaaaggcgccaggaacagggcagaggcacagcgcccaccgcctctgcggccgcctgatgtgcgagcagcccgcgacgaggcagtgcacgctcagacgccccgctcctcccgccagcgcgcggcctcgctcctcctagaggacgctctctgcgcgggccctcggaggaggcggcggcggggcgagctgcagcgccgggacaggaggtttgtccccgcccgcgcgccgtaccgcggcggagatgggcgagaccatgtcaaagaggctgaagctccacctgggaggggaggcagaaatggaggaacgggcgttcgtcaaccccttcccggactacgaggccgccgccggggcgctgctcgcctccggagcggccgaagagacaggctgtgttcgtcccccggcgaccacggatgagcccggcctcccttttcatcaggacgggaagatcattcataatttcataagacggatccagaccaaaattaaagatcttctgcagcaaatggaagaagggctgaagacagctgatccccatgactgctctgcttatactggctggacaggcatagcccttttgtacctgcagttgtaccgggtcacatgtgaccaaacctacctgctccgatccctggattacgtaaaaagaacacttcggaatctgaatggccgcagggtcaccttcctctgtggggatgctggccccctggctgttggagctgtgatttatcacaaactcagaagtgactgtgagtcccaggaatgtgtcacaaaacttttgcagctccagagatcggttgtctgccaagaatcagaccttcctgatgagctgctttatggacgggcaggttatctgtatgccttactgtacctgaacacagagataggtccagggcagaggaccaacgtngangcggccgngaatttagtagtagtcgacc

SEQ ID NO: 429198 - DNA, 293 bp, Homo sapiens
ttgcagaatcagccgtgtacgtagtacctcctcttggacgtctggcaggcatcttcagtgtcatgtgtcaaaagcagagagctcttggtttgtcctctcagcctcttcctgctccactggtagccccatctccctaagtggcagtgcagttcactcagcaactcaagcaaaaacctgactcttccttgtctcttctcttccctcctttcataaccatgagcaaatcctgttgattctgcctttaaaatatatcctggctgagctcagtggctcatgcctataatctcagcact

SEQ ID NO: 429199 - DNA, 2645 bp, Homo sapiens
ctaaatccaagcatactgcaggataagaggatgcaaggttgtgagtaccaggaggcagggatcattggaggcctttggttttggggtcaaggaggtgctttatcttagttctcccactaccatctaacttgccaaaattatttcttctcctggattagtttattatcaaattggcaggcttttatgaggattaaatgaggtcatagatttatgtaaaatgtttgacataaaataggctctcaaaaagatagctattgttttgaaaaaatagaaatcaagtggccaatgagcccagatttgatttttttaaattagatatttgacttactcacatttctaaattttgacattctgagaatccattttagtacctgacttgagagttctgacagtctaagaattttgaaaatactgatgttcttaaataatttatttttgctttagaggcttgataagacattcagatattcctagattcatataggtgtttttttaagtccataaaataaagcttcatggtttgaagtaattcacggaatttgaaaaatatgcataaacagtctatgctgcctgggaggaaaagtctttttaagttaaacttatttactatagttatgatttatatatttaagaaaatgttctttatagagatttgttcatatgtattgttgacttgttttaatgatataaattggtgtattgctcccccaccttttattttgagaaaatttaaaccgttttttagatacaaaaaatatgattgtcatgtagaatgatattattaacatcttaaaaatcacctgtgccgggcacggtggctcacgcctgtaatcccagcactttaggaggctgaggtgggaggatcacctgaggtcaggagttcaagactagcctggccaacatggtgaaaccccatctctaataaaaatacaaaaattagccgggcgtgatggcacgtgcctgtagtcacagctactcaggaggctgaggcaggagaaccacttgaacttgggaggtggaggttgcagtgagccgagatcacaccactgcactccagcctgggcaatagagtcggactcttgtctaaaaaaaaaaaagaaaagaaaagaaatgacctgctaataaagtaatagaatggaaaaaacaaaacaaaacgaaacaaaaaaaaaaacaaaaaaggaagcataaagtatctagacaaggtgttatctggatttctggtactgttgaacataattagatgtcacatgatcagttacaatcaaaatctctttttgggtgattgagttttgctttagaatgctaatatcatggcattttcatattctaggttatctgtataagcagtaagatgccaaatatgtcagatagacatgttttggataaatcatggctgcttgaaaaagaaatccaactccagtctcccaaaaagcaaacacacaacccaacccattaatttacatttggtttgtctgaagtgatttgaactgtaattctgtaagtggaaatagaggtttgtgcaaaagtaatcacagtttttaattggcattttaatggcaaaaactgcaattacgttcacaccaacctatacatacttaaattgttttcttttgatacaagtgattttataaaatacaccactggccctccatatttgttgattccacatcagtgaattcaacgaactttggactgaaagtatttgagaaaaaatattgcatctgtattgaaatgtacagacttttttccttgttatttcctaaacaatacagtataacaactatttacataatattcacattgtagagtattaggtattataaataatccagagatgagttaaagtgtatgggaggatgtgcatagtttatatgcaaacagccatttttatatcaagggcttgagcagcaagtgtggtcctggaaccaatctcccatggatattgagggagagaactgtatatgataccattataagctgagggatggagagatgacacttgtcatcttaatagtttaaacccttcctactatttttttagtgagaggtaagtaagcttgaatcattccaggccaatattcttttactctcaattccttctattaatataccaccttccatcccaccaatcccctcaaaattatacagtgatatccaaatgcctaatggttcaaggagaggagagaaacaacaaaatactctcgttgttgttcttggatccaaatcattatcttgctgcattttccctatcatagcacactcccaatttctttcatgagtcattggtaatgagagttctgagtacttgttaatcttgctgtacttgtcaatttaaggcagtatcgttttcaaaacaaagcttgattatcattgacctgaactgagagttttttatttagtgtttaataatttcatttaacgacttaagttcttaaaaatttaaagtttgattatactttggaggatcacagattgttccataaccttaagcctccaactatttccgactttcactagaggatcatatatgcttcatggaaatgagtttattaaagctgtctagagtcacatatggttttttctaaatgaattgcttgcttaggcttacttgctttttaggttacctgttgcactagattgaggca

SEQ ID NO: 429200 - DNA, 265 bp, Homo sapiens
ggaggcagtgacactgtgggaggcaactcaggaggattgctttagcgctgaggagttgaagaccagcctgggcaacaaaaaaacaaaaaaattacccgggcagaaggtgaagcatcccaactgactagagactcaggccctgcagggccctatagaacctgtggccatccctgagcaccctgccaccaggtgacctcggccatactcactgccccccttgggcacccactcaccctagaataaacttaacagtgtcccgtggtaa

SEQ ID NO: 429201 - DNA, 2651 bp, Homo sapiens
gaagacccgcccgcggctccgtaggtgcccggcccgcccctcgcagcctcctgacttcccttcctgtcctcagcggccgggcccacggccccgagcagccatgctgggcgcgcgggcctggttgggccgcgtccttctgctgccccgcgccggtgcaggcctcgccgcgagccgcaggggtagctcctcccgggacaaggaccgaagtgcgacggtcagtagttcagtgcccatgcctgctggagggaaaggaagccatccttcatctacaccccagagggtccccaaccgcctgatccacgagaagtcaccatacctcctacaacatgcctacaatcctgtggactggtacccctggggacaggaagccttcgacaaggccaggaaggaaaacaagccgattttcctctcagtcgggtactccacctgccactggtgccacatgatggaagaggagtccttccagaatgaggagattggccgcctgctcagtgaggactttgtgagtgtgaaggtagaccgtgaggagcggcctgacgtggacaaggtgtacatgacgttcgtgcaggccaccagcagcggcgggggctggcccatgaatgtgtggctgactcccaacctccagccctttgtcgggggcacctatttccctcctgaggatggcttgacccgagtcggcttccgcacagtgttgctgagaatacgagaacagtggaaacagaacaagaacaccctgctagaaaatagccagcgtgtcaccactgccctgctggcccgatcagagatcagcgtgggtgaccgccagctgccgccctctgccgccaccgtgaacaatcgctgcttccagcagctggatgagggctatgatgaggaatacggtggcttcgctgaggcccccaagtttcccacgccggtgatcctgagcttcctgttctcctactggctcagccatcgactgactcaggatggctctcgggcccagcagatggccttgcataccctgaaaatgatggctaacgggggcatccgggaccatgtggggcagggctttcaccgctactccacagaccgccagtggcacgtccctcactttgagaagatgctctatgaccaggcacagctcgctgtggcctattcgcaggccttccagctctctggtgatgaattctactctgacgtggccaaaggcatcctgcagtacgtggctcggagcctgagccaccggtccggaggcttctatagcgcagaagatgcagactcgcccccagagcggggccagcggcccaaagagggcgcctactatgtgtggacggtcaaagaggttcagcagctcctcccggagcctgtgttgggtgccaccgagccgctgacctcaggccagctcctcatgaagcactacggcctcacagaggctggtaacatcagccccagtcaggaccccaagggggagctgcagggccagaatgtgctgaccgtccggtactcgctggagctgactgctgcccgctttggcttggatgtggaggccgtgcggaccttgctcaattcagggctggagaagctcttccaggcccggaagcatcggcccaagccgcacctggacagcaagatgctggctgcctggaatggcttgatggtgtcaggctatgctgtgactggggctgtcctgggccaagacaggctgatcaactatgccaccaatggtgccaagttcctgaagcggcacatgtttgatgtggccagtggccgcctgatgcggacctgctacaccggccctggggggactgtggagcacagcaacccaccctgctggggcttcctggaggactacgccttcgtggtgcggggcctgctggacctgtatgaggcctcacaggagagtgcgtggctcgagtgggctctgcggctgcaggacacacaggacaggctcttttgggactcccagggtggcggctacttctgcagtgaggctgagctgggggctggcctgcccctgcgtctgaaggacgaccaggatggagcagagcccagcgccaattccgtgtcagcccacaacctgctccggctgcatggcttcacgggccacaaggactggatggacaagtgtgtgtgcctattgaccgccttttccgagcgcatgcgtcgtgtcccggtggcgttgcccgagatggtccgcgccctctcagcccagcagcagaccctcaagcagatcgtgatctgtggagaccgtcaggccaaggacaccaaggccctggtgcagtgcgtccactctgtctacattcctaacaaggtgctgattctggctgatggggacccctcgagcttcctgtcccgccagctgcctttcctgagtaccctccgacggttggaagaccaggccactgcatatgtgtgtgagaatcaagcctgctcagtgcccatcactgatccctgcgaattacgaaaactactacatccatgactgccccaacccccttggggtggggcagaaggtgaagcatcccaactgactagagactcaggccctgcagggccctatagaacctgtggccatccctgagcaccctgccaccaggtgacctcggccatactcactgccccccttgggcacccactcaccctagaataaacttaacagtgtcccgtggtaa

SEQ ID NO: 429202 - DNA, 2873 bp, Homo sapiens
gaagacccgcccgcggctccgtaggtgcccggcccgcccctcgcagcctcctgacttcccttcctgtcctcagcggccgggcccacggccccgagcagccatgctgggcgcgcgggcctggttgggccgcgtccttctgctgccccgcgccggtgcaggcctcgccgcgagccgcaggtctgcctgcagtcccacttccaggctgaactccctgaggtctctgattccctaggtgtcctggagtctggcccaggacctggccccacaggagtcccagcaggcccaggaggttgggggagactaacctggcaaggagcccccaatgagccacctctcctcaccccccaaaaaacataagggggagcacaaaggccacagtctcccccatggttcagaaaggggtagctcctcccgggacaaggaccgaagtgcgacggtcagtagttcagtgcccatgcctgctggagggaaaggaagccatccttcatctacaccccagagggtccccaaccgcctgatccacgagaagtcaccatacctcctacaacatgcctacaatcctgtggactggtacccctggggacaggaagccttcgacaaggccaggaaggaaaacaagccgattttcctctcagtcgggtactccacctgccactggtgccacatgatggaagaggagtccttccagaatgaggagattggccgcctgctcagtgaggactttgtgagtgtgaaggtagaccgtgaggagcggcctgacgtggacaaggtgtacatgacgttcgtgcaggccaccagcagcggcgggggctggcccatgaatgtgtggctgactcccaacctccagccctttgtcgggggcacctatttccctcctgaggatggcttgacccgagtcggcttccgcacagtgttgctgagaatacgagaacagtggaaacagaacaagaacaccctgctagaaaatagccagcgtgtcaccactgccctgctggcccgatcagagatcagcgtgggtgaccgccagctgccgccctctgccgccaccgtgaacaatcgctgcttccagcagctggatgagggctatgatgaggaatacggtggcttcgctgaggcccccaagtttcccacgccggtgatcctgagcttcctgttctcctactggctcagccatcgactgactcaggatggctctcgggcccagcagatggccttgcataccctgaaaatgatggctaacgggggcatccgggaccatgtggggcagggctttcaccgctactccacagaccgccagtggcacgtccctcactttgagaagatgctctatgaccaggcacagctcgctgtggcctattcgcaggccttccagctctctggtgatgaattctactctgacgtggccaaaggcatcctgcagtacgtggctcggagcctgagccaccggtccggaggcttctatagcgcagaagatgcagactcgcccccagagcggggccagcggcccaaagagggcgcctactatgtgtggacggtcaaagaggttcagcagctcctcccggagcctgtgttgggtgccaccgagccgctgacctcaggccagctcctcatgaagcactacggcctcacagaggctggtaacatcagccccagtcaggaccccaagggggagctgcagggccagaatgtgctgaccgtccggtactcgctggagctgactgctgcccgctttggcttggatgtggaggccgtgcggaccttgctcaattcagggctggagaagctcttccaggcccggaagcatcggcccaagccgcacctggacagcaagatgctggctgcctggaatggcttgatggtgtcaggctatgctgtgactggggctgtcctgggccaagacaggctgatcaactatgccaccaatggtgccaagttcctgaagcggcacatgtttgatgtggccagtggccgcctgatgcggacctgctacaccggccctggggggactgtggagcacagcaacccaccctgctggggcttcctggaggactacgccttcgtggtgcggggcctgctggacctgtatgaggcctcacaggagagtgcgtggctcgagtgggctctgcggctgcaggacacacaggacaggctcttttgggactcccagggtggcggctacttctgcagtgaggctgagctgggggctggcctgcccctgcgtctgaaggacgaccaggatggagcagagcccagcgccaattccgtgtcagcccacaacctgctccggctgcatggcttcacgggccacaaggactggatggacaagtgtgtgtgcctattgaccgccttttccgagcgcatgcgtcgtgtcccggtggcgttgcccgagatggtccgcgccctctcagcccagcagcagaccctcaagcagatcgtgatctgtggagaccgtcaggccaaggacaccaaggccctggtgcagtgcgtccactctgtctacattcctaacaaggtgctgattctggctgatggggacccctcgagcttcctgtcccgccagctgcctttcctgagtaccctccgacggttggaagaccaggccactgcatatgtgtgtgagaatcaagcctgctcagtgcccatcactgatccctgcgaattacgaaaactactacatccatgactgccccaacccccttggggtggggcagaaggtgaagcatcccaactgactagagactcaggccctgcagggccctatagaacctgtggccatccctgagcaccctgccaccaggtgacctcggccatactcactgccccccttgggcacccactcaccctagaataaacttaacagtgtcccgtggtaa

SEQ ID NO: 429203 - DNA, 2754 bp, Homo sapiens
gaagacccgcccgcggctccgtaggtgcccggcccgcccctcgcagcctcctgacttcccttcctgtcctcagcggccgggcccacggccccgagcagccatgctgggcgcgcgggcctggttgggccgcgtccttctgctgccccgcgccggtgcaggcctcgccgcgagccgcaggtctgcctgcagtcccacttccaggctgaactccctgaggtctctgattccctaggtgtcctggagtctggcccaggacctggccccacaggagtcccagcaggggtagctcctcccgggacaaggaccgaagtgcgacggtcagtagttcagtgcccatgcctgctggagggaaaggaagccatccttcatctacaccccagagggtccccaaccgcctgatccacgagaagtcaccatacctcctacaacatgcctacaatcctgtggactggtacccctggggacaggaagccttcgacaaggccaggaaggaaaacaagccgattttcctctcagtcgggtactccacctgccactggtgccacatgatggaagaggagtccttccagaatgaggagattggccgcctgctcagtgaggactttgtgagtgtgaaggtagaccgtgaggagcggcctgacgtggacaaggtgtacatgacgttcgtgcaggccaccagcagcggcgggggctggcccatgaatgtgtggctgactcccaacctccagccctttgtcgggggcacctatttccctcctgaggatggcttgacccgagtcggcttccgcacagtgttgctgagaatacgagaacagtggaaacagaacaagaacaccctgctagaaaatagccagcgtgtcaccactgccctgctggcccgatcagagatcagcgtgggtgaccgccagctgccgccctctgccgccaccgtgaacaatcgctgcttccagcagctggatgagggctatgatgaggaatacggtggcttcgctgaggcccccaagtttcccacgccggtgatcctgagcttcctgttctcctactggctcagccatcgactgactcaggatggctctcgggcccagcagatggccttgcataccctgaaaatgatggctaacgggggcatccgggaccatgtggggcagggctttcaccgctactccacagaccgccagtggcacgtccctcactttgagaagatgctctatgaccaggcacagctcgctgtggcctattcgcaggccttccagctctctggtgatgaattctactctgacgtggccaaaggcatcctgcagtacgtggctcggagcctgagccaccggtccggaggcttctatagcgcagaagatgcagactcgcccccagagcggggccagcggcccaaagagggcgcctactatgtgtggacggtcaaagaggttcagcagctcctcccggagcctgtgttgggtgccaccgagccgctgacctcaggccagctcctcatgaagcactacggcctcacagaggctggtaacatcagccccagtcaggaccccaagggggagctgcagggccagaatgtgctgaccgtccggtactcgctggagctgactgctgcccgctttggcttggatgtggaggccgtgcggaccttgctcaattcagggctggagaagctcttccaggcccggaagcatcggcccaagccgcacctggacagcaagatgctggctgcctggaatggcttgatggtgtcaggctatgctgtgactggggctgtcctgggccaagacaggctgatcaactatgccaccaatggtgccaagttcctgaagcggcacatgtttgatgtggccagtggccgcctgatgcggacctgctacaccggccctggggggactgtggagcacagcaacccaccctgctggggcttcctggaggactacgccttcgtggtgcggggcctgctggacctgtatgaggcctcacaggagagtgcgtggctcgagtgggctctgcggctgcaggacacacaggacaggctcttttgggactcccagggtggcggctacttctgcagtgaggctgagctgggggctggcctgcccctgcgtctgaaggacgaccaggatggagcagagcccagcgccaattccgtgtcagcccacaacctgctccggctgcatggcttcacgggccacaaggactggatggacaagtgtgtgtgcctattgaccgccttttccgagcgcatgcgtcgtgtcccggtggcgttgcccgagatggtccgcgccctctcagcccagcagcagaccctcaagcagatcgtgatctgtggagaccgtcaggccaaggacaccaaggccctggtgcagtgcgtccactctgtctacattcctaacaaggtgctgattctggctgatggggacccctcgagcttcctgtcccgccagctgcctttcctgagtaccctccgacggttggaagaccaggccactgcatatgtgtgtgagaatcaagcctgctcagtgcccatcactgatccctgcgaattacgaaaactactacatccatgactgccccaacccccttggggtggggcagaaggtgaagcatcccaactgactagagactcaggccctgcagggccctatagaacctgtggccatccctgagcaccctgccaccaggtgacctcggccatactcactgccccccttgggcacccactcaccctagaataaacttaacagtgtcccgtggtaa

SEQ ID NO: 429204 - DNA, 2360 bp, Homo sapiens
tgggcccctcccagaccccctgggctactgagtgatgccccaccctgctgggtctaggtacccctggggacaggaagccttcgacaaggccaggaaggaaaacaagccgattttcctctcagtcgggtactccacctgccactggtgccacatgatggaagaggagtccttccagaatgaggagattggccgcctgctcagtgaggactttgtgagtgtgaaggtagaccgtgaggagcggcctgacgtggacaaggtgtacatgacgttcgtgcaggccaccagcagcggcgggggctggcccatgaatgtgtggctgactcccaacctccagccctttgtcgggggcacctatttccctcctgaggatggcttgacccgagtcggcttccgcacagtgttgctgagaatacgagaacagtggaaacagaacaagaacaccctgctagaaaatagccagcgtgtcaccactgccctgctggcccgatcagagatcagcgtgggtgaccgccagctgccgccctctgccgccaccgtgaacaatcgctgcttccagcagctggatgagggctatgatgaggaatacggtggcttcgctgaggcccccaagtttcccacgccggtgatcctgagcttcctgttctcctactggctcagccatcgactgactcaggatggctctcgggcccagcagatggccttgcataccctgaaaatgatggctaacgggggcatccgggaccatgtggggcagggctttcaccgctactccacagaccgccagtggcacgtccctcactttgagaagatgctctatgaccaggcacagctcgctgtggcctattcgcaggccttccagctctctggtgatgaattctactctgacgtggccaaaggcatcctgcagtacgtggctcggagcctgagccaccggtccggaggcttctatagcgcagaagatgcagactcgcccccagagcggggccagcggcccaaagagggcgcctactatgtgtggacggtcaaagaggttcagcagctcctcccggagcctgtgttgggtgccaccgagccgctgacctcaggccagctcctcatgaagcactacggcctcacagaggctggtaacatcagccccagtcaggaccccaagggggagctgcagggccagaatgtgctgaccgtccggtactcgctggagctgactgctgcccgctttggcttggatgtggaggccgtgcggaccttgctcaattcagggctggagaagctcttccaggcccggaagcatcggcccaagccgcacctggacagcaagatgctggctgcctggaatggcttgatggtgtcaggctatgctgtgactggggctgtcctgggccaagacaggctgatcaactatgccaccaatggtgccaagttcctgaagcggcacatgtttgatgtggccagtggccgcctgatgcggacctgctacaccggccctggggggactgtggagcacagcaacccaccctgctggggcttcctggaggactacgccttcgtggtgcggggcctgctggacctgtatgaggcctcacaggagagtgcgtggctcgagtgggctctgcggctgcaggacacacaggacaggctcttttgggactcccagggtggcggctacttctgcagtgaggctgagctgggggctggcctgcccctgcgtctgaaggacgaccaggatggagcagagcccagcgccaattccgtgtcagcccacaacctgctccggctgcatggcttcacgggccacaaggactggatggacaagtgtgtgtgcctattgaccgccttttccgagcgcatgcgtcgtgtcccggtggcgttgcccgagatggtccgcgccctctcagcccagcagcagaccctcaagcagatcgtgatctgtggagaccgtcaggccaaggacaccaaggccctggtgcagtgcgtccactctgtctacattcctaacaaggtgctgattctggctgatggggacccctcgagcttcctgtcccgccagctgcctttcctgagtaccctccgacggttggaagaccaggccactgcatatgtgtgtgagaatcaagcctgctcagtgcccatcactgatccctgcgaattacgaaaactactacatccatgactgccccaacccccttggggtggggcagaaggtgaagcatcccaactgactagagactcaggccctgcagggccctatagaacctgtggccatccctgagcaccctgccaccaggtgacctcggccatactcactgccccccttgggcacccactcaccctagaataaacttaacagtgtcccgtggtaa

SEQ ID NO: 429205 - DNA, 3018 bp, Homo sapiens
gaagacccgcccgcggctccgtaggtgcccggcccgcccctcgcagcctcctgacttcccttcctgtcctcagcggccgggcccacggccccgagcagccatgctgggcgcgcgggcctggttgggccgcgtccttctgctgccccgcgccggtgcaggcctcgccgcgagccgcaggtgtcctggagtctggcccaggacctggccccacaggagtcccagcaggggtagctcctcccgggacaaggaccgaagtgcgacggtcagtagttcagtgcccatgcctgctggagggaaaggaagccatccttcatctacaccccagagggtccccaaccgcctgatccacgagaagtcaccatacctcctacaacatgcctacaatcctgtggactggtacccctggggacaggaagccttcgacaaggccaggaaggaaaacaagccgattttcctctcagtcgggtactccacctgccactggtgccacatgatggaagaggagtccttccagaatgaggagattggccgcctgctcagtgaggactttgtgagtgtgaaggtagaccgtgaggagcggcctgacgtggacaaggtgtacatgacgttcgtgcaggccaccagcagcggcgggggctggcccatgaatgtgtggctgactcccaacctccagccctttgtcgggggcacctatttccctcctgaggatggcttgacccgagtcggcttccgcacagtgttgctgagaatacgagaacagtggaaacagaacaagaacaccctgctagaaaatagccagcgtgtcaccactgccctgctggcccgatcagagatcagcgtgggtgaccgccagctgccgccctctgccgccaccgtgaacaatcgctgcttccagcagctggatgagggctatgatgaggaatacggtggcttcgctgaggcccccaagtttcccacgccggtgatcctgagcttcctgttctcctactggctcagccatcgactgactcaggatggctctcgggcccagcagatggccttgcataccctgaaaatgatggctaacgggggcatccgggaccatgtggggcagggctttcaccgctactccacagaccgccagtggcacgtccctcactttgagaagatgctctatgaccaggcacagctcgctgtggcctattcgcaggccttccagctctctggtgatgaattctactctgacgtggccaaaggcatcctgcagtacgtggctcggagcctgagccaccggtccggaggcttctatagcgcagaagatgcagactcgcccccagagcggggccagcggcccaaagagggcgcctactatgtgtggacggtcaaagaggttcagcagctcctcccggagcctgtgttgggtgccaccgagccgctgacctcaggccagctcctcatgaagcactacggcctcacagaggctggtaacatcagccccagtcaggaccccaagggggagctgcagggccagaatgtgctgaccgtccggtactcgctggagctgactgctgcccgctttggcttggatgtggaggccgtgcggaccttgctcaattcagggctggagaagctcttccaggcccggaagcatcggcccaagccgcacctggacagcaagatgctggctgcctggaatgtggggcagcacacctgagaccgagcctgtctgtaggatcccccttcacaaagcccctgtctttccggcagcggctaaatgctcactctcccttgattagcgttattattctcagttgacaaaagaggcttaaggagcttgagtaacccgcccaaggtcacgcgcaagggctgggaaccccgccatgtctggctttggagcccaagatcttagggatcacccatggctccagggaggtgttggggcctaaggtgatagggtggacatgcctggagggtcctggccagcttcttaccactacttgtctctcctggctccaggcttgatggtgtcaggctatgctgtgactggggctgtcctgggccaagacaggctgatcaactatgccaccaatggtgccaagttcctgaagcggcacatgtttgatgtggccagtggccgcctgatgcggacctgctacaccggccctggggggactgtggagcacagcaacccaccctgctggggcttcctggaggactacgccttcgtggtgcggggcctgctggacctgtatgaggcctcacaggagagtgcgtggctcgagtgggctctgcggctgcaggacacacaggacaggctcttttgggactcccagggtggcggctacttctgcagtgaggctgagctgggggctggcctgcccctgcgtctgaaggacgaccaggatggagcagagcccagcgccaattccgtgtcagcccacaacctgctccggctgcatggcttcacgggccacaaggactggatggacaagtgtgtgtgcctattgaccgccttttccgagcgcatgcgtcgtgtcccggtggcgttgcccgagatggtccgcgccctctcagcccagcagcagaccctcaagcagatcgtgatctgtggagaccgtcaggccaaggacaccaaggccctggtgcagtgcgtccactctgtctacattcctaacaaggtgctgattctggctgatggggacccctcgagcttcctgtcccgccagctgcctttcctgagtaccctccgacggttggaagaccaggccactgcatatgtgtgtgagaatcaagcctgctcagtgcccatcactgatccctgcgaattacgaaaactactacatccatgactgccccaacccccttggggtggggcagaaggtgaagcatcccaactgactagagactcaggccctgcagggccctatagaacctgtggccatccctgagcaccctgccaccaggtgacctcggccatactcactgccccccttgggcacccactcaccctagaataaacttaacagtgtcccgtggtaa

SEQ ID NO: 429206 - DNA, 3357 bp, Homo sapiens
gaagacccgcccgcggctccgtaggtgcccggcccgcccctcgcagcctcctgacttcccttcctgtcctcagcggccgggcccacggccccgagcagccatgctgggcgcgcgggcctggttgggccgcgtccttctgctgccccgcgccggtgcaggcctcgccgcgagccgcaggtgtcctggagtctggcccaggacctggccccacaggagtcccagcaggggtagctcctcccgggacaaggaccgaagtgcgacggtcagtagttcagtgcccatgcctgctggagggaaaggaagccatccttcatctacaccccagagggtccccaaccgcctgatccacgagaagtcaccatacctcctacaacatgcctacaatcctgtggactggtacccctggggacaggaagccttcgacaaggccaggaaggaaaacaagccgattttcctctcagtcgggtactccacctgccactggtgccacatgatggaagaggagtccttccagaatgaggagattggccgcctgctcagtgaggactttgtgagtgtgaaggtagaccgtgaggagcggcctgacgtggacaaggtgtacatgacgttcgtgcaggccaccagcagcggcgggggctggcccatgaatgtgtggctgactcccaacctccagccctttgtcgggggcacctatttccctcctgaggatggcttgacccgagtcggcttccgcacagtgttgctgagaatacgagaacagtggaaacagaacaagaacaccctgctagaaaatagccagcgtgtcaccactgccctgctggcccgatcagagatcagcgtgggtgaccgccagctgccgccctctgccgccaccgtgaacaatcgctgcttccagcagctggatgagggctatgatgaggaatacggtggcttcgctgaggcccccaagtttcccacgccggtgatcctgagcttcctgttctcctactggctcagccatcgactgactcaggatggctctcgggcccagcagatggccttgcataccctgaaaatgatggctaacgggggcatccgggaccatgtggggcagggctttcaccgctactccacagaccgccagtggcacgtccctcactttgagaagatgctctatgaccaggcacagctcgctgtggcctattcgcaggccttccagctctctggtgatgaattctactctgacgtggccaaaggcatcctgcagtacgtggctcggagcctgagccaccggtccggaggcttctatagcgcagaagatgcagactcgcccccagagcggggccagcggcccaaagagggcgcctactatgtgtggacggtcaaagaggttcagcagctcctcccggagcctgtgttgggtgccaccgagccgctgacctcaggccagctcctcatgaagcactacggcctcacagaggctggtaacatcagccccagtcaggaccccaagggggagctgcagggccagaatgtgctgaccgtccggtactcgctggagctgactgctgcccgctttggcttggatgtggaggccgtgcggaccttgctcaattcagggctggagaagctcttccaggcccggaagcatcggcccaagccgcacctggacagcaagatgctggctgcctggaatggcttgatggtgtcaggctatgctgtgactggggctgtcctgggccaagacaggctgatcaactatgccaccaatggtgccaagttcctgaagcggcacatgtttgatgtggccagtggccgcctgatgcggacctgctacaccggccctggggggactgtggagcacagcaacccaccctgctggggcttcctggaggactacgccttcgtggtgcggggcctgctggacctgtatgaggcctcacaggagagtgcgtggctcgagtgggctctgcggctgcaggacacacaggacaggctcttttgggactcccagggtggcggctacttctgcagtgaggctgagctgggggctggcctgcccctgcgtctgaaggacgaccaggatggagcagagcccagcgccaattccgtgtcagcccacaacctgctccggctgcatggcttcacgggccacaaggactggatggacaagtgtgtgtgcctattgaccgccttttccgagcgcatgcgtcgtgtcccggtggcgttgcccgagatggtccgcgccctctcagcccagcagcagaccctcaagcagatcgtgatctgtggagaccgtcaggccaaggacaccaaggccctggtgcagtgcgtccactctgtctacattcctaacaaggtgctgattctggctgatggggacccctcgagcttcctgtcccgccagctgcctttcctgagtaccctccgacggttggaagaccaggccactgcatatgtgtgtgagaatcaagcctgctcagtgcccatcactgatccctgcgaattacgaaaactactacatccatgactgccccaacccccttggggtggggcagaaggtgaagcatcccaactgactagagactcaggccctgcagggccctatagaacctgtggccatccctgagcaccctgccaccaggtgacctcggccatactcactgccccccttgggcacccactcaccctagaataaacttaacagtgtcccgtggtaacctgagggcctcagctttgcttatgagggagggactgggaaccagcagctcagggccacttcctctggcagcccccacctgacccctctgccttctcccatttctccttcatcttccaggggtcagcagactgcccctttcccttccatggtcattgtagcctgaatgaatttagtcccctgaactgaggtcaggggactaaaaccaagtaaagatgcccaggggtgggcatgggggtgtggactggcccaggagggagaaagcacaatccttgccctcagaaagaggttaagaagggaacctgccctcccctccccattgtctccttgtgttgagctggaaagggggcagagatgctttatatgagcttttatatttcacagaatggtgactttgcatatgccctggtgcattgtgggagctgctattgtcacgactaagacatttcttttggggtatccatctagccccagcctcgaaaggatggaagcagggcctccttgcaggaggtcatgttgtccatttgtctgctttcatacaagctggtccaaagaaagagttctctttcgtttggaacatctgttgggttggaagtccttccccaaatctatctgagtccttcttgctgcagagaaagccttcctgtgacctcatcctt

SEQ ID NO: 429207 - DNA, 3307 bp, Homo sapiens
gaagacccgcccgcggctccgtaggtgcccggcccgcccctcgcagcctcctgacttcccttcctgtcctcagcggccgggcccacggccccgagcagccatgctgggcgcgcgggcctggttgggccgcgtccttctgctgccccgcgccggtgcaggcctcgccgcgagccgcaggtgtcctggagtctggcccaggacctggccccacaggagtcccagcaggggtagctcctcccgggacaaggaccgaagtgcgacggtcagtagttcagtgcccatgcctgctggagggaaaggaagccatccttcatctacaccccagagggtccccaaccgcctgatccacgagaagtcaccatacctcctacaacatgcctacaatcctgtggactggtacccctggggacaggaagccttcgacaaggccaggaaggaaaacaagccgattttcctctcagtcgggtactccacctgccactggtgccacatgatggaagaggagtccttccagaatgaggagattggccgcctgctcagtgaggactttgtgagtgtgaaggtagaccgtgaggagcggcctgacgtggacaaggtgtacatgacgttcgtgcaggccaccagcagcggcgggggctggcccatgaatgtgtggctgactcccaacctccagccctttgtcgggggcacctatttccctcctgaggatggcttgacccgagtcggcttccgcacagtgttgctgagaatacgagaacagtggaaacagaacaagaacaccctgctagaaaatagccagcgtgtcaccactgccctgctggcccgatcagagatcagcgtgggtgaccgccagctgccgccctctgccgccaccgtgaacaatcgctgcttccagcagctggatgagggctatgatgaggaatacggtggcttcgctgaggcccccaagtttcccacgccggtgatcctgagcttcctgttctcctactggctcagccatcgactgactcaggatggctctcgggcccagcagatggccttgcataccctgaaaatgatggctaacgggggcatccgggaccatgtggggcagggctttcaccgctactccacagaccgccagtggcacgtccctcactttgagaagatgctctatgaccaggcacagctcgctgtggcctattcgcaggccttccagctctctggtgatgaattctactctgacgtggccaaaggcatcctgcagtacgtggctcggagcctgagccaccggtccggaggcttctatagcgcagaagatgcagactcgcccccagagcggggccagcggcccaaagagggcgcctactatgtgtggacggtcaaagaggttcagcagctcctcccggagcctgtgttgggtgccaccgagccgctgacctcaggccagctcctcatgaagcactacggcctcacagaggctggtaacatcagccccagtcaggaccccaagggggagctgcagggccagaatgtgctgaccgtccggtactcgctggagctgactgctgcccgctttggcttggatgtggaggccgtgcggaccttgctcaattcagggctggagaagctcttccaggcccggaagcatcggcccaagccgcacctggacagcaagatgctggctgcctggaatgtggggcagcacacctgagaccgagcctgtctgtaggatcccccttcacaaagcccctgtctttccggcagcggctaaatgctcactctcccttgattagcgttattattctcagttgacaaaagaggcttaaggagcttgagtaacccgcccaaggtcacgcgcaagggctgggaaccccgccatgtctggctttggagcccaagatcttagggatcacccatggctccagggaggtgttggggcctaaggtgatagggtggacatgcctggagggtcctggccagcttcttaccactacttgtctctcctggctccaggcttgatggtgtcaggctatgctgtgactggggctgtcctgggccaagacaggctgatcaactatgccaccaatggtgccaagttcctgaagcggcacatgtttgatgtggccagtggccgcctgatgcggacctgctacaccggccctggggggactgtggagcacaggttgggggctgggtagaccgggagggcccgtctccccaacgcgtccccagcctacctctgccctacttctcccctccatgtggactccagtcctggctctgccaggtgcttgctgtgagtttgtagcttccctgggcccatttactcatctgggaagtgggctgatggcacctgcccaagagggttcatctggagggttaagtgaacaaatgcgtgaaagggcctcctctgggaaaggccctctctcctggggctctccccagcccctcccgtaatgcctgtcccccagcaacccaccctgctggggcttcctggaggactacgccttcgtggtgcggggcctgctggacctgtatgaggcctcacaggagagtgcgtggctcgagtgggctctgcggctgcaggacacacaggacaggctcttttgggactcccagggtggcggctacttctgcagtgaggctgagctgggggctggcctgcccctgcgtctgaaggacgaccaggatggagcagagcccagcgccaattccgtgtcagcccacaacctgctccggctgcatggcttcacgggccacaaggactggatggacaagtgtgtgtgcctattgaccgccttttccgagcgcatgcgtcgtgtcccggtggcgttgcccgagatggtccgcgccctctcagcccagcagcagaccctcaagcagatcgtgatctgtggagaccgtcaggccaaggacaccaaggccctggtgcagtgcgtccactctgtctacattcctaacaaggtgctgattctggctgatggggacccctcgagcttcctgtcccgccagctgcctttcctgagtaccctccgacggttggaagaccaggccactgcatatgtgtgtgagaatcaagcctgctcagtgcccatcactgatccctgcgaattacgaaaactactacatccatgactgccccaacccccttggggtggggcagaaggtgaagcatcccaactgactagagactcaggccctgcagggccctatagaacctgtggccatccctgagcaccctgccaccaggtgacctcggccatactcactgccccccttgggcacccactcaccctagaataaacttaacagtgtcccgtggtaa

SEQ ID NO: 429208 - DNA, 2009 bp, Homo sapiens
ccaacgcaccgtgttgggccaacgcaccgtgttgggccaacgcaccgtgttgctgagaatacgagaacagtggaaacagaacaagaacaccctgctagaaaatagccagcgtgtcaccactgccctgctggcccgatcagagatcagcgtgggtgaccgccagctgccgccctctgccgccaccgtgaacaatcgctgcttccagcagctggatgagggctatgatgaggaatacggtggcttcgctgaggcccccaagtttcccacgccggtgatcctgagcttcctgttctcctactggctcagccatcgactgactcaggatggctctcgggcccagcagatggccttgcataccctgaaaatgatggctaacgggggcatccgggaccatgtggggcagggctttcaccgctactccacagaccgccagtggcacgtccctcactttgagaagatgctctatgaccaggcacagctcgctgtggcctattcgcaggccttccagctctctggtgatgaattctactctgacgtggccaaaggcatcctgcagtacgtggctcggagcctgagccaccggtccggaggcttctatagcgcagaagatgcagactcgcccccagagcggggccagcggcccaaagagggcgcctactatgtgtggacggtcaaagaggttcagcagctcctcccggagcctgtgttgggtgccaccgagccgctgacctcaggccagctcctcatgaagcactacggcctcacagaggctggtaacatcagccccagtcaggaccccaagggggagctgcagggccagaatgtgctgaccgtccggtactcgctggagctgactgctgcccgctttggcttggatgtggaggccgtgcggaccttgctcaattcagggctggagaagctcttccaggcccggaagcatcggcccaagccgcacctggacagcaagatgctggctgcctggaatggcttgatggtgtcaggctatgctgtgactggggctgtcctgggccaagacaggctgatcaactatgccaccaatggtgccaagttcctgaagcggcacatgtttgatgtggccagtggccgcctgatgcggacctgctacaccggccctggggggactgtggagcacagcaacccaccctgctggggcttcctggaggactacgccttcgtggtgcggggcctgctggacctgtatgaggcctcacaggagagtgcgtggctcgagtgggctctgcggctgcaggacacacaggacaggctcttttgggactcccagggtggcggctacttctgcagtgaggctgagctgggggctggcctgcccctgcgtctgaaggacgaccaggatggagcagagcccagcgccaattccgtgtcagcccacaacctgctccggctgcatggcttcacgggccacaaggactggatggacaagtgtgtgtgcctattgaccgccttttccgagcgcatgcgtcgtgtcccggtggcgttgcccgagatggtccgcgccctctcagcccagcagcagaccctcaagcagatcgtgatctgtggagaccgtcaggccaaggacaccaaggccctggtgcagtgcgtccactctgtctacattcctaacaaggtgctgattctggctgatggggacccctcgagcttcctgtcccgccagctgcctttcctgagtaccctccgacggttggaagaccaggccactgcatatgtgtgtgagaatcaagcctgctcagtgcccatcactgatccctgcgaattacgaaaactactacatccatgactgccccaacccccttggggtggggcagaaggtgaagcatcccaactgactagagactcaggccctgcagggccctatagaacctgtggccatccctgagcaccctgccaccaggtgacctcggccatactcactgccccccttgggcacccactcaccctagaataaacttaacagtgtcccgtggtaa

SEQ ID NO: 429209 - DNA, 2349 bp, Homo sapiens
gaagacccgcccgcggctccgtaggtgcccggcccgcccctcgcagcctcctgacttcccttcctgtcctcagcggccgggcccacggccccgagcagccatgctgggcgcgcgggcctggttgggccgcgtccttctgctgccccgcgccggtgcaggcctcgccgcgagccgcaggtgtcctggagtctggcccaggacctggccccacaggagtcccagcaggggtagctcctcccgggacaaggaccgaagtgcgacggtcagtagttcagtgcccatgcctgctggagggaaaggaagccatccttcatctacaccccagagggtccccaaccgcctgatccacgagaagtcaccatacctcctacaacatgcctacaatcctgtggactggtacccctggggacaggaagccttcgacaaggccaggaaggaaaacaagccgattttcctctcagtcgggtactccacctgccactggtgccacatgatggaagaggagtccttccagaatgaggagattggccgcctgctcagtgaggactttgtgagtgtgaaggtagaccgtgaggagcggcctgacgtggacaaggtgtacatgacgttcgtgcaggccaccagcagcggcgggggctggcccatgaatgtgtggctgactcccaacctccagccctttgtcgggggcacctatttccctcctgaggatggcttgacccgagtcggcttccgcacagtgttgctgagaatacgagaacagtggaaacagaacaagaacaccctgctagaaaatagccagcgtgtcaccactgccctgctggcccgatcagagatcagcgtgggtgaccgccagctgccgccctctgccgccaccgtgaacaatcgctgcttccagcagctggatgagggctatgatgaggaatacggtggcttcgctgaggcccccaagtttcccacgccggtgatcctgagcttcctgttctcctactggctcagccatcgactgactcaggatggctctcgggcccagcagatggccttgcataccctgaaaatgatggctaacgggggcatccgggaccatgtggggcagggctttcaccgctactccacagaccgccagtggcacgtccctcactttgagaagatgctctatgaccaggcacagctcgctgtggcctattcgcaggccttccagctctctggtgatgaattctactctgacgtggccaaaggcatcctgcagtacgtggctcggagcctgagccaccggtccggaggcttctatagcgcagaagatgcagactcgcccccagagcggggccagcggcccaaagagggcgcctactatgtgtggacggtcaaagaggttcagcagctcctcccggagcctgtgttgggtgccaccgagccgctgacctcaggccagctcctcatgaagcactacggcctcacagaggctggtaacatcagccccagtcaggaccccaagggggagctgcagggccagaatgtgctgaccgtccggtactcgctggagctgactgctgcccgctttggcttggatgtggaggccgtgcggaccttgctcaattcagggctggagaagctcttccaggcccggaagcatcggcccaagccgcacctggacagcaagatgctggctgcctggaatggcttgatggtgtcaggctatgctgtgactggggctgtcctgggccaagacaggctgatcaactatgccaccaatggtgccaagttcctgaagcggcacatgtttgatgtggccagtggccgcctgatgcggacctgctacaccggccctggggggactgtggagcacagcaacccaccctgctggggcttcctggaggactacgccttcgtggtgcggggcctgctggacctgtatgaggcctcacaggagagtgcgtggctcgagtgggctctgcggctgcaggacacacaggacaggctcttttgggactcccagggtggcggctacttctgcagtgaggctgagctgggggctggcctgcccctgcgtctgaaggacgaccaggatggagcagagcccagcgccaattccgtgtcagcccacaacctgctcagtgcccatcactgatccctgcgaattacgaaaactactacatccatgactgccccaacccccttggggtggggcagaaggtgaagcatcccaactgactagagactcaggccctgcagggccctatagaacctgtggccatccctgagcaccctgccaccaggtgacctcggccatactcactgccccccttgggcacccactcaccctagaataaacttaacagtgtcccgtggtaa

SEQ ID NO: 429210 - DNA, 1318 bp, Homo sapiens
gaagacccgcccgcggctccgtaggtgcccggcccgcccctcgcagcctcctgacttcccttcctgtcctcagcggccgggcccacggccccgagcagccatgctgggcgcgcgggcctggttgggccgcgtccttctgctgccccgcgccggtgcaggcctcgccgcgagccgcaggtgtcctggagtctggcccaggacctggccccacaggagtcccagcaggggtagctcctcccgggacaaggaccgaagtgcgacggtcagtagttcagtgcccatgcctgctggagggaaaggaagccatccttcatctacaccccagagggtccccaaccgcctgatccacgagaagtcaccatacctcctacaacatgcctacaatcctgtggactggtacccctggggacaggaagccttcgacaaggccaggaaggaaaacaagccgattttcctctcagtcgggtactccacctgccactggtgccacatgatggaagaggagtccttccagaatgaggagattggccgcctgctcagtgaggactttgtgagtgtgaaggtagaccgtgaggagcggcctgacgtggacaaggtgtacatgacgttcgtgcaggccaccagcagcggcgggggctggcccatgaatgtgtggctgactcccaacctccagccctttgtcgggggcacctatttccctcctgaggatggcttgacccgagtcggcttccgcacagtgttgctgagaatacgagaacagtggaaacagaacaagaacaccctgctagaaaatagccagcgtgtcaccactgccctgctggcccgatcagagatcagcgtgggtgaccgccagctgccgccctctgccgccaccgtgaacaatcgctgcttccagcagctggatgagggctatgatgaggaatacggtggcttcgctgaggcccccaagtttcccacgccggtgatcctgagcttcctgttctcctactggctcagccatcgactgactcaggatggctctcgggcccagcagatggccttgcataccctgaaaatgatggctaacgggggcatccgggaccatgtggggcagggctttcaccgctactccacagaccgccagtggcacgtccctcactttgagaagatgctctatgaccaggcacagctcgctgtggcctattcgcaggccttccagctctctggtgatgaattctactctgacgtggccaaaggcatcctgcagtacgtggctcggagcctgagccaccgggtgtgtgtccatggtggcaggcaggcctggctgtgggaggggttg

SEQ ID NO: 429211 - DNA, 242 bp, Homo sapiens
gcgggcctggttgggccgcgtccttctgctgccccgcgccggtgcaggcctcgccgcgagccgcaggtacgggcgggcgagcgggcccctagggcactccctgcgcctgcctgcgggcccagtggagggtcttccggacaccggtccccagtgccagtctggaccacccctgcatgcctggcccttcccccacccccacctccggtctgctcctgagacctggctctggctgtaaggccctc

SEQ ID NO: 429212 - DNA, 473 bp, Homo sapiens
cacccactcaccctagaataaacttaacagtgtcccgtggggggcagtgagtatggccaaggacaccaaggccctggtgcagtgcgtccactctgtctacattcctaacaaggtgctgattctggctgatggggacccctcgagcttcctgtcccgccagctgcctttcctgagtaccctccgacggttggaagaccaggccactgcatatgtgtgtgagaatcaagcctgctcagtgcccatcactgatccctgcgaattacgaaaactactacatccatgactgccccaacccccttggggtggggcagaaggtgaagcatcccaactgactagagactcaggccctgcagggccctatagaacctgtggccatccctgagcaccctgccaccaggtgacctcggccatactcactgccccccttgggcacccactcaccctagaataaacttaacagtgtcccgtggtaa

SEQ ID NO: 429213 - DNA, 2699 bp, Homo sapiens
gaagacccgcccgcggctccgtaggtgcccggcccgcccctcgcagcctcctgacttcccttcctgtcctcagcggccgggcccacggccccgagcagccatgctgggcgcgcgggcctggttgggccgcgtccttctgctgccccgcgccggtgcaggcctcgccgcgagccgcaggtgtcctggagtctggcccaggacctggccccacaggagtcccagcaggggtagctcctcccgggacaaggaccgaagtgcgacggtcagtagttcagtgcccatgcctgctggagggaaaggaagccatccttcatctacaccccagagggtccccaaccgcctgatccacgagaagtcaccatacctcctacaacatgcctacaatcctgtggactggtacccctggggacaggaagccttcgacaaggccaggaaggaaaacaagccgattttcctctcagtcgggtactccacctgccactggtgccacatgatggaagaggagtccttccagaatgaggagattggccgcctgctcagtgaggactttgtgagtgtgaaggtagaccgtgaggagcggcctgacgtggacaaggtgtacatgacgttcgtgcaggccaccagcagcggcgggggctggcccatgaatgtgtggctgactcccaacctccagccctttgtcgggggcacctatttccctcctgaggatggcttgacccgagtcggcttccgcacagtgttgctgagaatacgagaacagtggaaacagaacaagaacaccctgctagaaaatagccagcgtgtcaccactgccctgctggcccgatcagagatcagcgtgggtgaccgccagctgccgccctctgccgccaccgtgaacaatcgctgcttccagcagctggatgagggctatgatgaggaatacggtggcttcgctgaggcccccaagtttcccacgccggtgatcctgagcttcctgttctcctactggctcagccatcgactgactcaggatggctctcgggcccagcagatggccttgcataccctgaaaatgatggctaacgggggcatccgggaccatgtggggcagggctttcaccgctactccacagaccgccagtggcacgtccctcactttgagaagatgctctatgaccaggcacagctcgctgtggcctattcgcaggccttccagctctctggtgatgaattctactctgacgtggccaaaggcatcctgcagtacgtggctcggagcctgagccaccggtccggaggcttctatagcgcagaagatgcagactcgcccccagagcggggccagcggcccaaagagggcgcctactatgtgtggacggtcaaagaggttcagcagctcctcccggagcctgtgttgggtgccaccgagccgctgacctcaggccagctcctcatgaagcactacggcctcacagaggctggtaacatcagccccagtcaggaccccaagggggagctgcagggccagaatgtgctgaccgtccggtactcgctggagctgactgctgcccgctttggcttggatgtggaggccgtgcggaccttgctcaattcagggctggagaagctcttccaggcccggaagcatcggcccaagccgcacctggacagcaagatgctggctgcctggaatggcttgatggtgtcaggctatgctgtgactggggctgtcctgggccaagacaggctgatcaactatgccaccaatggtgccaagttcctgaagcggcacatgtttgatgtggccagtggccgcctgatgcggacctgctacaccggccctggggggactgtggagcacagcaacccaccctgctggggcttcctggaggactacgccttcgtggtgcggggcctgctggacctgtatgaggcctcacaggagagtgcgtggctcgagtgggctctgcggctgcaggacacacaggacaggctcttttgggactcccagggtggcggctacttctgcagtgaggctgagctgggggctggcctgcccctgcgtctgaaggacgaccaggatggagcagagcccagcgccaattccgtgtcagcccacaacctgctccggctgcatggcttcacgggccacaaggactggatggacaagtgtgtgtgcctattgaccgccttttccgagcgcatgcgtcgtgtcccggtggcgttgcccgagatggtccgcgccctctcagcccagcagcagaccctcaagcagatcgtgatctgtggagaccgtcaggccaaggacaccaaggccctggtgcagtgcgtccactctgtctacattcctaacaaggtgctgattctggctgatggggacccctcgagcttcctgtcccgccagctgcctttcctgagtaccctccgacggttggaagaccaggccactgcatatgtgtgtgagaatcaagcctgctcagtgcccatcactgatccctgcgaattacgaaaactactacatccatgactgccccaacccccttggggtggggcagaaggtgaagcatcccaactgactagagactcaggccctgcagggccctatagaacctgtggccatccctgagcaccctgccaccaggtgacctcggccatactcactgccccccttgggcacccactcaccctagaataaacttaacagtgtcccgtggtaa

SEQ ID NO: 429214 - DNA, 2616 bp, Homo sapiens
acagccatccttcccaccgccaggcccaggaggttgggggagactaacctggcaaggagcccccaatgagccacctctcctcaccccccaaaaaacataagggggagcacaaaggccacagtctcccccatggttcagaaaggggtagctcctcccgggacaaggaccgaagtgcgacggtcagtagttcagtgcccatgcctgctggagggaaaggaagccatccttcatctacaccccagagggtccccaaccgcctgatccacgagaagtcaccatacctcctacaacatgcctacaatcctgtggactggtacccctggggacaggaagccttcgacaaggccaggaaggaaaacaagccgattttcctctcagtcgggtactccacctgccactggtgccacatgatggaagaggagtccttccagaatgaggagattggccgcctgctcagtgaggactttgtgagtgtgaaggtagaccgtgaggagcggcctgacgtggacaaggtgtacatgacgttcgtgcaggccaccagcagcggcgggggctggcccatgaatgtgtggctgactcccaacctccagccctttgtcgggggcacctatttccctcctgaggatggcttgacccgagtcggcttccgcacagtgttgctgagaatacgagaacagtggaaacagaacaagaacaccctgctagaaaatagccagcgtgtcaccactgccctgctggcccgatcagagatcagcgtgggtgaccgccagctgccgccctctgccgccaccgtgaacaatcgctgcttccagcagctggatgagggctatgatgaggaatacggtggcttcgctgaggcccccaagtttcccacgccggtgatcctgagcttcctgttctcctactggctcagccatcgactgactcaggatggctctcgggcccagcagatggccttgcataccctgaaaatgatggctaacgggggcatccgggaccatgtggggcagggctttcaccgctactccacagaccgccagtggcacgtccctcactttgagaagatgctctatgaccaggcacagctcgctgtggcctattcgcaggccttccagctctctggtgatgaattctactctgacgtggccaaaggcatcctgcagtacgtggctcggagcctgagccaccggtccggaggcttctatagcgcagaagatgcagactcgcccccagagcggggccagcggcccaaagagggcgcctactatgtgtggacggtcaaagaggttcagcagctcctcccggagcctgtgttgggtgccaccgagccgctgacctcaggccagctcctcatgaagcactacggcctcacagaggctggtaacatcagccccagtcaggaccccaagggggagctgcagggccagaatgtgctgaccgtccggtactcgctggagctgactgctgcccgctttggcttggatgtggaggccgtgcggaccttgctcaattcagggctggagaagctcttccaggcccggaagcatcggcccaagccgcacctggacagcaagatgctggctgcctggaatggcttgatggtgtcaggctatgctgtgactggggctgtcctgggccaagacaggctgatcaactatgccaccaatggtgccaagttcctgaagcggcacatgtttgatgtggccagtggccgcctgatgcggacctgctacaccggccctggggggactgtggagcacagcaacccaccctgctggggcttcctggaggactacgccttcgtggtgcggggcctgctggacctgtatgaggcctcacaggagagtgcgtggctcgagtgggctctgcggctgcaggacacacaggacaggctcttttgggactcccagggtggcggctacttctgcagtgaggctgagctgggggctggcctgcccctgcgtctgaaggacgaccaggatggagcagagcccagcgccaattccgtgtcagcccacaacctgctccggctgcatggcttcacgggccacaaggactggatggacaagtgtgtgtgcctattgaccgccttttccgagcgcatgcgtcgtgtcccggtggcgttgcccgagatggtccgcgccctctcagcccagcagcagaccctcaagcagatcgtgatctgtggagaccgtcaggccaaggacaccaaggccctggtgcagtgcgtccactctgtctacattcctaacaaggtgctgattctggctgatggggacccctcgagcttcctgtcccgccagctgcctttcctgagtaccctccgacggttggaagaccaggccactgcatatgtgtgtgagaatcaagcctgctcagtgcccatcactgatccctgcgaattacgaaaactactacatccatgactgccccaacccccttggggtggggcagaaggtgaagcatcccaactgactagagactcaggccctgcagggccctatagaacctgtggccatccctgagcaccctgccaccaggtgacctcggccatactcactgccccccttgggcacccactcaccctagaataaacttaacagtgtcccgtggtaa

SEQ ID NO: 429215 - DNA, 3097 bp, Homo sapiens
gaagacccgcccgcggctccgtaggtgcccggcccgcccctcgcagcctcctgacttcccttcctgtcctcagcggccgggcccacggccccgagcagccatgctgggcgcgcgggcctggttgggccgcgtccttctgctgccccgcgccggtgcaggcctcgccgcgagccgcaggtgtcctggagtctggcccaggacctggccccacaggagtcccagcaggggtagctcctcccgggacaaggaccgaagtgcgacggtcagtagttcagtgcccatgcctgctggagggaaaggaagccatccttcatctacaccccagagggtccccaaccgcctgatccacgagaagtcaccatacctcctacaacatgcctacaatcctgtggactggtacccctggggacaggaagccttcgacaaggccaggaaggaaaacaagccgattttcctctcagtcgggtactccacctgccactggtgccacatgatggaagaggagtccttccagaatgaggagattggccgcctgctcagtgaggactttgtgagtgtgaaggtagaccgtgaggagcggcctgacgtggacaaggtgtacatgacgttcgtgcaggccaccagcagcggcgggggctggcccatgaatgtgtggctgactcccaacctccagccctttgtcgggggcacctatttccctcctgaggatggcttgacccgagtcggcttccgcacagtgttgctgagaatacgagaacagtggaaacagaacaagaacaccctgctagaaaatagccagcgtgtcaccactgccctgctggcccgatcagagatcagcgtgggtgaccgccagctgccgccctctgccgccaccgtgaacaatcgctgcttccagcagctggatgagggctatgatgaggaatacggtggcttcgctgaggcccccaagtttcccacgccggtgatcctgagcttcctgttctcctactggctcagccatcgactgactcaggatggctctcgggcccagcagatggccttgcataccctgaaaatgatggctaacgggggcatccgggaccatgtggggcagggctttcaccgctactccacagaccgccagtggcacgtccctcactttgagaagatgctctatgaccaggcacagctcgctgtggcctattcgcaggccttccagctctctggtgatgaattctactctgacgtggccaaaggcatcctgcagtacgtggctcggagcctgagccaccggtccggaggcttctatagcgcagaagatgcagactcgcccccagagcggggccagcggcccaaagagggcgcctactatgtgtggacggtcaaagaggttcagcagctcctcccggagcctgtgttgggtgccaccgagccgctgacctcaggccagctcctcatgaagcactacggcctcacagaggctggtaacatcagccccagtcaggaccccaagggggagctgcagggccagaatgtgctgaccgtccggtactcgctggagctgactgctgcccgctttggcttggatgtggaggccgtgcggaccttgctcaattcagggctggagaagctcttccaggcccggaagcatcggcccaagccgcacctggacagcaagatgctggctgcctggaatggcttgatggtgtcaggctatgctgtgactggggctgtcctgggccaagacaggctgatcaactatgccaccaatggtgccaagttcctgaagcggcacatgtttgatgtggccagtggccgcctgatgcggacctgctacaccggccctggggggactgtggagcacagcaacccaccctgctggggcttcctggaggactacgccttcgtggtgcggggcctgctggacctgtatgaggcctcacaggagagtgcgtggctcgagtgggctctgcggctgcaggacacacaggacaggctcttttgggactcccagggtggcggctacttctgcagtgaggctgagctgggggctggcctgcccctgcgtctgaaggacgaccaggatggagcagagcccagcgccaattccgtgtcagcccacaacctgctccggctgcatggcttcacgggccacaaggactggatggacaagtgtgtgtgcctattgaccgccttttccgagcgcatgcgtcgtgtcccggtggcgttgcccgagatggtccgcgccctctcagcccagcagcagaccctcaagcagatcgtgatctgtggagaccgtcaggccaaggacaccaaggccctggtgcagtgcgtccactctgtctacattcctaacaaggtgctgattctggctgatggggacccctcgagcttcctgtcccgccagctgcctttcctgagtaccctccgacggttggaagaccaggccactgcatatgtgtgtgagaatcaagcctgctcagtgcccatcactgatccctgcgaattacgaaaactactacatccatgactgccccaacccccttggggtggggcagaaggtgaagcatcccaactgactagagactcaggccctgcagggccctatagaacctgtggccatccctgagcaccctgccaccaggtgacctcggccatactcactgccccccttgggcacccactcaccctagaataaacttaacagtgtcccgtggtaaaaaaaacaacagcaactccaacgacactacaataacactatcaatatccaacaacacataagtccaacaaataaacacccatcacaactacaacaccgatacaaacaacacaacaaaaacaagaccgccccacctcactaaataaaccacacagaacagaccactacaaataataatcacattctctacagacagaaacaagagggcgccccataacagagcacacgcccaatactacgaaacgacgaccagacggcggagaagcagaaaccagaacgcacagcacgagacgagcagacaaccagcacagcacagagactccgaggacgcacgaccacacactcggtgagggctactcatctgtggcgacgacccaccacatataccatcgcgtgcgg

SEQ ID NO: 429216 - DNA, 2988 bp, Homo sapiens
gaagacccgcccgcggctccgtaggtgcccggcccgcccctcgcagcctcctgacttcccttcctgtcctcagcggccgggcccacggccccgagcagccatgctgggcgcgcgggcctggttgggccgcgtccttctgctgccccgcgccggtgcaggcctcgccgcgagccgcaggtgtcctggagtctggcccaggacctggccccacaggagtcccagcaggggtagctcctcccgggacaaggaccgaagtgcgacggtcagtagttcagtgcccatgcctgctggagggaaaggaagccatccttcatctacaccccagagggtccccaaccgcctgatccacgagaagtcaccatacctcctacaacatgcctacaatcctgtggactggtacccctggggacaggaagccttcgacaaggccaggaaggaaaacaagccgattttcctctcagtcgggtactccacctgccactggtgccacatgatggaagaggagtccttccagaatgaggagattggccgcctgctcagtgaggactttgtgagtgtgaaggtagaccgtgaggagcggcctgacgtggacaaggtgtacatgacgttcgtgcaggccaccagcagcggcgggggctggcccatgaatgtgtggctgactcccaacctccagccctttgtcgggggcacctatttccctcctgaggatggcttgacccgagtcggcttccgcacagtgttgctgagaatacgagaacagtggaaacagaacaagaacaccctgctagaaaatagccagcgtgtcaccactgccctgctggcccgatcagagatcagcgtgggtgaccgccagctgccgccctctgccgccaccgtgaacaatcgctgcttccagcagctggatgagggctatgatgaggaatacggtggcttcgctgaggcccccaagtttcccacgccggtgatcctgagcttcctgttctcctactggctcagccatcgactgactcaggatggctctcgggcccagcagatggccttgcataccctgaaaatgatggctaacgggggcatccgggaccatgtggggcagggctttcaccgctactccacagaccgccagtggcacgtccctcactttgagaagatgctctatgaccaggcacagctcgctgtggcctattcgcaggccttccagctctctggtgatgaattctactctgacgtggccaaaggcatcctgcagtacgtggctcggagcctgagccaccggtccggaggcttctatagcgcagaagatgcagactcgcccccagagcggggccagcggcccaaagagggcgcctactatgtgtggacggtcaaagaggttcagcagctcctcccggagcctgtgttgggtgccaccgagccgctgacctcaggccagctcctcatgaagcactacggcctcacagaggctggtaacatcagccccagtcaggaccccaagggggagctgcagggccagaatgtgctgaccgtccggtactcgctggagctgactgctgcccgctttggcttggatgtggaggccgtgcggaccttgctcaattcagggctggagaagctcttccaggcccggaagcatcggcccaagccgcacctggacagcaagatgctggctgcctggaatggcttgatggtgtcaggctatgctgtgactggggctgtcctgggccaagacaggctgatcaactatgccaccaatggtgccaagttcctgaagcggcacatgtttgatgtggccagtggccgcctgatgcggacctgctacaccggccctggggggactgtggagcacaggttgggggctgggtagaccgggagggcccgtctccccaacgcgtccccagcctacctctgccctacttctcccctccatgtggactccagtcctggctctgccaggtgcttgctgtgagtttgtagcttccctgggcccatttactcatctgggaagtgggctgatggcacctgcccaagagggttcatctggagggttaagtgaacaaatgcgtgaaagggcctcctctgggaaaggccctctctcctggggctctccccagcccctcccgtaatgcctgtcccccagcaacccaccctgctggggcttcctggaggactacgccttcgtggtgcggggcctgctggacctgtatgaggcctcacaggagagtgcgtggctcgagtgggctctgcggctgcaggacacacaggacaggctcttttgggactcccagggtggcggctacttctgcagtgaggctgagctgggggctggcctgcccctgcgtctgaaggacgaccaggatggagcagagcccagcgccaattccgtgtcagcccacaacctgctccggctgcatggcttcacgggccacaaggactggatggacaagtgtgtgtgcctattgaccgccttttccgagcgcatgcgtcgtgtcccggtggcgttgcccgagatggtccgcgccctctcagcccagcagcagaccctcaagcagatcgtgatctgtggagaccgtcaggccaaggacaccaaggccctggtgcagtgcgtccactctgtctacattcctaacaaggtgctgattctggctgatggggacccctcgagcttcctgtcccgccagctgcctttcctgagtaccctccgacggttggaagaccaggccactgcatatgtgtgtgagaatcaagcctgctcagtgcccatcactgatccctgcgaattacgaaaactactacatccatgactgccccaacccccttggggtggggcagaaggtgaagcatcccaactgactagagactcaggccctgcagggccctatagaacctgtggccatccctgagcaccctgccaccaggtgacctcggccatactcactgccccccttgggcacccactcaccctagaataaacttaacagtgtcccgtggtaa

SEQ ID NO: 429217 - DNA, 3050 bp, Homo sapiens
gaagacccgcccgcggctccgtaggtgcccggcccgcccctcgcagcctcctgacttcccttcctgtcctcagcggccgggcccacggccccgagcagccatgctgggcgcgcgggcctggttgggccgcgtccttctgctgccccgcgccggtgcaggcctcgccgcgagccgcaggtgtcctggagtctggcccaggacctggccccacaggagtcccagcaggggtagctcctcccgggacaaggaccgaagtgcgacggtcagtagttcagtgcccatgcctgctggagggaaaggaagccatccttcatctacaccccagagggtccccaaccgcctgatccacgagaagtcaccatacctcctacaacatgcctacaatcctgtggactggtacccctggggacaggaagccttcgacaaggccaggaaggaaaacaagccgattttcctctcagtcgggtactccacctgccactggtgccacatgatggaagaggagtccttccagaatgaggagattggccgcctgctcagtgaggactttgtgagtgtgaaggtagaccgtgaggagcggcctgacgtggacaaggtgtacatgacgttcgtgcaggccaccagcagcggcgggggctggcccatgaatgtgtggctgactcccaacctccagccctttgtcgggggcacctatttccctcctgaggatggcttgacccgagtcggcttccgcacagtgttgctgagaatacgagaacagtggaaacagaacaagaacaccctgctagaaaatagccagcgtgtcaccactgccctgctggcccgatcagagatcagcgtgggtgaccgccagctgccgccctctgccgccaccgtgaacaatcgctgcttccagcagctggatgagggctatgatgaggaatacggtggcttcgctgaggcccccaagtttcccacgccggtgatcctgagcttcctgttctcctactggctcagccatcgactgactcaggatggctctcgggcccagcagatggccttgcataccctgaaaatgatggctaacgggggcatccgggaccatgtggggcagggctttcaccgctactccacagaccgccagtggcacgtccctcactttgagaagatgctctatgaccaggcacagctcgctgtggcctattcgcaggccttccagctctctggtgatgaattctactctgacgtggccaaaggcatcctgcagtacgtggctcggagcctgagccaccggtccggaggcttctatagcgcagaagatgcagactcgcccccagagcggggccagcggcccaaagagggcgcctactatgtgtggacggtcaaagaggttcagcagctcctcccggagcctgtgttgggtgccaccgagccgctgacctcaggccagctcctcatgaagcactacggcctcacagaggctggtaacatcagccccagtcaggaccccaagggggagctgcagggccagaatgtgctgaccgtccggtactcgctggagctgactgctgcccgctttggcttggatgtggaggccgtgcggaccttgctcaattcagggctggagaagctcttccaggcccggaagcatcggcccaagccgcacctggacagcaagatgctggctgcctggaatggcttgatggtgtcaggctatgctgtgactggggctgtcctgggccaagacaggctgatcaactatgccaccaatggtgccaagttcctgaagcggcacatgtttgatgtggccagtggccgcctgatgcggacctgctacaccggccctggggggactgtggagcacagcaacccaccctgctggggcttcctggaggactacgccttcgtggtgcggggcctgctggacctgtatgaggcctcacaggagagtgcgtggctcgagtgggctctgcggctgcaggacacacaggacaggctcttttgggactcccagggtggcggctacttctgcagtgaggctgagctgggggctggcctgcccctgcgtctgaaggacgaccaggatggagcagagcccagcgccaattccgtgtcagcccacaacctgctccggctgcatggcttcacgggccacaaggactggatggacaagtgtgtgtgcctattgaccgccttttccgagcgcatgcgtcgtgtcccggtggcgttgcccgagatggtccgcgccctctcagcccagcagcagaccctcaagcagatcgtgatctgtggagaccgtcaggccaaggacaccaaggccctggtgcagtgcgtccactctgtctacattcctaacaaggtgctgattctggctgatggggacccctcgagcttcctgtcccgccagctgcctttcctgagtaccctccgacggttggaagaccaggccactgcatatgtgtgtgagaatcaagcctgctcagtgcccatcactgatccctgcgaattacgaaaactactacatccatgactgccccaacccccttggggtggggcagaaggtgaagcatcccaactgactagagactcaggccctgcagggccctatagaacctgtggccatccctgagcaccctgccaccaggtgacctcggccatactcactgccccccttgggcacccactcaccctagaataaacttaacagtgtcccgtggtaaaaaaaaaaaaaaaaaaaaaaaaaaaaaaaaaaaaaaaaaaaaaaaaaaagaaaaaaacacaggggagcaaaaaagcgaaaaccaaacaaagaggggaacgggggccgccaaaaaaatagacccgcaggagcgagcaaacagaacaaccgcacgcaagatttatactagcagaaagacgatcagcacaaaaacgggccaagcaacacactccggccccaggaacccgctaaaaacaaaaagacaacaaagaagaaacacgtcacgtcagaatgaagggcacaaccacaacggcggagcgaacaaaatgcgcacacacacaacaaaaacacccgcgcaaaaacacccgagtcc

SEQ ID NO: 429218 - DNA, 2410 bp, Homo sapiens
gaagacccgcccgcggctccgtaggtgcccggcccgcccctcgcagcctcctgacttcccttcctgtcctcagcggccgggcccacggccccgagcagccatgctgggcgcgcgggcctggttgggccgcgtccttctgctgccccgcgccggtgcaggcctcgccgcgagccgcaggtgtcctggagtctggcccaggacctggccccacaggagtcccagcaggggtagctcctcccgggacaaggaccgaagtgcgacggtcagtagttcagtgcccatgcctgctggagggaaaggaagccatccttcatctacaccccagagggtccccaaccgcctgatccacgagaagtcaccatacctcctacaacatgcctacaatcctgtggactggtacccctggggacaggaagccttcgacaaggccaggaaggaaaacaagccgattttcctctcagtcgggtactccacctgccactggtgccacatgatggaagaggagtccttccagaatgaggagattggccgcctgctcagtgaggactttgtgagtgtgaaggtagaccgtgaggagcggcctgacgtggacaaggtgtacatgacgttcgtgcaggccaccagcagcggcgggggctggcccatgaatgtgtggctgactcccaacctccagccctttgtcgggggcacctatttccctcctgaggatggcttgacccgagtcggcttccgcacagtgttgctgagaatacgagaacagtggaaacagaacaagaacaccctgctagaaaatagccagcgtgtcaccactgccctgctggcccgatcagagatcagcgtgggtgaccgccagctgccgccctctgccgccaccgtgaacaatcgctgcttccagcagctggatgagggctatgatgaggaatacggtggcttcgctgaggcccccaagtttcccacgccggtgatcctgagcttcctgttctcctactggctcagccatcgactgactcaggatggctctcgggcccagcagatggccttgcataccctgaaaatgatggctaacgggggcatccgggaccatgtggggcagggctttcaccgctactccacagaccgccagtggcacgtccctcactttgagaagatgctctatgaccaggcacagctcgctgtggcctattcgcaggccttccagctctctggtgatgaattctactctgacgtggccaaaggcatcctgcagtacgtggctcggagcctgagccaccggtccggaggcttctatagcgcagaagatgcagactcgcccccagagcggggccagcggcccaaagagggcgcctactatgtgtggacggtcaaagaggttcagcagctcctcccggagcctgtgttgggtgccaccgagccgctgacctcaggccagctcctcatgaagcactacggcctcacagaggctggtaacatcagccccagtcaggaccccaagggggagctgcagggccagaatgtgctgaccgtccggtactcgctggagctgactgctgcccgctttggcttggatgtggaggccgtgcggaccttgctcaattcagggctggagaagctcttccaggcccggaagcatcggcccaagccgcacctggacagcaagatgctggctgcctggaatgacaggacaggctcttttgggactcccagggtggcggctacttctgcagtgaggctgagctgggggctggcctgcccctgcgtctgaaggacgaccaggatggagcagagcccagcgccaattccgtgtcagcccacaacctgctccggctgcatggcttcacgggccacaaggactggatggacaagtgtgtgtgcctattgaccgccttttccgagcgcatgcgtcgtgtcccggtggcgttgcccgagatggtccgcgccctctcagcccagcagcagaccctcaagcagatcgtgatctgtggagaccgtcaggccaaggacaccaaggccctggtgcagtgcgtccactctgtctacattcctaacaaggtgctgattctggctgatggggacccctcgagcttcctgtcccgccagctgcctttcctgagtaccctccgacggttggaagaccaggccactgcatatgtgtgtgagaatcaagcctgctcagtgcccatcactgatccctgcgaattacgaaaactactacatccatgactgccccaacccccttggggtggggcagaaggtgaagcatcccaactgactagagactcaggccctgcagggccctatagaacctgtggccatccctgagcaccctgccaccaggtgacctcggccatactcactgccccccttgggcacccactcaccctagaataaacttaacagtgtcccgtggtaa

SEQ ID NO: 429219 - DNA, 1425 bp, Homo sapiens
gaagacccgcccgcggctccgtaggtgcccggcccgcccctcgcagcctcctgacttcccttcctgtcctcagcggccgggcccacggccccgagcagccatgctgggcgcgcgggcctggttgggccgcgtccttctgctgccccgcgccggtgcaggcctcgccgcgagccgcaggtgtcctggagtctggcccaggacctggccccacaggagtcccagcaggggtagctcctcccgggacaaggaccgaagtgcgacggtcagtagttcagtgcccatgcctgctggagggaaaggaagccatccttcatctacaccccagagggtccccaaccgcctgatccacgagaagtcaccatacctcctacaacatgcctacaatcctgtggactggtacccctggggacaggaagccttcgacaaggccaggaaggaaaacaagccgattttcctctcagtcgggtactccacctgccactggtgccacatgatggaagaggagtccttccagaatgaggagattggccgcctgctcagtgaggactttgtgagtgtgaaggtagaccgtgaggagcggcctgacgtggacaaggtgtacatgacgttcgtgcaggccaccagcagcggcgggggctggcccatgaatgtgtggctgactcccaacctccagccctttgtcgggggcacctatttccctcctgaggatggcttgacccgagtcggcttccgcacagtgttgctgagaatacgagaacagtggaaacagaacaagaacaccctgctagaaaatagccagcgtgtcaccactgccctgctggcccgatcagagatcagcgtgggtgaccgccagctgccgccctctgccgccaccgtgaacaatcgctgcttccagcagctggatgagggctatgatgaggaatacggtggcttcgctgaggcccccaagtttcccacgccggtgatcctgagcttcctgttctcctactggctcagccatcgactgactcaggatggctctcgggcccagcagatggccttgcataccctgaaaatgatggctaacgggggcatccgggaccatgtggggcagggctttcaccgctactccacagaccgccagtggcacgtccctcactttgagaagatgctctatgaccaggcacagctcgctgtggcctattcgcaggccttccagctctctggtgatgaattctactctgacgtggccaaaggcatcctgcagtacgtggctcggagcctgagccaccggtccggaggcttctatagcgcagaagatgcagaggccctatagaacctgtggccatccctgagcaccctgccaccaggtgacctcggccatactcactgccccccttgggcacccactcaccctagaataaacttaacagtgtcccgtggtaa

SEQ ID NO: 429220 - DNA, 485 bp, Homo sapiens
tttaccacgggacactgttaagtttattctagggtgagtgggtgcccaagggggggcagtgagtatggccaaggacaccaaggccctggtgcagtgcgtccactctgtctacattcctaacaaggtgctgattctggctgatggggacccctcgagcttcctgtcccgccagctgcctttcctgagtaccctccgacggttggaagaccaggccactgcatatgtgtgtgagaatcaagcctgctcagtgcccatcactgatccctgcgaattacgaaaactactacatccatgactgccccaacccccttggggtggggcagaaggtgaagcatcccaactgactagagactcaggccctgcagggccctatagaacctgtggccatccctgagcaccctgccaccaggtgacctcggccatactcactgccccccttgggcacccactcaccctagaataaacttaacagtgtcccgtggtaa

SEQ ID NO: 429221 - DNA, 7355 bp, Homo sapiens
  misc_feature (1878)..(1878): n is a, c, g, or t
  misc_feature (1890)..(1890): n is a, c, g, or t
tattattgcaaccatttcgcttgtatttgagtgtgaagcgcctagaaaaccacaggacccctacggcgagccgggaatttttagatattttcctccgagtcaacgctcagtgaaatcagttcaatcagtggcccgacaccgtgcggctgacacagcttatcccccgaccctgagatcaggggtccccggagcccaaggtcgcttccaaagctcagcgaggcggaggtgcggcccgggctggtctggttcggccaccgttgttatggcaaccgccaataggttggcttcatctctaactgaaagtctgcacaggagcggccgatcgaagggccccgaggtgggcagcacaggctcctcgacgacttcctaggtcgcaatctccaggaaaacgaccacagggtcagcggagctagccgccgagccccgctccccgggcccttccggcggctgcgccctttcaccccggacgtgggcgggagaggaagcggctggtgatgctggaacaaacatggccgctctggcgcccgtcggctcccccgcctcccgcggtcctaggctggccgcgggcctccggctgctcccaatgctgggtttgctgcagttgctggccgagcctggcctgggccgcgtccatcacctggcactcaaggatgatgtgaggcataaagttcatctgaacacctttggcttcttcaaggatgggtacatggtggtgaatgtcagtagcctctcactgaatgagcctgaagacaaggatgtgactattggatttagcctagaccgtacaaagaatgatggcttttcttcttacctggatgaagatgtgaattactgtattttaaagaaacagtctgtctctgtcacccttttaatcctagacatctccagaagtgaggtaagagtaaagtctccaccagaagctggtacccagttaccaaagatcatcttcagcagggatgagaaagtccttggtcagagccaggagcctaatgttaaccctgcttcagcaggcaaccagacccagaagacacaagatggtggaaagtctaaaagaagtacagtggattcaaaggccatgggagagaaatccttttctgttcataataatggtggggcagtgtcatttcagtttttctttaacatcagcactgatgaccaagaaggcctttacagtctttattttcataaatgccttggaaaagaattgccaagtgacaagtttacattcagccttgatattgagatcacagagaagaatcctgacagctacctctcagcaggagaaattcctctccccaaattatacatctcaatggcctttttcttctttctttctgggaccatctggattcatatccttcgaaaacgacggaatgatgtatttaaaatccactggctgatggcggcccttcctttcaccaagtctctttccttggtgttccatgcaattgactaccactacatctcctcccagggcttccctatcgaaggctgggctgttgtgtactacataactcaccttttgaaaggggcgctactcttcatcaccattgcactcattggcactggctgggctttcattaagcacatcctttctgataaagacaaaaagatcttcatgattgtcattccactccaggtcctggcaaatgtagcctacatcatcatagagtccaccgaggagggcacgactgaatatggcttgtggaaggactctctatttctggtcgacctgttgtgttgtggtgccatcctcttcccagtggtgtggtcaatcagacatttacaagaagcatcagcaacagatggaaaaggtgacagcatgggacctcttcagcagagagcgaatctgagagcaggaagtcgcatagagtctcnccattttgcccnggctgatcttgaactcctggcctctagctgtcctcctgcctcagtctcccaaagggctgggattacagctgctattaacttagcaaagctgaaacttttcagacattattacgtcttgattgtgtgttacatatacttcactaggatcattgcatttctcctcaaactcgctgttccattccagtggaagtggctctaccagctcctggatgaaacggccacactggtcttctttgttctaacggggtataaattccgtccggcttcagataacccctacctacaactttctcaggaagaagaagacttggaaatggagtccgttgtgacaacatctggggtgatggaaagtatgaagaaagtcaagaaggtgaccaacggctccgtggagccccagggcgagtgggaaggcgccgtgtgacagagccgaccctgaggatggcactgtccaaggaaactgttaacttattcatagtcctattggacagcaggagcagctcctacagtgaactattggcaccaccgacagtgacaccagggcacatggctggagcacagtgccgcggaaacctgattttgtactctcttttatggaaacgatctgtggctgtttagaggcagctggatcctctttcaggcgggaatgggagggcgggcacagggaggaggagaggaagagaaaaggaagaattcatttttaatttaggtttctttttttcttcttcatttcggagctctaaggtgtatgcagttgtgaccccatgtgtggggaagtgtagcaaggacggctggtggagggggaaggagggtgcgaggtgtctgtctgatgctttaggaaatgtctactgaggaccctgggacttaagaagaagggcggggagagtgccattgcctgtttgggagacaaaaatgaacgaaaacaggtgactttggaaagcaaagtcaaaacccagtttaggatgtagcacctgccccaggattcctgccctcggctttgccccagacccttattccagatgctgagagtgaccaggacagcagctcctgaggcccagtggtcttctttccaacaggaaaagaaggctgtgatgtcgctgtcaggatcatgccctgtggcacagcacaggtggtgggaggtggttttctgactgagatgttgcctgatggatggaaagaaatgtatttttaagttcaaaaagcattatcctgtggcgttgcctggacatccactccctgacagcccagagcagcactgtctggcttcccttcatgcttgtggctttgttgtgtttgatcagaattttgggggaaatggaaagttttcctcaaggagcagctgggggcagaataggtagtatttaagcaaatacttaagtccaagcaaatcatccccattaaaaagcttttcctgtaggctagtaggatttctaaatagatgaattcaacagacttggtccccatagtccaagagtatgtatgtgaagaaagtgagcatgattcaacagtttcactctcagggattttaggatggcaaaatacttcacagaaactcaatgattaagttcccttccacacttccagagcttgaatgaacacaggtagccacctaaattgagcagtattgcaactcagagagaaaatcatctgaatagtaggacaagctcagaaggtacattgtgactgagggcttaaaaggagaccaaaacatggccccatcagggaagcttcttaatgcttggggggccagctaggtagggttgcttccaaaagctggagcccacccctgcctaggggttgtcagagagccacacctgcaggggaacaggtacctccgagggtgagagtcgtggtctctgggagttgttttctcacctctggcttagaagggtcaggcagaaaccacaggatgtggggtcacactcactgtcccaagtttgggaacctgaaaaagtctccattcagaacatggttgttctccctgtcccatgctatcttatcttcctaaatgactaatgaggaagcgggtgttctttttctgcactttgattcgccatctgggttctgtagggtgctctgaaggtgtgatctgccttctggctgatgtggaggaagagcaagcgccttcccaggccacagctgctcacctctcggcagatattttaggcaagcatccgtgtgtcttcccatcttcaggagaaaggtaaatgcaccctaagtgttcacttctggacctttttcaagttcacttgggactgtgtgacagaagggagttggagggaggatgggaatatttttaacactttgttttcctgtgcagaaacataataccagttttcgcagaaatgtgtctcaatctgtgactaccaaagccctcctcagtccttccctcagagggacacatttgctgtttctcccgcaagcagatgttgtggatgaggcgatagactccttggcaagaacgaaaggtgtgatgaaacctccctgctcggaagggtctccgtggaggtgtcctcatttcacatgctgggttttgcaagcgaggaagccaggcagtggaggaactagagagaggcaggcgtgtgtgtggacaagcgctggagccgcagccctcagactggcacgggaacgccagcgttgggtgttcagattccacgcgtatgtctgggctcactcacagcatggccgagtgtctgcagtgctggtcctgacccttccagagcagcagtggacagatgagataagactgtttcagaaacaaagatggccacagccttcctaacaagcaggtcatctggccatgtctgtattgtaactggtaaaaggcttcaagtcagattgatgatcaagaaaagtcaaaaccccagcccaagattgggaaagcaggtggtggttccaagcttttaaaaaattattgaagctctccatcctgttctgtgagtgtgtcttctctttctccttcacgtcatagccgtgacccaccgttcatctctgctcttgcgtaaagatgaccgatggagtccaaagccaagtggcttcaccagctgacaagccaccctcctgcagcctgagtttcacagtccactgggttcgttgtcatgcggtgtttgaatggttaagcccttgcagtatttcagatcgggcaaaaaatatcggatgcacatagcagaaccattggtggtatttatagctttgctttgtactcctcactgtttctgcctacgcaaaatatccatgtttcctctgagaaatctgttgtggactgaaagcgctgctggctgtgaaatttaataaagtgtgtatgctttgctagaaaattatttcttggacaataggaacagtcattgatctgtaaatcctggctcttaacagtgagtggccaaggacttgatcagcccatttcttggtccctcagtgctttaaaatttaagtagcactgcattttgtaatgttgaatatgactctagtgacttgtaggaggcacttgtgaggagatgcttgcttcagtgtaaaagatgctcatggcctgagtcagttgagttttctttcaagaaaccacttcagagtgaaatatccagggtttccccgccctggacatgtccagcctgcccaggcagcacacagccctgtaagtccacctcgtgtgggtgagatttcctcctgcgtgatgacctcatcgccatctctgctgtctcattccacagcctccctccctcttctctcctcctctgccctcgcccttcccccttccccatcccctccccctcctcctctgccctcgcccttacccctcccccttccccttccgctcctcctccctcctccacctctttctcctcctccttccctcctcctccctcctcttcccttctctgccatctttctccccgtgcctattgatcccacataggctcattctgggtacaccggctaaaggctttggtgcattgcagcgttttctcccagcagctgtgtgaaagatgcattttctaagctaaggagaattttctcaagagtggcatactcatgccaaatattattgctctgggccatataggctggtcttcctccacactaaaatgggtgtcttgttttggtacttaaaacagtctactccaggcatccagtccttacagaccaaggaagagcatagcgatgcctgttggaattgcagatgcattctggccttctcccccgtcctgaaacattttctttgaggaaggctcttagaacattagatagtctgctgaggttgttggcccagctccatacacccagtagaacagtggaacaactcatgcttcatgctgccaagctgctgtacttcaaaggaaacagatctagcacactgctgcacccctgcttccacactccacacttcaccccgctgcttttctctgacccgcccctggccttgtaagactcacgtaagctaagtccaggatgcctgtggcctgcggcttgattcttccctttaggattcagcaagttaatggcttcctcgctatagaagtgagactttgacttgatgcctcttggtatatcaaaaagatattcatccagaaagtaccaaatgttctgaaagacccgctcttcactccagttttccctagggtgtttctggcagggcgtttttaaaaggcatctacctgagttgacgctaatacttgtcaccacctggaacgtagttatcggtcggcaggctgaacatactccagattccccagaggccacttctgtagcccagcgatgcatctgagcctctctgcgtggtttatgcttgaaaaatagataatgcttttagatggttcactgccaggccatgggccccacacatctcaggccctgtgtgagggagcacactgagatggtgcaggagtgaatgggcatggcttggcctcgctacctcggggacctgttggagttctggcagcagggtgtctgcaggtgggacggcgttctgggcagagtcagaatggtcagaatgaaacagaacagccaactcacccacaggacagcttattttgaggcaaggttttggattttggaggaagcagccagatgaggcggtgagcctccagaaggtcagcctttggagcacgtaagatactgttacagggtccagaaatcgtgttcacatgggggctttgactcttcaaacagcttttgcagatcgtaaattgcatttgcctagtcgtgtgacctcaaaagaagtcagacatatttaatccagaaatagtttcgtttgagggagggcttgcaggtctgtaaatagcatttgctttcctggttagagattgggatgcagaaggagttttcagtattttttttaaaacactaatgatcattgaagagtatttatgtaaacatacaacgtataatgggtgggggatccgatcatggtgatgtacggggtgaattctcttgccgtgttgcaaatgtgtaaaataaagattatctggcagaac

SEQ ID NO: 429222 - DNA, 7745 bp, Homo sapiens
  misc_feature (2268)..(2268): n is a, c, g, or t
  misc_feature (2280)..(2280): n is a, c, g, or t
taagagagtaaggctaaaagccaagcttaggagatcagtctttccagcccctgcaggctttttcagtcaataccttaaagtgtaatgtccctttgaaaatgttgccaggagaagcaggcataacttgttctgttactcagcctgtttgtttccagttacagcatcatgattatgcaaataatcttttcttgaaactatgaaatcacatggctaaatgtaattgtcaaggcagcagttttctagaatttaagaagtaactgtagagaaaatgctcaacaatgtctttgtagtcagttttccctcattcttattcctctcaattccaaaataatgactggcacaatacagctttcaaatatgtgaaagaagaagatatcctcttaaacccctggacagacagcactggtatgaccctatgtaggtcacatgataatacccaagtatagagaagcaaggaatgctatgaacccagttttaagcccttataaaactgttgtccagaaactaagacaaaagtctcctatttaaaactattttaatgtttcatcactattgtattataaaatgggattaagattcttacctgattttttttttattgagacagagtctcactctgtcacccaggtggtctggttcggccaccgttgttatggcaaccgccaataggttggcttcatctctaactgaaagtctgcacaggagcggccgatcgaagggccccgaggtgggcagcacaggctcctcgacgacttcctaggtcgcaatctccaggaaaacgaccacagggtcagcggagctagccgccgagccccgctccccgggcccttccggcggctgcgccctttcaccccggacgtgggcgggagaggaagcggctggtgatgctggaacaaacatggccgctctggcgcccgtcggctcccccgcctcccgcggtcctaggctggccgcgggcctccggctgctcccaatgctgggtttgctgcagttgctggccgagcctggcctgggccgcgtccatcacctggcactcaaggatgatgtgaggcataaagttcatctgaacacctttggcttcttcaaggatgggtacatggtggtgaatgtcagtagcctctcactgaatgagcctgaagacaaggatgtgactattggatttagcctagaccgtacaaagaatgatggcttttcttcttacctggatgaagatgtgaattactgtattttaaagaaacagtctgtctctgtcacccttttaatcctagacatctccagaagtgaggtaagagtaaagtctccaccagaagctggtacccagttaccaaagatcatcttcagcagggatgagaaagtccttggtcagagccaggagcctaatgttaaccctgcttcagcaggcaaccagacccagaagacacaagatggtggaaagtctaaaagaagtacagtggattcaaaggccatgggagagaaatccttttctgttcataataatggtggggcagtgtcatttcagtttttctttaacatcagcactgatgaccaagaaggcctttacagtctttattttcataaatgccttggaaaagaattgccaagtgacaagtttacattcagccttgatattgagatcacagagaagaatcctgacagctacctctcagcaggagaaattcctctccccaaattatacatctcaatggcctttttcttctttctttctgggaccatctggattcatatccttcgaaaacgacggaatgatgtatttaaaatccactggctgatggcggcccttcctttcaccaagtctctttccttggtgttccatgcaattgactaccactacatctcctcccagggcttccctatcgaaggctgggctgttgtgtactacataactcaccttttgaaaggggcgctactcttcatcaccattgcactcattggcactggctgggctttcattaagcacatcctttctgataaagacaaaaagatcttcatgattgtcattccactccaggtcctggcaaatgtagcctacatcatcatagagtccaccgaggagggcacgactgaatatggcttgtggaaggactctctatttctggtcgacctgttgtgttgtggtgccatcctcttcccagtggtgtggtcaatcagacatttacaagaagcatcagcaacagatggaaaaggtgacagcatgggacctcttcagcagagagcgaatctgagagcaggaagtcgcatagagtctcnccattttgcccnggctgatcttgaactcctggcctctagctgtcctcctgcctcagtctcccaaagggctgggattacagctgctattaacttagcaaagctgaaacttttcagacattattacgtcttgattgtgtgttacatatacttcactaggatcattgcatttctcctcaaactcgctgttccattccagtggaagtggctctaccagctcctggatgaaacggccacactggtcttctttgttctaacggggtataaattccgtccggcttcagataacccctacctacaactttctcaggaagaagaagacttggaaatggagtccgttgtgacaacatctggggtgatggaaagtatgaagaaagtcaagaaggtgaccaacggctccgtggagccccagggcgagtgggaaggcgccgtgtgacagagccgaccctgaggatggcactgtccaaggaaactgttaacttattcatagtcctattggacagcaggagcagctcctacagtgaactattggcaccaccgacagtgacaccagggcacatggctggagcacagtgccgcggaaacctgattttgtactctcttttatggaaacgatctgtggctgtttagaggcagctggatcctctttcaggcgggaatgggagggcgggcacagggaggaggagaggaagagaaaaggaagaattcatttttaatttaggtttctttttttcttcttcatttcggagctctaaggtgtatgcagttgtgaccccatgtgtggggaagtgtagcaaggacggctggtggagggggaaggagggtgcgaggtgtctgtctgatgctttaggaaatgtctactgaggaccctgggacttaagaagaagggcggggagagtgccattgcctgtttgggagacaaaaatgaacgaaaacaggtgactttggaaagcaaagtcaaaacccagtttaggatgtagcacctgccccaggattcctgccctcggctttgccccagacccttattccagatgctgagagtgaccaggacagcagctcctgaggcccagtggtcttctttccaacaggaaaagaaggctgtgatgtcgctgtcaggatcatgccctgtggcacagcacaggtggtgggaggtggttttctgactgagatgttgcctgatggatggaaagaaatgtatttttaagttcaaaaagcattatcctgtggcgttgcctggacatccactccctgacagcccagagcagcactgtctggcttcccttcatgcttgtggctttgttgtgtttgatcagaattttgggggaaatggaaagttttcctcaaggagcagctgggggcagaataggtagtatttaagcaaatacttaagtccaagcaaatcatccccattaaaaagcttttcctgtaggctagtaggatttctaaatagatgaattcaacagacttggtccccatagtccaagagtatgtatgtgaagaaagtgagcatgattcaacagtttcactctcagggattttaggatggcaaaatacttcacagaaactcaatgattaagttcccttccacacttccagagcttgaatgaacacaggtagccacctaaattgagcagtattgcaactcagagagaaaatcatctgaatagtaggacaagctcagaaggtacattgtgactgagggcttaaaaggagaccaaaacatggccccatcagggaagcttcttaatgcttggggggccagctaggtagggttgcttccaaaagctggagcccacccctgcctaggggttgtcagagagccacacctgcaggggaacaggtacctccgagggtgagagtcgtggtctctgggagttgttttctcacctctggcttagaagggtcaggcagaaaccacaggatgtggggtcacactcactgtcccaagtttgggaacctgaaaaagtctccattcagaacatggttgttctccctgtcccatgctatcttatcttcctaaatgactaatgaggaagcgggtgttctttttctgcactttgattcgccatctgggttctgtagggtgctctgaaggtgtgatctgccttctggctgatgtggaggaagagcaagcgccttcccaggccacagctgctcacctctcggcagatattttaggcaagcatccgtgtgtcttcccatcttcaggagaaaggtaaatgcaccctaagtgttcacttctggacctttttcaagttcacttgggactgtgtgacagaagggagttggagggaggatgggaatatttttaacactttgttttcctgtgcagaaacataataccagttttcgcagaaatgtgtctcaatctgtgactaccaaagccctcctcagtccttccctcagagggacacatttgctgtttctcccgcaagcagatgttgtggatgaggcgatagactccttggcaagaacgaaaggtgtgatgaaacctccctgctcggaagggtctccgtggaggtgtcctcatttcacatgctgggttttgcaagcgaggaagccaggcagtggaggaactagagagaggcaggcgtgtgtgtggacaagcgctggagccgcagccctcagactggcacgggaacgccagcgttgggtgttcagattccacgcgtatgtctgggctcactcacagcatggccgagtgtctgcagtgctggtcctgacccttccagagcagcagtggacagatgagataagactgtttcagaaacaaagatggccacagccttcctaacaagcaggtcatctggccatgtctgtattgtaactggtaaaaggcttcaagtcagattgatgatcaagaaaagtcaaaaccccagcccaagattgggaaagcaggtggtggttccaagcttttaaaaaattattgaagctctccatcctgttctgtgagtgtgtcttctctttctccttcacgtcatagccgtgacccaccgttcatctctgctcttgcgtaaagatgaccgatggagtccaaagccaagtggcttcaccagctgacaagccaccctcctgcagcctgagtttcacagtccactgggttcgttgtcatgcggtgtttgaatggttaagcccttgcagtatttcagatcgggcaaaaaatatcggatgcacatagcagaaccattggtggtatttatagctttgctttgtactcctcactgtttctgcctacgcaaaatatccatgtttcctctgagaaatctgttgtggactgaaagcgctgctggctgtgaaatttaataaagtgtgtatgctttgctagaaaattatttcttggacaataggaacagtcattgatctgtaaatcctggctcttaacagtgagtggccaaggacttgatcagcccatttcttggtccctcagtgctttaaaatttaagtagcactgcattttgtaatgttgaatatgactctagtgacttgtaggaggcacttgtgaggagatgcttgcttcagtgtaaaagatgctcatggcctgagtcagttgagttttctttcaagaaaccacttcagagtgaaatatccagggtttccccgccctggacatgtccagcctgcccaggcagcacacagccctgtaagtccacctcgtgtgggtgagatttcctcctgcgtgatgacctcatcgccatctctgctgtctcattccacagcctccctccctcttctctcctcctctgccctcgcccttcccccttccccatcccctccccctcctcctctgccctcgcccttacccctcccccttccccttccgctcctcctccctcctccacctctttctcctcctccttccctcctcctccctcctcttcccttctctgccatctttctccccgtgcctattgatcccacataggctcattctgggtacaccggctaaaggctttggtgcattgcagcgttttctcccagcagctgtgtgaaagatgcattttctaagctaaggagaattttctcaagagtggcatactcatgccaaatattattgctctgggccatataggctggtcttcctccacactaaaatgggtgtcttgttttggtacttaaaacagtctactccaggcatccagtccttacagaccaaggaagagcatagcgatgcctgttggaattgcagatgcattctggccttctcccccgtcctgaaacattttctttgaggaaggctcttagaacattagatagtctgctgaggttgttggcccagctccatacacccagtagaacagtggaacaactcatgcttcatgctgccaagctgctgtacttcaaaggaaacagatctagcacactgctgcacccctgcttccacactccacacttcaccccgctgcttttctctgacccgcccctggccttgtaagactcacgtaagctaagtccaggatgcctgtggcctgcggcttgattcttccctttaggattcagcaagttaatggcttcctcgctatagaagtgagactttgacttgatgcctcttggtatatcaaaaagatattcatccagaaagtaccaaatgttctgaaagacccgctcttcactccagttttccctagggtgtttctggcagggcgtttttaaaaggcatctacctgagttgacgctaatacttgtcaccacctggaacgtagttatcggtcggcaggctgaacatactccagattccccagaggccacttctgtagcccagcgatgcatctgagcctctctgcgtggtttatgcttgaaaaatagataatgcttttagatggttcactgccaggccatgggccccacacatctcaggccctgtgtgagggagcacactgagatggtgcaggagtgaatgggcatggcttggcctcgctacctcggggacctgttggagttctggcagcagggtgtctgcaggtgggacggcgttctgggcagagtcagaatggtcagaatgaaacagaacagccaactcacccacaggacagcttattttgaggcaaggttttggattttggaggaagcagccagatgaggcggtgagcctccagaaggtcagcctttggagcacgtaagatactgttacagggtccagaaatcgtgttcacatgggggctttgactcttcaaacagcttttgcagatcgtaaattgcatttgcctagtcgtgtgacctcaaaagaagtcagacatatttaatccagaaatagtttcgtttgagggagggcttgcaggtctgtaaatagcatttgctttcctggttagagattgggatgcagaaggagttttcagtattttttttaaaacactaatgatcattgaagagtatttatgtaaacatacaacgtataatgggtgggggatccgatcatggtgatgtacggggtgaattctcttgccgtgttgcaaatgtgtaaaataaagattatctggcagaac

SEQ ID NO: 429223 - DNA, 7211 bp, Homo sapiens
tattattgcaaccatttcgcttgtatttgagtgtgaagcgcctagaaaaccacaggacccctacggcgagccgggaatttttagatattttcctccgagtcaacgctcagtgaaatcagttcaatcagtggcccgacaccgtgcggctgacacagcttatcccccgaccctgagatcaggggtccccggagcccaaggtcgcttccaaagctcagcgaggcggaggtgcggcccgggctggtctggttcggccaccgttgttatggcaaccgccaataggttggcttcatctctaactgaaagtctgcacaggagcggccgatcgaagggccccgaggtgggcagcacaggctcctcgacgacttcctaggtcgcaatctccaggaaaacgaccacagggtcagcggagctagccgccgagccccgctccccgggcccttccggcggctgcgccctttcaccccggacgtgggcgggagaggaagcggctggtgatgctggaacaaacatggccgctctggcgcccgtcggctcccccgcctcccgcggtcctaggctggccgcgggcctccggctgctcccaatgctgggtttgctgcagttgctggccgagcctggcctgggccgcgtccatcacctggcactcaaggatgatgtgaggcataaagttcatctgaacacctttggcttcttcaaggatgggtacatggtggtgaatgtcagtagcctctcactgaatgagcctgaagacaaggatgtgactattggatttagcctagaccgtacaaagaatgatggcttttcttcttacctggatgaagatgtgaattactgtattttaaagaaacagtctgtctctgtcacccttttaatcctagacatctccagaagtgaggtaagagtaaagtctccaccagaagctggtacccagttaccaaagatcatcttcagcagggatgagaaagtccttggtcagagccaggagcctaatgttaaccctgcttcagcaggcaaccagacccagaagacacaagatggtggaaagtctaaaagaagtacagtggattcaaaggccatgggagagaaatccttttctgttcataataatggtggggcagtgtcatttcagtttttctttaacatcagcactgatgaccaagaaggcctttacagtctttattttcataaatgccttggaaaagaattgccaagtgacaagtttacattcagccttgatattgagatcacagagaagaatcctgacagctacctctcagcaggagaaattcctctccccaaattatacatctcaatggcctttttcttctttctttctgggaccatctggattcatatccttcgaaaacgacggaatgatgtatttaaaatccactggctgatggcggcccttcctttcaccaagtctctttccttggtgttccatgcaattgactaccactacatctcctcccagggcttccctatcgaaggctgggctgttgtgtactacataactcaccttttgaaaggggcgctactcttcatcaccattgcactcattggcactggctgggctttcattaagcacatcctttctgataaagacaaaaagatcttcatgattgtcattccactccaggtcctggcaaatgtagcctacatcatcatagagtccaccgaggagggcacgactgaatatggcttgtggaaggactctctatttctggtcgacctgttgtgttgtggtgccatcctcttcccagtggtgtggtcaatcagacatttacaagaagcatcagcaacagatggaaaagctgctattaacttagcaaagctgaaacttttcagacattattacgtcttgattgtgtgttacatatacttcactaggatcattgcatttctcctcaaactcgctgttccattccagtggaagtggctctaccagctcctggatgaaacggccacactggtcttctttgttctaacggggtataaattccgtccggcttcagataacccctacctacaactttctcaggaagaagaagacttggaaatggagtccgttgtgacaacatctggggtgatggaaagtatgaagaaagtcaagaaggtgaccaacggctccgtggagccccagggcgagtgggaaggcgccgtgtgacagagccgaccctgaggatggcactgtccaaggaaactgttaacttattcatagtcctattggacagcaggagcagctcctacagtgaactattggcaccaccgacagtgacaccagggcacatggctggagcacagtgccgcggaaacctgattttgtactctcttttatggaaacgatctgtggctgtttagaggcagctggatcctctttcaggcgggaatgggagggcgggcacagggaggaggagaggaagagaaaaggaagaattcatttttaatttaggtttctttttttcttcttcatttcggagctctaaggtgtatgcagttgtgaccccatgtgtggggaagtgtagcaaggacggctggtggagggggaaggagggtgcgaggtgtctgtctgatgctttaggaaatgtctactgaggaccctgggacttaagaagaagggcggggagagtgccattgcctgtttgggagacaaaaatgaacgaaaacaggtgactttggaaagcaaagtcaaaacccagtttaggatgtagcacctgccccaggattcctgccctcggctttgccccagacccttattccagatgctgagagtgaccaggacagcagctcctgaggcccagtggtcttctttccaacaggaaaagaaggctgtgatgtcgctgtcaggatcatgccctgtggcacagcacaggtggtgggaggtggttttctgactgagatgttgcctgatggatggaaagaaatgtatttttaagttcaaaaagcattatcctgtggcgttgcctggacatccactccctgacagcccagagcagcactgtctggcttcccttcatgcttgtggctttgttgtgtttgatcagaattttgggggaaatggaaagttttcctcaaggagcagctgggggcagaataggtagtatttaagcaaatacttaagtccaagcaaatcatccccattaaaaagcttttcctgtaggctagtaggatttctaaatagatgaattcaacagacttggtccccatagtccaagagtatgtatgtgaagaaagtgagcatgattcaacagtttcactctcagggattttaggatggcaaaatacttcacagaaactcaatgattaagttcccttccacacttccagagcttgaatgaacacaggtagccacctaaattgagcagtattgcaactcagagagaaaatcatctgaatagtaggacaagctcagaaggtacattgtgactgagggcttaaaaggagaccaaaacatggccccatcagggaagcttcttaatgcttggggggccagctaggtagggttgcttccaaaagctggagcccacccctgcctaggggttgtcagagagccacacctgcaggggaacaggtacctccgagggtgagagtcgtggtctctgggagttgttttctcacctctggcttagaagggtcaggcagaaaccacaggatgtggggtcacactcactgtcccaagtttgggaacctgaaaaagtctccattcagaacatggttgttctccctgtcccatgctatcttatcttcctaaatgactaatgaggaagcgggtgttctttttctgcactttgattcgccatctgggttctgtagggtgctctgaaggtgtgatctgccttctggctgatgtggaggaagagcaagcgccttcccaggccacagctgctcacctctcggcagatattttaggcaagcatccgtgtgtcttcccatcttcaggagaaaggtaaatgcaccctaagtgttcacttctggacctttttcaagttcacttgggactgtgtgacagaagggagttggagggaggatgggaatatttttaacactttgttttcctgtgcagaaacataataccagttttcgcagaaatgtgtctcaatctgtgactaccaaagccctcctcagtccttccctcagagggacacatttgctgtttctcccgcaagcagatgttgtggatgaggcgatagactccttggcaagaacgaaaggtgtgatgaaacctccctgctcggaagggtctccgtggaggtgtcctcatttcacatgctgggttttgcaagcgaggaagccaggcagtggaggaactagagagaggcaggcgtgtgtgtggacaagcgctggagccgcagccctcagactggcacgggaacgccagcgttgggtgttcagattccacgcgtatgtctgggctcactcacagcatggccgagtgtctgcagtgctggtcctgacccttccagagcagcagtggacagatgagataagactgtttcagaaacaaagatggccacagccttcctaacaagcaggtcatctggccatgtctgtattgtaactggtaaaaggcttcaagtcagattgatgatcaagaaaagtcaaaaccccagcccaagattgggaaagcaggtggtggttccaagcttttaaaaaattattgaagctctccatcctgttctgtgagtgtgtcttctctttctccttcacgtcatagccgtgacccaccgttcatctctgctcttgcgtaaagatgaccgatggagtccaaagccaagtggcttcaccagctgacaagccaccctcctgcagcctgagtttcacagtccactgggttcgttgtcatgcggtgtttgaatggttaagcccttgcagtatttcagatcgggcaaaaaatatcggatgcacatagcagaaccattggtggtatttatagctttgctttgtactcctcactgtttctgcctacgcaaaatatccatgtttcctctgagaaatctgttgtggactgaaagcgctgctggctgtgaaatttaataaagtgtgtatgctttgctagaaaattatttcttggacaataggaacagtcattgatctgtaaatcctggctcttaacagtgagtggccaaggacttgatcagcccatttcttggtccctcagtgctttaaaatttaagtagcactgcattttgtaatgttgaatatgactctagtgacttgtaggaggcacttgtgaggagatgcttgcttcagtgtaaaagatgctcatggcctgagtcagttgagttttctttcaagaaaccacttcagagtgaaatatccagggtttccccgccctggacatgtccagcctgcccaggcagcacacagccctgtaagtccacctcgtgtgggtgagatttcctcctgcgtgatgacctcatcgccatctctgctgtctcattccacagcctccctccctcttctctcctcctctgccctcgcccttcccccttccccatcccctccccctcctcctctgccctcgcccttacccctcccccttccccttccgctcctcctccctcctccacctctttctcctcctccttccctcctcctccctcctcttcccttctctgccatctttctccccgtgcctattgatcccacataggctcattctgggtacaccggctaaaggctttggtgcattgcagcgttttctcccagcagctgtgtgaaagatgcattttctaagctaaggagaattttctcaagagtggcatactcatgccaaatattattgctctgggccatataggctggtcttcctccacactaaaatgggtgtcttgttttggtacttaaaacagtctactccaggcatccagtccttacagaccaaggaagagcatagcgatgcctgttggaattgcagatgcattctggccttctcccccgtcctgaaacattttctttgaggaaggctcttagaacattagatagtctgctgaggttgttggcccagctccatacacccagtagaacagtggaacaactcatgcttcatgctgccaagctgctgtacttcaaaggaaacagatctagcacactgctgcacccctgcttccacactccacacttcaccccgctgcttttctctgacccgcccctggccttgtaagactcacgtaagctaagtccaggatgcctgtggcctgcggcttgattcttccctttaggattcagcaagttaatggcttcctcgctatagaagtgagactttgacttgatgcctcttggtatatcaaaaagatattcatccagaaagtaccaaatgttctgaaagacccgctcttcactccagttttccctagggtgtttctggcagggcgtttttaaaaggcatctacctgagttgacgctaatacttgtcaccacctggaacgtagttatcggtcggcaggctgaacatactccagattccccagaggccacttctgtagcccagcgatgcatctgagcctctctgcgtggtttatgcttgaaaaatagataatgcttttagatggttcactgccaggccatgggccccacacatctcaggccctgtgtgagggagcacactgagatggtgcaggagtgaatgggcatggcttggcctcgctacctcggggacctgttggagttctggcagcagggtgtctgcaggtgggacggcgttctgggcagagtcagaatggtcagaatgaaacagaacagccaactcacccacaggacagcttattttgaggcaaggttttggattttggaggaagcagccagatgaggcggtgagcctccagaaggtcagcctttggagcacgtaagatactgttacagggtccagaaatcgtgttcacatgggggctttgactcttcaaacagcttttgcagatcgtaaattgcatttgcctagtcgtgtgacctcaaaagaagtcagacatatttaatccagaaatagtttcgtttgagggagggcttgcaggtctgtaaatagcatttgctttcctggttagagattgggatgcagaaggagttttcagtattttttttaaaacactaatgatcattgaagagtatttatgtaaacatacaacgtataatgggtgggggatccgatcatggtgatgtacggggtgaattctcttgccgtgttgcaaatgtgtaaaataaagattatctggcagaac

SEQ ID NO: 429224 - DNA, 7268 bp, Homo sapiens
tattattgcaaccatttcgcttgtatttgagtgtgaagcgcctagaaaaccacaggacccctacggcgagccgggaatttttagatattttcctccgagtcaacgctcagtgaaatcagttcaatcagtggcccgacaccgtgcggctgacacagcttatcccccgaccctgagatcaggggtccccggagcccaaggtcgcttccaaagctcagcgaggcggaggtgcggcccgggctggtctggttcggccaccgttgttatggcaaccgccaataggttggcttcatctctaactgaaagtctgcacaggagcggccgatcgaagggccccgaggtgggcagcacaggctcctcgacgacttcctaggtcgcaatctccaggaaaacgaccacagggtcagcggagctagccgccgagccccgctccccgggcccttccggcggctgcgccctttcaccccggacgtgggcgggagaggaagcggctggtgatgctggaacaaacatggccgctctggcgcccgtcggctcccccgcctcccgcggtcctaggctggccgcgggcctccggctgctcccaatgctgggtttgctgcagttgctggccgagcctggcctgggccgcgtccatcacctggcactcaaggatgatgtgaggcataaagttcatctgaacacctttggcttcttcaaggatgggtacatggtggtgaatgtcagtagcctctcactgaatgagcctgaagacaaggatgtgactattggatttagcctagaccgtacaaagaatgatggcttttcttcttacctggatgaagatgtgaattactgtattttaaagaaacagtctgtctctgtcacccttttaatcctagacatctccagaagtgaggtaagagtaaagtctccaccagaagctggtacccagttaccaaagatcatcttcagcagggatgagaaagtccttggtcagagccaggagcctaatgttaaccctgcttcagcaggcaaccagacccagaagacacaagatggtggaaagtctaaaagaagtacagtggattcaaaggccatgggagagaaatccttttctgttcataataatggtggggcagtgtcatttcagtttttctttaacatcagcactgatgaccaagaaggcctttacagtctttattttcataaatgccttggaaaagaattgccaagtgacaagtttacattcagccttgatattgagatcacagagaagaatcctgacagctacctctcagcaggagaaattcctctccccaaattatacatctcaatggcctttttcttctttctttctgggaccatctggattcatatccttcgaaaacgacggaatgatgtatttaaaatccactggctgatggcggcccttcctttcaccaagtctctttccttggtgttccatgcaattgactaccactacatctcctcccagggcttccctatcgaaggctgggctgttgtgtactacataactcaccttttgaaaggggcgctactcttcatcaccattgcactcattggcactggctgggctttcattaagcacatcctttctgataaagacaaaaagatcttcatgattgtcattccactccaggtcctggcaaatgtagcctacatcatcatagagtccaccgaggagggcacgactgaatatggcttgtggaaggactctctatttctggtcgacctgttgtgttgtggtgccatcctcttcccagtggtgtggtcaatcagacatttacaagaagcatcagcaacagatggaaaaggtgacagcatgggacctcttcagcagagagcgaatctgagagcaggaagtcgcatagctgctattaacttagcaaagctgaaacttttcagacattattacgtcttgattgtgtgttacatatacttcactaggatcattgcatttctcctcaaactcgctgttccattccagtggaagtggctctaccagctcctggatgaaacggccacactggtcttctttgttctaacggggtataaattccgtccggcttcagataacccctacctacaactttctcaggaagaagaagacttggaaatggagtccgttgtgacaacatctggggtgatggaaagtatgaagaaagtcaagaaggtgaccaacggctccgtggagccccagggcgagtgggaaggcgccgtgtgacagagccgaccctgaggatggcactgtccaaggaaactgttaacttattcatagtcctattggacagcaggagcagctcctacagtgaactattggcaccaccgacagtgacaccagggcacatggctggagcacagtgccgcggaaacctgattttgtactctcttttatggaaacgatctgtggctgtttagaggcagctggatcctctttcaggcgggaatgggagggcgggcacagggaggaggagaggaagagaaaaggaagaattcatttttaatttaggtttctttttttcttcttcatttcggagctctaaggtgtatgcagttgtgaccccatgtgtggggaagtgtagcaaggacggctggtggagggggaaggagggtgcgaggtgtctgtctgatgctttaggaaatgtctactgaggaccctgggacttaagaagaagggcggggagagtgccattgcctgtttgggagacaaaaatgaacgaaaacaggtgactttggaaagcaaagtcaaaacccagtttaggatgtagcacctgccccaggattcctgccctcggctttgccccagacccttattccagatgctgagagtgaccaggacagcagctcctgaggcccagtggtcttctttccaacaggaaaagaaggctgtgatgtcgctgtcaggatcatgccctgtggcacagcacaggtggtgggaggtggttttctgactgagatgttgcctgatggatggaaagaaatgtatttttaagttcaaaaagcattatcctgtggcgttgcctggacatccactccctgacagcccagagcagcactgtctggcttcccttcatgcttgtggctttgttgtgtttgatcagaattttgggggaaatggaaagttttcctcaaggagcagctgggggcagaataggtagtatttaagcaaatacttaagtccaagcaaatcatccccattaaaaagcttttcctgtaggctagtaggatttctaaatagatgaattcaacagacttggtccccatagtccaagagtatgtatgtgaagaaagtgagcatgattcaacagtttcactctcagggattttaggatggcaaaatacttcacagaaactcaatgattaagttcccttccacacttccagagcttgaatgaacacaggtagccacctaaattgagcagtattgcaactcagagagaaaatcatctgaatagtaggacaagctcagaaggtacattgtgactgagggcttaaaaggagaccaaaacatggccccatcagggaagcttcttaatgcttggggggccagctaggtagggttgcttccaaaagctggagcccacccctgcctaggggttgtcagagagccacacctgcaggggaacaggtacctccgagggtgagagtcgtggtctctgggagttgttttctcacctctggcttagaagggtcaggcagaaaccacaggatgtggggtcacactcactgtcccaagtttgggaacctgaaaaagtctccattcagaacatggttgttctccctgtcccatgctatcttatcttcctaaatgactaatgaggaagcgggtgttctttttctgcactttgattcgccatctgggttctgtagggtgctctgaaggtgtgatctgccttctggctgatgtggaggaagagcaagcgccttcccaggccacagctgctcacctctcggcagatattttaggcaagcatccgtgtgtcttcccatcttcaggagaaaggtaaatgcaccctaagtgttcacttctggacctttttcaagttcacttgggactgtgtgacagaagggagttggagggaggatgggaatatttttaacactttgttttcctgtgcagaaacataataccagttttcgcagaaatgtgtctcaatctgtgactaccaaagccctcctcagtccttccctcagagggacacatttgctgtttctcccgcaagcagatgttgtggatgaggcgatagactccttggcaagaacgaaaggtgtgatgaaacctccctgctcggaagggtctccgtggaggtgtcctcatttcacatgctgggttttgcaagcgaggaagccaggcagtggaggaactagagagaggcaggcgtgtgtgtggacaagcgctggagccgcagccctcagactggcacgggaacgccagcgttgggtgttcagattccacgcgtatgtctgggctcactcacagcatggccgagtgtctgcagtgctggtcctgacccttccagagcagcagtggacagatgagataagactgtttcagaaacaaagatggccacagccttcctaacaagcaggtcatctggccatgtctgtattgtaactggtaaaaggcttcaagtcagattgatgatcaagaaaagtcaaaaccccagcccaagattgggaaagcaggtggtggttccaagcttttaaaaaattattgaagctctccatcctgttctgtgagtgtgtcttctctttctccttcacgtcatagccgtgacccaccgttcatctctgctcttgcgtaaagatgaccgatggagtccaaagccaagtggcttcaccagctgacaagccaccctcctgcagcctgagtttcacagtccactgggttcgttgtcatgcggtgtttgaatggttaagcccttgcagtatttcagatcgggcaaaaaatatcggatgcacatagcagaaccattggtggtatttatagctttgctttgtactcctcactgtttctgcctacgcaaaatatccatgtttcctctgagaaatctgttgtggactgaaagcgctgctggctgtgaaatttaataaagtgtgtatgctttgctagaaaattatttcttggacaataggaacagtcattgatctgtaaatcctggctcttaacagtgagtggccaaggacttgatcagcccatttcttggtccctcagtgctttaaaatttaagtagcactgcattttgtaatgttgaatatgactctagtgacttgtaggaggcacttgtgaggagatgcttgcttcagtgtaaaagatgctcatggcctgagtcagttgagttttctttcaagaaaccacttcagagtgaaatatccagggtttccccgccctggacatgtccagcctgcccaggcagcacacagccctgtaagtccacctcgtgtgggtgagatttcctcctgcgtgatgacctcatcgccatctctgctgtctcattccacagcctccctccctcttctctcctcctctgccctcgcccttcccccttccccatcccctccccctcctcctctgccctcgcccttacccctcccccttccccttccgctcctcctccctcctccacctctttctcctcctccttccctcctcctccctcctcttcccttctctgccatctttctccccgtgcctattgatcccacataggctcattctgggtacaccggctaaaggctttggtgcattgcagcgttttctcccagcagctgtgtgaaagatgcattttctaagctaaggagaattttctcaagagtggcatactcatgccaaatattattgctctgggccatataggctggtcttcctccacactaaaatgggtgtcttgttttggtacttaaaacagtctactccaggcatccagtccttacagaccaaggaagagcatagcgatgcctgttggaattgcagatgcattctggccttctcccccgtcctgaaacattttctttgaggaaggctcttagaacattagatagtctgctgaggttgttggcccagctccatacacccagtagaacagtggaacaactcatgcttcatgctgccaagctgctgtacttcaaaggaaacagatctagcacactgctgcacccctgcttccacactccacacttcaccccgctgcttttctctgacccgcccctggccttgtaagactcacgtaagctaagtccaggatgcctgtggcctgcggcttgattcttccctttaggattcagcaagttaatggcttcctcgctatagaagtgagactttgacttgatgcctcttggtatatcaaaaagatattcatccagaaagtaccaaatgttctgaaagacccgctcttcactccagttttccctagggtgtttctggcagggcgtttttaaaaggcatctacctgagttgacgctaatacttgtcaccacctggaacgtagttatcggtcggcaggctgaacatactccagattccccagaggccacttctgtagcccagcgatgcatctgagcctctctgcgtggtttatgcttgaaaaatagataatgcttttagatggttcactgccaggccatgggccccacacatctcaggccctgtgtgagggagcacactgagatggtgcaggagtgaatgggcatggcttggcctcgctacctcggggacctgttggagttctggcagcagggtgtctgcaggtgggacggcgttctgggcagagtcagaatggtcagaatgaaacagaacagccaactcacccacaggacagcttattttgaggcaaggttttggattttggaggaagcagccagatgaggcggtgagcctccagaaggtcagcctttggagcacgtaagatactgttacagggtccagaaatcgtgttcacatgggggctttgactcttcaaacagcttttgcagatcgtaaattgcatttgcctagtcgtgtgacctcaaaagaagtcagacatatttaatccagaaatagtttcgtttgagggagggcttgcaggtctgtaaatagcatttgctttcctggttagagattgggatgcagaaggagttttcagtattttttttaaaacactaatgatcattgaagagtatttatgtaaacatacaacgtataatgggtgggggatccgatcatggtgatgtacggggtgaattctcttgccgtgttgcaaatgtgtaaaataaagattatctggcagaac

SEQ ID NO: 429225 - DNA, 6446 bp, Homo sapiens
tctagtgtgaatgaataagatgatgtacaattggctcttcctttctcaggatgaagatgtgaattactgtattttaaagaaacagtctgtctctgtcacccttttaatcctagacatctccagaagtgaggtaagagtaaagtctccaccagaagctggtacccagttaccaaagatcatcttcagcagggatgagaaagtccttggtcagagccaggagcctaatgttaaccctgcttcagcaggcaaccagacccagaagacacaagatggtggaaagtctaaaagaagtacagtggattcaaaggccatgggagagaaatccttttctgttcataataatggtggggcagtgtcatttcagtttttctttaacatcagcactgatgaccaagaaggcctttacagtctttattttcataaatgccttggaaaagaattgccaagtgacaagtttacattcagccttgatattgagatcacagagaagaatcctgacagctacctctcagcaggagaaattcctctccccaaattatacatctcaatggcctttttcttctttctttctgggaccatctggattcatatccttcgaaaacgacggaatgatgtatttaaaatccactggctgatggcggcccttcctttcaccaagtctctttccttggtgttccatgcaattgactaccactacatctcctcccagggcttccctatcgaaggctgggctgttgtgtactacataactcaccttttgaaaggggcgctactcttcatcaccattgcactcattggcactggctgggctttcattaagcacatcctttctgataaagacaaaaagatcttcatgattgtcattccactccaggtcctggcaaatgtagcctacatcatcatagagtccaccgaggagggcacgactgaatatggcttgtggaaggactctctatttctggtcgacctgttgtgttgtggtgccatcctcttcccagtggtgtggtcaatcagacatttacaagaagcatcagcaacagatggaaaagctgctattaacttagcaaagctgaaacttttcagacattattacgtcttgattgtgtgttacatatacttcactaggatcattgcatttctcctcaaactcgctgttccattccagtggaagtggctctaccagctcctggatgaaacggccacactggtcttctttgttctaacggggtataaattccgtccggcttcagataacccctacctacaactttctcaggaagaagaagacttggaaatggagtccgttgtgacaacatctggggtgatggaaagtatgaagaaagtcaagaaggtgaccaacggctccgtggagccccagggcgagtgggaaggcgccgtgtgacagagccgaccctgaggatggcactgtccaaggaaactgttaacttattcatagtcctattggacagcaggagcagctcctacagtgaactattggcaccaccgacagtgacaccagggcacatggctggagcacagtgccgcggaaacctgattttgtactctcttttatggaaacgatctgtggctgtttagaggcagctggatcctctttcaggcgggaatgggagggcgggcacagggaggaggagaggaagagaaaaggaagaattcatttttaatttaggtttctttttttcttcttcatttcggagctctaaggtgtatgcagttgtgaccccatgtgtggggaagtgtagcaaggacggctggtggagggggaaggagggtgcgaggtgtctgtctgatgctttaggaaatgtctactgaggaccctgggacttaagaagaagggcggggagagtgccattgcctgtttgggagacaaaaatgaacgaaaacaggtgactttggaaagcaaagtcaaaacccagtttaggatgtagcacctgccccaggattcctgccctcggctttgccccagacccttattccagatgctgagagtgaccaggacagcagctcctgaggcccagtggtcttctttccaacaggaaaagaaggctgtgatgtcgctgtcaggatcatgccctgtggcacagcacaggtggtgggaggtggttttctgactgagatgttgcctgatggatggaaagaaatgtatttttaagttcaaaaagcattatcctgtggcgttgcctggacatccactccctgacagcccagagcagcactgtctggcttcccttcatgcttgtggctttgttgtgtttgatcagaattttgggggaaatggaaagttttcctcaaggagcagctgggggcagaataggtagtatttaagcaaatacttaagtccaagcaaatcatccccattaaaaagcttttcctgtaggctagtaggatttctaaatagatgaattcaacagacttggtccccatagtccaagagtatgtatgtgaagaaagtgagcatgattcaacagtttcactctcagggattttaggatggcaaaatacttcacagaaactcaatgattaagttcccttccacacttccagagcttgaatgaacacaggtagccacctaaattgagcagtattgcaactcagagagaaaatcatctgaatagtaggacaagctcagaaggtacattgtgactgagggcttaaaaggagaccaaaacatggccccatcagggaagcttcttaatgcttggggggccagctaggtagggttgcttccaaaagctggagcccacccctgcctaggggttgtcagagagccacacctgcaggggaacaggtacctccgagggtgagagtcgtggtctctgggagttgttttctcacctctggcttagaagggtcaggcagaaaccacaggatgtggggtcacactcactgtcccaagtttgggaacctgaaaaagtctccattcagaacatggttgttctccctgtcccatgctatcttatcttcctaaatgactaatgaggaagcgggtgttctttttctgcactttgattcgccatctgggttctgtagggtgctctgaaggtgtgatctgccttctggctgatgtggaggaagagcaagcgccttcccaggccacagctgctcacctctcggcagatattttaggcaagcatccgtgtgtcttcccatcttcaggagaaaggtaaatgcaccctaagtgttcacttctggacctttttcaagttcacttgggactgtgtgacagaagggagttggagggaggatgggaatatttttaacactttgttttcctgtgcagaaacataataccagttttcgcagaaatgtgtctcaatctgtgactaccaaagccctcctcagtccttccctcagagggacacatttgctgtttctcccgcaagcagatgttgtggatgaggcgatagactccttggcaagaacgaaaggtgtgatgaaacctccctgctcggaagggtctccgtggaggtgtcctcatttcacatgctgggttttgcaagcgaggaagccaggcagtggaggaactagagagaggcaggcgtgtgtgtggacaagcgctggagccgcagccctcagactggcacgggaacgccagcgttgggtgttcagattccacgcgtatgtctgggctcactcacagcatggccgagtgtctgcagtgctggtcctgacccttccagagcagcagtggacagatgagataagactgtttcagaaacaaagatggccacagccttcctaacaagcaggtcatctggccatgtctgtattgtaactggtaaaaggcttcaagtcagattgatgatcaagaaaagtcaaaaccccagcccaagattgggaaagcaggtggtggttccaagcttttaaaaaattattgaagctctccatcctgttctgtgagtgtgtcttctctttctccttcacgtcatagccgtgacccaccgttcatctctgctcttgcgtaaagatgaccgatggagtccaaagccaagtggcttcaccagctgacaagccaccctcctgcagcctgagtttcacagtccactgggttcgttgtcatgcggtgtttgaatggttaagcccttgcagtatttcagatcgggcaaaaaatatcggatgcacatagcagaaccattggtggtatttatagctttgctttgtactcctcactgtttctgcctacgcaaaatatccatgtttcctctgagaaatctgttgtggactgaaagcgctgctggctgtgaaatttaataaagtgtgtatgctttgctagaaaattatttcttggacaataggaacagtcattgatctgtaaatcctggctcttaacagtgagtggccaaggacttgatcagcccatttcttggtccctcagtgctttaaaatttaagtagcactgcattttgtaatgttgaatatgactctagtgacttgtaggaggcacttgtgaggagatgcttgcttcagtgtaaaagatgctcatggcctgagtcagttgagttttctttcaagaaaccacttcagagtgaaatatccagggtttccccgccctggacatgtccagcctgcccaggcagcacacagccctgtaagtccacctcgtgtgggtgagatttcctcctgcgtgatgacctcatcgccatctctgctgtctcattccacagcctccctccctcttctctcctcctctgccctcgcccttcccccttccccatcccctccccctcctcctctgccctcgcccttacccctcccccttccccttccgctcctcctccctcctccacctctttctcctcctccttccctcctcctccctcctcttcccttctctgccatctttctccccgtgcctattgatcccacataggctcattctgggtacaccggctaaaggctttggtgcattgcagcgttttctcccagcagctgtgtgaaagatgcattttctaagctaaggagaattttctcaagagtggcatactcatgccaaatattattgctctgggccatataggctggtcttcctccacactaaaatgggtgtcttgttttggtacttaaaacagtctactccaggcatccagtccttacagaccaaggaagagcatagcgatgcctgttggaattgcagatgcattctggccttctcccccgtcctgaaacattttctttgaggaaggctcttagaacattagatagtctgctgaggttgttggcccagctccatacacccagtagaacagtggaacaactcatgcttcatgctgccaagctgctgtacttcaaaggaaacagatctagcacactgctgcacccctgcttccacactccacacttcaccccgctgcttttctctgacccgcccctggccttgtaagactcacgtaagctaagtccaggatgcctgtggcctgcggcttgattcttccctttaggattcagcaagttaatggcttcctcgctatagaagtgagactttgacttgatgcctcttggtatatcaaaaagatattcatccagaaagtaccaaatgttctgaaagacccgctcttcactccagttttccctagggtgtttctggcagggcgtttttaaaaggcatctacctgagttgacgctaatacttgtcaccacctggaacgtagttatcggtcggcaggctgaacatactccagattccccagaggccacttctgtagcccagcgatgcatctgagcctctctgcgtggtttatgcttgaaaaatagataatgcttttagatggttcactgccaggccatgggccccacacatctcaggccctgtgtgagggagcacactgagatggtgcaggagtgaatgggcatggcttggcctcgctacctcggggacctgttggagttctggcagcagggtgtctgcaggtgggacggcgttctgggcagagtcagaatggtcagaatgaaacagaacagccaactcacccacaggacagcttattttgaggcaaggttttggattttggaggaagcagccagatgaggcggtgagcctccagaaggtcagcctttggagcacgtaagatactgttacagggtccagaaatcgtgttcacatgggggctttgactcttcaaacagcttttgcagatcgtaaattgcatttgcctagtcgtgtgacctcaaaagaagtcagacatatttaatccagaaatagtttcgtttgagggagggcttgcaggtctgtaaatagcatttgctttcctggttagagattgggatgcagaaggagttttcagtattttttttaaaacactaatgatcattgaagagtatttatgtaaacatacaacgtataatgggtgggggatccgatcatggtgatgtacggggtgaattctcttgccgtgttgcaaatgtgtaaaataaagattatctggcagaac

SEQ ID NO: 429226 - DNA, 6615 bp, Homo sapiens
cattttaacgatacttaaggagaaagatgtacctcagaattgtgtggttactaagatcttaggcttaagagagactacctggatcctcgtccaactacttcctagcttggtgcccttgggcaagttatttaacgtttctgagcctcagttttggtatctgtagaatgtggataatagaatctacattgtagaacatcataaggactgcatgagcttggcacagggcctacacgcagcgtgctcagtggccaggagcactgctttgacctttttttccttctgtcttatttgaatgtagggtaagagtaaagtctccaccagaagctggtacccagttaccaaagatcatcttcagcagggatgagaaagtccttggtcagagccaggagcctaatgttaaccctgcttcagcaggcaaccagacccagaagacacaagatggtggaaagtctaaaagaagtacagtggattcaaaggccatgggagagaaatccttttctgttcataataatggtggggcagtgtcatttcagtttttctttaacatcagcactgatgaccaagaaggcctttacagtctttattttcataaatgccttggaaaagaattgccaagtgacaagtttacattcagccttgatattgagatcacagagaagaatcctgacagctacctctcagcaggagaaattcctctccccaaattatacatctcaatggcctttttcttctttctttctgggaccatctggattcatatccttcgaaaacgacggaatgatgtatttaaaatccactggctgatggcggcccttcctttcaccaagtctctttccttggtgttccatgcaattgactaccactacatctcctcccagggcttccctatcgaaggctgggctgttgtgtactacataactcaccttttgaaaggggcgctactcttcatcaccattgcactcattggcactggctgggctttcattaagcacatcctttctgataaagacaaaaagatcttcatgattgtcattccactccaggtcctggcaaatgtagcctacatcatcatagagtccaccgaggagggcacgactgaatatggcttgtggaaggactctctatttctggtcgacctgttgtgttgtggtgccatcctcttcccagtggtgtggtcaatcagacatttacaagaagcatcagcaacagatggaaaagctgctattaacttagcaaagctgaaacttttcagacattattacgtcttgattgtgtgttacatatacttcactaggatcattgcatttctcctcaaactcgctgttccattccagtggaagtggctctaccagctcctggatgaaacggccacactggtcttctttgttctaacggggtataaattccgtccggcttcagataacccctacctacaactttctcaggaagaagaagacttggaaatggagtccgttgtgacaacatctggggtgatggaaagtatgaagaaagtcaagaaggtgaccaacggctccgtggagccccagggcgagtgggaaggcgccgtgtgacagagccgaccctgaggatggcactgtccaaggaaactgttaacttattcatagtcctattggacagcaggagcagctcctacagtgaactattggcaccaccgacagtgacaccagggcacatggctggagcacagtgccgcggaaacctgattttgtactctcttttatggaaacgatctgtggctgtttagaggcagctggatcctctttcaggcgggaatgggagggcgggcacagggaggaggagaggaagagaaaaggaagaattcatttttaatttaggtttctttttttcttcttcatttcggagctctaaggtgtatgcagttgtgaccccatgtgtggggaagtgtagcaaggacggctggtggagggggaaggagggtgcgaggtgtctgtctgatgctttaggaaatgtctactgaggaccctgggacttaagaagaagggcggggagagtgccattgcctgtttgggagacaaaaatgaacgaaaacaggtgactttggaaagcaaagtcaaaacccagtttaggatgtagcacctgccccaggattcctgccctcggctttgccccagacccttattccagatgctgagagtgaccaggacagcagctcctgaggcccagtggtcttctttccaacaggaaaagaaggctgtgatgtcgctgtcaggatcatgccctgtggcacagcacaggtggtgggaggtggttttctgactgagatgttgcctgatggatggaaagaaatgtatttttaagttcaaaaagcattatcctgtggcgttgcctggacatccactccctgacagcccagagcagcactgtctggcttcccttcatgcttgtggctttgttgtgtttgatcagaattttgggggaaatggaaagttttcctcaaggagcagctgggggcagaataggtagtatttaagcaaatacttaagtccaagcaaatcatccccattaaaaagcttttcctgtaggctagtaggatttctaaatagatgaattcaacagacttggtccccatagtccaagagtatgtatgtgaagaaagtgagcatgattcaacagtttcactctcagggattttaggatggcaaaatacttcacagaaactcaatgattaagttcccttccacacttccagagcttgaatgaacacaggtagccacctaaattgagcagtattgcaactcagagagaaaatcatctgaatagtaggacaagctcagaaggtacattgtgactgagggcttaaaaggagaccaaaacatggccccatcagggaagcttcttaatgcttggggggccagctaggtagggttgcttccaaaagctggagcccacccctgcctaggggttgtcagagagccacacctgcaggggaacaggtacctccgagggtgagagtcgtggtctctgggagttgttttctcacctctggcttagaagggtcaggcagaaaccacaggatgtggggtcacactcactgtcccaagtttgggaacctgaaaaagtctccattcagaacatggttgttctccctgtcccatgctatcttatcttcctaaatgactaatgaggaagcgggtgttctttttctgcactttgattcgccatctgggttctgtagggtgctctgaaggtgtgatctgccttctggctgatgtggaggaagagcaagcgccttcccaggccacagctgctcacctctcggcagatattttaggcaagcatccgtgtgtcttcccatcttcaggagaaaggtaaatgcaccctaagtgttcacttctggacctttttcaagttcacttgggactgtgtgacagaagggagttggagggaggatgggaatatttttaacactttgttttcctgtgcagaaacataataccagttttcgcagaaatgtgtctcaatctgtgactaccaaagccctcctcagtccttccctcagagggacacatttgctgtttctcccgcaagcagatgttgtggatgaggcgatagactccttggcaagaacgaaaggtgtgatgaaacctccctgctcggaagggtctccgtggaggtgtcctcatttcacatgctgggttttgcaagcgaggaagccaggcagtggaggaactagagagaggcaggcgtgtgtgtggacaagcgctggagccgcagccctcagactggcacgggaacgccagcgttgggtgttcagattccacgcgtatgtctgggctcactcacagcatggccgagtgtctgcagtgctggtcctgacccttccagagcagcagtggacagatgagataagactgtttcagaaacaaagatggccacagccttcctaacaagcaggtcatctggccatgtctgtattgtaactggtaaaaggcttcaagtcagattgatgatcaagaaaagtcaaaaccccagcccaagattgggaaagcaggtggtggttccaagcttttaaaaaattattgaagctctccatcctgttctgtgagtgtgtcttctctttctccttcacgtcatagccgtgacccaccgttcatctctgctcttgcgtaaagatgaccgatggagtccaaagccaagtggcttcaccagctgacaagccaccctcctgcagcctgagtttcacagtccactgggttcgttgtcatgcggtgtttgaatggttaagcccttgcagtatttcagatcgggcaaaaaatatcggatgcacatagcagaaccattggtggtatttatagctttgctttgtactcctcactgtttctgcctacgcaaaatatccatgtttcctctgagaaatctgttgtggactgaaagcgctgctggctgtgaaatttaataaagtgtgtatgctttgctagaaaattatttcttggacaataggaacagtcattgatctgtaaatcctggctcttaacagtgagtggccaaggacttgatcagcccatttcttggtccctcagtgctttaaaatttaagtagcactgcattttgtaatgttgaatatgactctagtgacttgtaggaggcacttgtgaggagatgcttgcttcagtgtaaaagatgctcatggcctgagtcagttgagttttctttcaagaaaccacttcagagtgaaatatccagggtttccccgccctggacatgtccagcctgcccaggcagcacacagccctgtaagtccacctcgtgtgggtgagatttcctcctgcgtgatgacctcatcgccatctctgctgtctcattccacagcctccctccctcttctctcctcctctgccctcgcccttcccccttccccatcccctccccctcctcctctgccctcgcccttacccctcccccttccccttccgctcctcctccctcctccacctctttctcctcctccttccctcctcctccctcctcttcccttctctgccatctttctccccgtgcctattgatcccacataggctcattctgggtacaccggctaaaggctttggtgcattgcagcgttttctcccagcagctgtgtgaaagatgcattttctaagctaaggagaattttctcaagagtggcatactcatgccaaatattattgctctgggccatataggctggtcttcctccacactaaaatgggtgtcttgttttggtacttaaaacagtctactccaggcatccagtccttacagaccaaggaagagcatagcgatgcctgttggaattgcagatgcattctggccttctcccccgtcctgaaacattttctttgaggaaggctcttagaacattagatagtctgctgaggttgttggcccagctccatacacccagtagaacagtggaacaactcatgcttcatgctgccaagctgctgtacttcaaaggaaacagatctagcacactgctgcacccctgcttccacactccacacttcaccccgctgcttttctctgacccgcccctggccttgtaagactcacgtaagctaagtccaggatgcctgtggcctgcggcttgattcttccctttaggattcagcaagttaatggcttcctcgctatagaagtgagactttgacttgatgcctcttggtatatcaaaaagatattcatccagaaagtaccaaatgttctgaaagacccgctcttcactccagttttccctagggtgtttctggcagggcgtttttaaaaggcatctacctgagttgacgctaatacttgtcaccacctggaacgtagttatcggtcggcaggctgaacatactccagattccccagaggccacttctgtagcccagcgatgcatctgagcctctctgcgtggtttatgcttgaaaaatagataatgcttttagatggttcactgccaggccatgggccccacacatctcaggccctgtgtgagggagcacactgagatggtgcaggagtgaatgggcatggcttggcctcgctacctcggggacctgttggagttctggcagcagggtgtctgcaggtgggacggcgttctgggcagagtcagaatggtcagaatgaaacagaacagccaactcacccacaggacagcttattttgaggcaaggttttggattttggaggaagcagccagatgaggcggtgagcctccagaaggtcagcctttggagcacgtaagatactgttacagggtccagaaatcgtgttcacatgggggctttgactcttcaaacagcttttgcagatcgtaaattgcatttgcctagtcgtgtgacctcaaaagaagtcagacatatttaatccagaaatagtttcgtttgagggagggcttgcaggtctgtaaatagcatttgctttcctggttagagattgggatgcagaaggagttttcagtattttttttaaaacactaatgatcattgaagagtatttatgtaaacatacaacgtataatgggtgggggatccgatcatggtgatgtacggggtgaattctcttgccgtgttgcaaatgtgtaaaataaagattatctggcagaac

SEQ ID NO: 429227 - DNA, 6440 bp, Homo sapiens
taagctagaatatccagaaatgaattctgttgttactattaccggttactagataccatttataatataacaaggtctaatttgctgcttcgacagtacaagaattatgttttgggacctgaggaaatggcagtccccaagattattttgtttaattatttgatattagacaagctgaagcctcataaaatgatactgtaatatatatatgtatctgtaagttgagtcatgcagcactctcttttaaatgttcttgcttctagatggtggaaagtctaaaagaagtacagtggattcaaaggccatgggagagaaatccttttctgttcataataatggtggggcagtgtcatttcagtttttctttaacatcagcactgatgaccaagaaggcctttacagtctttattttcataaatgccttggaaaagaattgccaagtgacaagtttacattcagccttgatattgagatcacagagaagaatcctgacagctacctctcagcaggagaaattcctctccccaaattatacatctcaatggcctttttcttctttctttctgggaccatctggattcatatccttcgaaaacgacggaatgatgtatttaaaatccactggctgatggcggcccttcctttcaccaagtctctttccttggtgttccatgcaattgactaccactacatctcctcccagggcttccctatcgaaggctgggctgttgtgtactacataactcaccttttgaaaggggcgctactcttcatcaccattgcactcattggcactggctgggctttcattaagcacatcctttctgataaagacaaaaagatcttcatgattgtcattccactccaggtcctggcaaatgtagcctacatcatcatagagtccaccgaggagggcacgactgaatatggcttgtggaaggactctctatttctggtcgacctgttgtgttgtggtgccatcctcttcccagtggtgtggtcaatcagacatttacaagaagcatcagcaacagatggaaaagctgctattaacttagcaaagctgaaacttttcagacattattacgtcttgattgtgtgttacatatacttcactaggatcattgcatttctcctcaaactcgctgttccattccagtggaagtggctctaccagctcctggatgaaacggccacactggtcttctttgttctaacggggtataaattccgtccggcttcagataacccctacctacaactttctcaggaagaagaagacttggaaatggagtccgttgtgacaacatctggggtgatggaaagtatgaagaaagtcaagaaggtgaccaacggctccgtggagccccagggcgagtgggaaggcgccgtgtgacagagccgaccctgaggatggcactgtccaaggaaactgttaacttattcatagtcctattggacagcaggagcagctcctacagtgaactattggcaccaccgacagtgacaccagggcacatggctggagcacagtgccgcggaaacctgattttgtactctcttttatggaaacgatctgtggctgtttagaggcagctggatcctctttcaggcgggaatgggagggcgggcacagggaggaggagaggaagagaaaaggaagaattcatttttaatttaggtttctttttttcttcttcatttcggagctctaaggtgtatgcagttgtgaccccatgtgtggggaagtgtagcaaggacggctggtggagggggaaggagggtgcgaggtgtctgtctgatgctttaggaaatgtctactgaggaccctgggacttaagaagaagggcggggagagtgccattgcctgtttgggagacaaaaatgaacgaaaacaggtgactttggaaagcaaagtcaaaacccagtttaggatgtagcacctgccccaggattcctgccctcggctttgccccagacccttattccagatgctgagagtgaccaggacagcagctcctgaggcccagtggtcttctttccaacaggaaaagaaggctgtgatgtcgctgtcaggatcatgccctgtggcacagcacaggtggtgggaggtggttttctgactgagatgttgcctgatggatggaaagaaatgtatttttaagttcaaaaagcattatcctgtggcgttgcctggacatccactccctgacagcccagagcagcactgtctggcttcccttcatgcttgtggctttgttgtgtttgatcagaattttgggggaaatggaaagttttcctcaaggagcagctgggggcagaataggtagtatttaagcaaatacttaagtccaagcaaatcatccccattaaaaagcttttcctgtaggctagtaggatttctaaatagatgaattcaacagacttggtccccatagtccaagagtatgtatgtgaagaaagtgagcatgattcaacagtttcactctcagggattttaggatggcaaaatacttcacagaaactcaatgattaagttcccttccacacttccagagcttgaatgaacacaggtagccacctaaattgagcagtattgcaactcagagagaaaatcatctgaatagtaggacaagctcagaaggtacattgtgactgagggcttaaaaggagaccaaaacatggccccatcagggaagcttcttaatgcttggggggccagctaggtagggttgcttccaaaagctggagcccacccctgcctaggggttgtcagagagccacacctgcaggggaacaggtacctccgagggtgagagtcgtggtctctgggagttgttttctcacctctggcttagaagggtcaggcagaaaccacaggatgtggggtcacactcactgtcccaagtttgggaacctgaaaaagtctccattcagaacatggttgttctccctgtcccatgctatcttatcttcctaaatgactaatgaggaagcgggtgttctttttctgcactttgattcgccatctgggttctgtagggtgctctgaaggtgtgatctgccttctggctgatgtggaggaagagcaagcgccttcccaggccacagctgctcacctctcggcagatattttaggcaagcatccgtgtgtcttcccatcttcaggagaaaggtaaatgcaccctaagtgttcacttctggacctttttcaagttcacttgggactgtgtgacagaagggagttggagggaggatgggaatatttttaacactttgttttcctgtgcagaaacataataccagttttcgcagaaatgtgtctcaatctgtgactaccaaagccctcctcagtccttccctcagagggacacatttgctgtttctcccgcaagcagatgttgtggatgaggcgatagactccttggcaagaacgaaaggtgtgatgaaacctccctgctcggaagggtctccgtggaggtgtcctcatttcacatgctgggttttgcaagcgaggaagccaggcagtggaggaactagagagaggcaggcgtgtgtgtggacaagcgctggagccgcagccctcagactggcacgggaacgccagcgttgggtgttcagattccacgcgtatgtctgggctcactcacagcatggccgagtgtctgcagtgctggtcctgacccttccagagcagcagtggacagatgagataagactgtttcagaaacaaagatggccacagccttcctaacaagcaggtcatctggccatgtctgtattgtaactggtaaaaggcttcaagtcagattgatgatcaagaaaagtcaaaaccccagcccaagattgggaaagcaggtggtggttccaagcttttaaaaaattattgaagctctccatcctgttctgtgagtgtgtcttctctttctccttcacgtcatagccgtgacccaccgttcatctctgctcttgcgtaaagatgaccgatggagtccaaagccaagtggcttcaccagctgacaagccaccctcctgcagcctgagtttcacagtccactgggttcgttgtcatgcggtgtttgaatggttaagcccttgcagtatttcagatcgggcaaaaaatatcggatgcacatagcagaaccattggtggtatttatagctttgctttgtactcctcactgtttctgcctacgcaaaatatccatgtttcctctgagaaatctgttgtggactgaaagcgctgctggctgtgaaatttaataaagtgtgtatgctttgctagaaaattatttcttggacaataggaacagtcattgatctgtaaatcctggctcttaacagtgagtggccaaggacttgatcagcccatttcttggtccctcagtgctttaaaatttaagtagcactgcattttgtaatgttgaatatgactctagtgacttgtaggaggcacttgtgaggagatgcttgcttcagtgtaaaagatgctcatggcctgagtcagttgagttttctttcaagaaaccacttcagagtgaaatatccagggtttccccgccctggacatgtccagcctgcccaggcagcacacagccctgtaagtccacctcgtgtgggtgagatttcctcctgcgtgatgacctcatcgccatctctgctgtctcattccacagcctccctccctcttctctcctcctctgccctcgcccttcccccttccccatcccctccccctcctcctctgccctcgcccttacccctcccccttccccttccgctcctcctccctcctccacctctttctcctcctccttccctcctcctccctcctcttcccttctctgccatctttctccccgtgcctattgatcccacataggctcattctgggtacaccggctaaaggctttggtgcattgcagcgttttctcccagcagctgtgtgaaagatgcattttctaagctaaggagaattttctcaagagtggcatactcatgccaaatattattgctctgggccatataggctggtcttcctccacactaaaatgggtgtcttgttttggtacttaaaacagtctactccaggcatccagtccttacagaccaaggaagagcatagcgatgcctgttggaattgcagatgcattctggccttctcccccgtcctgaaacattttctttgaggaaggctcttagaacattagatagtctgctgaggttgttggcccagctccatacacccagtagaacagtggaacaactcatgcttcatgctgccaagctgctgtacttcaaaggaaacagatctagcacactgctgcacccctgcttccacactccacacttcaccccgctgcttttctctgacccgcccctggccttgtaagactcacgtaagctaagtccaggatgcctgtggcctgcggcttgattcttccctttaggattcagcaagttaatggcttcctcgctatagaagtgagactttgacttgatgcctcttggtatatcaaaaagatattcatccagaaagtaccaaatgttctgaaagacccgctcttcactccagttttccctagggtgtttctggcagggcgtttttaaaaggcatctacctgagttgacgctaatacttgtcaccacctggaacgtagttatcggtcggcaggctgaacatactccagattccccagaggccacttctgtagcccagcgatgcatctgagcctctctgcgtggtttatgcttgaaaaatagataatgcttttagatggttcactgccaggccatgggccccacacatctcaggccctgtgtgagggagcacactgagatggtgcaggagtgaatgggcatggcttggcctcgctacctcggggacctgttggagttctggcagcagggtgtctgcaggtgggacggcgttctgggcagagtcagaatggtcagaatgaaacagaacagccaactcacccacaggacagcttattttgaggcaaggttttggattttggaggaagcagccagatgaggcggtgagcctccagaaggtcagcctttggagcacgtaagatactgttacagggtccagaaatcgtgttcacatgggggctttgactcttcaaacagcttttgcagatcgtaaattgcatttgcctagtcgtgtgacctcaaaagaagtcagacatatttaatccagaaatagtttcgtttgagggagggcttgcaggtctgtaaatagcatttgctttcctggttagagattgggatgcagaaggagttttcagtattttttttaaaacactaatgatcattgaagagtatttatgtaaacatacaacgtataatgggtgggggatccgatcatggtgatgtacggggtgaattctcttgccgtgttgcaaatgtgtaaaataaagattatctggcagaac

SEQ ID NO: 429228 - DNA, 5871 bp, Homo sapiens
  misc_feature (8)..(9): n is a, c, g, or t
  misc_feature (16)..(16): n is a, c, g, or t
cagaggannccggaantcctttcaccaagtctcttgccttgggtccatgcattgactaccactacatctcctcccagggcttccctatcgaaggctgggctgttgtgtactacataactcaccttttgaaaggggcgctactcttcatcaccattgcactcattggcactggctgggctttcattaagcacatcctttctgataaagacaaaaagatcttcatgattgtcattccactccaggtcctggcaaatgtagcctacatcatcatagagtccaccgaggagggcacgactgaatatggcttgtggaaggactctctatttctggtcgacctgttgtgttgtggtgccatcctcttcccagtggtgtggtcaatcagacatttacaagaagcatcagcaacagatggaaaaggtgacagcatgggacctcttcagcagagagcgaatctgagagcaggaagtcgcatagctgctattaacttagcaaagctgaaacttttcagacattattacgtcttgattgtgtgttacatatacttcactaggatcattgcatttctcctcaaactcgctgttccattccagtggaagtggctctaccagctcctggatgaaacggccacactggtcttctttgttctaacggggtataaattccgtccggcttcagataacccctacctacaactttctcaggaagaagaagacttggaaatggagtccgttgtgacaacatctggggtgatggaaagtatgaagaaagtcaagaaggtgaccaacggctccgtggagccccagggcgagtgggaaggcgccgtgtgacagagccgaccctgaggatggcactgtccaaggaaactgttaacttattcatagtcctattggacagcaggagcagctcctacagtgaactattggcaccaccgacagtgacaccagggcacatggctggagcacagtgccgcggaaacctgattttgtactctcttttatggaaacgatctgtggctgtttagaggcagctggatcctctttcaggcgggaatgggagggcgggcacagggaggaggagaggaagagaaaaggaagaattcatttttaatttaggtttctttttttcttcttcatttcggagctctaaggtgtatgcagttgtgaccccatgtgtggggaagtgtagcaaggacggctggtggagggggaaggagggtgcgaggtgtctgtctgatgctttaggaaatgtctactgaggaccctgggacttaagaagaagggcggggagagtgccattgcctgtttgggagacaaaaatgaacgaaaacaggtgactttggaaagcaaagtcaaaacccagtttaggatgtagcacctgccccaggattcctgccctcggctttgccccagacccttattccagatgctgagagtgaccaggacagcagctcctgaggcccagtggtcttctttccaacaggaaaagaaggctgtgatgtcgctgtcaggatcatgccctgtggcacagcacaggtggtgggaggtggttttctgactgagatgttgcctgatggatggaaagaaatgtatttttaagttcaaaaagcattatcctgtggcgttgcctggacatccactccctgacagcccagagcagcactgtctggcttcccttcatgcttgtggctttgttgtgtttgatcagaattttgggggaaatggaaagttttcctcaaggagcagctgggggcagaataggtagtatttaagcaaatacttaagtccaagcaaatcatccccattaaaaagcttttcctgtaggctagtaggatttctaaatagatgaattcaacagacttggtccccatagtccaagagtatgtatgtgaagaaagtgagcatgattcaacagtttcactctcagggattttaggatggcaaaatacttcacagaaactcaatgattaagttcccttccacacttccagagcttgaatgaacacaggtagccacctaaattgagcagtattgcaactcagagagaaaatcatctgaatagtaggacaagctcagaaggtacattgtgactgagggcttaaaaggagaccaaaacatggccccatcagggaagcttcttaatgcttggggggccagctaggtagggttgcttccaaaagctggagcccacccctgcctaggggttgtcagagagccacacctgcaggggaacaggtacctccgagggtgagagtcgtggtctctgggagttgttttctcacctctggcttagaagggtcaggcagaaaccacaggatgtggggtcacactcactgtcccaagtttgggaacctgaaaaagtctccattcagaacatggttgttctccctgtcccatgctatcttatcttcctaaatgactaatgaggaagcgggtgttctttttctgcactttgattcgccatctgggttctgtagggtgctctgaaggtgtgatctgccttctggctgatgtggaggaagagcaagcgccttcccaggccacagctgctcacctctcggcagatattttaggcaagcatccgtgtgtcttcccatcttcaggagaaaggtaaatgcaccctaagtgttcacttctggacctttttcaagttcacttgggactgtgtgacagaagggagttggagggaggatgggaatatttttaacactttgttttcctgtgcagaaacataataccagttttcgcagaaatgtgtctcaatctgtgactaccaaagccctcctcagtccttccctcagagggacacatttgctgtttctcccgcaagcagatgttgtggatgaggcgatagactccttggcaagaacgaaaggtgtgatgaaacctccctgctcggaagggtctccgtggaggtgtcctcatttcacatgctgggttttgcaagcgaggaagccaggcagtggaggaactagagagaggcaggcgtgtgtgtggacaagcgctggagccgcagccctcagactggcacgggaacgccagcgttgggtgttcagattccacgcgtatgtctgggctcactcacagcatggccgagtgtctgcagtgctggtcctgacccttccagagcagcagtggacagatgagataagactgtttcagaaacaaagatggccacagccttcctaacaagcaggtcatctggccatgtctgtattgtaactggtaaaaggcttcaagtcagattgatgatcaagaaaagtcaaaaccccagcccaagattgggaaagcaggtggtggttccaagcttttaaaaaattattgaagctctccatcctgttctgtgagtgtgtcttctctttctccttcacgtcatagccgtgacccaccgttcatctctgctcttgcgtaaagatgaccgatggagtccaaagccaagtggcttcaccagctgacaagccaccctcctgcagcctgagtttcacagtccactgggttcgttgtcatgcggtgtttgaatggttaagcccttgcagtatttcagatcgggcaaaaaatatcggatgcacatagcagaaccattggtggtatttatagctttgctttgtactcctcactgtttctgcctacgcaaaatatccatgtttcctctgagaaatctgttgtggactgaaagcgctgctggctgtgaaatttaataaagtgtgtatgctttgctagaaaattatttcttggacaataggaacagtcattgatctgtaaatcctggctcttaacagtgagtggccaaggacttgatcagcccatttcttggtccctcagtgctttaaaatttaagtagcactgcattttgtaatgttgaatatgactctagtgacttgtaggaggcacttgtgaggagatgcttgcttcagtgtaaaagatgctcatggcctgagtcagttgagttttctttcaagaaaccacttcagagtgaaatatccagggtttccccgccctggacatgtccagcctgcccaggcagcacacagccctgtaagtccacctcgtgtgggtgagatttcctcctgcgtgatgacctcatcgccatctctgctgtctcattccacagcctccctccctcttctctcctcctctgccctcgcccttcccccttccccatcccctccccctcctcctctgccctcgcccttacccctcccccttccccttccgctcctcctccctcctccacctctttctcctcctccttccctcctcctccctcctcttcccttctctgccatctttctccccgtgcctattgatcccacataggctcattctgggtacaccggctaaaggctttggtgcattgcagcgttttctcccagcagctgtgtgaaagatgcattttctaagctaaggagaattttctcaagagtggcatactcatgccaaatattattgctctgggccatataggctggtcttcctccacactaaaatgggtgtcttgttttggtacttaaaacagtctactccaggcatccagtccttacagaccaaggaagagcatagcgatgcctgttggaattgcagatgcattctggccttctcccccgtcctgaaacattttctttgaggaaggctcttagaacattagatagtctgctgaggttgttggcccagctccatacacccagtagaacagtggaacaactcatgcttcatgctgccaagctgctgtacttcaaaggaaacagatctagcacactgctgcacccctgcttccacactccacacttcaccccgctgcttttctctgacccgcccctggccttgtaagactcacgtaagctaagtccaggatgcctgtggcctgcggcttgattcttccctttaggattcagcaagttaatggcttcctcgctatagaagtgagactttgacttgatgcctcttggtatatcaaaaagatattcatccagaaagtaccaaatgttctgaaagacccgctcttcactccagttttccctagggtgtttctggcagggcgtttttaaaaggcatctacctgagttgacgctaatacttgtcaccacctggaacgtagttatcggtcggcaggctgaacatactccagattccccagaggccacttctgtagcccagcgatgcatctgagcctctctgcgtggtttatgcttgaaaaatagataatgcttttagatggttcactgccaggccatgggccccacacatctcaggccctgtgtgagggagcacactgagatggtgcaggagtgaatgggcatggcttggcctcgctacctcggggacctgttggagttctggcagcagggtgtctgcaggtgggacggcgttctgggcagagtcagaatggtcagaatgaaacagaacagccaactcacccacaggacagcttattttgaggcaaggttttggattttggaggaagcagccagatgaggcggtgagcctccagaaggtcagcctttggagcacgtaagatactgttacagggtccagaaatcgtgttcacatgggggctttgactcttcaaacagcttttgcagatcgtaaattgcatttgcctagtcgtgtgacctcaaaagaagtcagacatatttaatccagaaatagtttcgtttgagggagggcttgcaggtctgtaaatagcatttgctttcctggttagagattgggatgcagaaggagttttcagtattttttttaaaacactaatgatcattgaagagtatttatgtaaacatacaacgtataatgggtgggggatccgatcatggtgatgtacggggtgaattctcttgccgtgttgcaaatgtgtaaaataaagattatctggcagaac

SEQ ID NO: 429229 - DNA, 6069 bp, Homo sapiens
acttggggttgattttttttttctttctttgttttattttttctttcccatggattttatgtcatccaccaaataggcacaggtcatcacagaacctctcttgttgcatgcagtgataatgagtggtccttgaccagcaggccagctgagcttagtccccttgcacaggccatgctctagtggccagcacattgagtctttgtcactgcaaggagaaatgaaggcatcctgtcttgctagagaacttggtagtatttgtacttctgtgagtgtggacctcgaatgcttgcagcatctgccagagaagaggacagaagtcagtaatttccctgtgtggctttattttgctattactactggtaaatattcctcaaagcctgagcataagaaataaaatctttggagattgaaatcaagggcttatgtctgtggatagggtgaggaagggttaagaacaacctgactaaagtgtcttgtgctcccggtgggtgtggctgttagcaatatcttggtcacctggagagagagaagaaattcaagtgtaactagcagagtagccatgtctctccgctgcacgtattaattcacactgtaagtgtcacatacttttctttgagtgattctgttttctgtttcctagttcatttgtgaaagcaaattgttaaagtggtgtcctaattttaatgttgatctgatttcctgtttctttcctcctcatgcagattgtgtgttacatatacttcactaggatcattgcatttctcctcaaactcgctgttccattccagtggaagtggctctaccagctcctggatgaaacggccacactggtcttctttgttctaacggggtataaattccgtccggcttcagataacccctacctacaactttctcaggaagaagaagacttggaaatggagtccgttgtgacaacatctggggtgatggaaagtatgaagaaagtcaagaaggtgaccaacggctccgtggagccccagggcgagtgggaaggcgccgtgtgacagagccgaccctgaggatggcactgtccaaggaaactgttaacttattcatagtcctattggacagcaggagcagctcctacagtgaactattggcaccaccgacagtgacaccagggcacatggctggagcacagtgccgcggaaacctgattttgtactctcttttatggaaacgatctgtggctgtttagaggcagctggatcctctttcaggcgggaatgggagggcgggcacagggaggaggagaggaagagaaaaggaagaattcatttttaatttaggtttctttttttcttcttcatttcggagctctaaggtgtatgcagttgtgaccccatgtgtggggaagtgtagcaaggacggctggtggagggggaaggagggtgcgaggtgtctgtctgatgctttaggaaatgtctactgaggaccctgggacttaagaagaagggcggggagagtgccattgcctgtttgggagacaaaaatgaacgaaaacaggtgactttggaaagcaaagtcaaaacccagtttaggatgtagcacctgccccaggattcctgccctcggctttgccccagacccttattccagatgctgagagtgaccaggacagcagctcctgaggcccagtggtcttctttccaacaggaaaagaaggctgtgatgtcgctgtcaggatcatgccctgtggcacagcacaggtggtgggaggtggttttctgactgagatgttgcctgatggatggaaagaaatgtatttttaagttcaaaaagcattatcctgtggcgttgcctggacatccactccctgacagcccagagcagcactgtctggcttcccttcatgcttgtggctttgttgtgtttgatcagaattttgggggaaatggaaagttttcctcaaggagcagctgggggcagaataggtagtatttaagcaaatacttaagtccaagcaaatcatccccattaaaaagcttttcctgtaggctagtaggatttctaaatagatgaattcaacagacttggtccccatagtccaagagtatgtatgtgaagaaagtgagcatgattcaacagtttcactctcagggattttaggatggcaaaatacttcacagaaactcaatgattaagttcccttccacacttccagagcttgaatgaacacaggtagccacctaaattgagcagtattgcaactcagagagaaaatcatctgaatagtaggacaagctcagaaggtacattgtgactgagggcttaaaaggagaccaaaacatggccccatcagggaagcttcttaatgcttggggggccagctaggtagggttgcttccaaaagctggagcccacccctgcctaggggttgtcagagagccacacctgcaggggaacaggtacctccgagggtgagagtcgtggtctctgggagttgttttctcacctctggcttagaagggtcaggcagaaaccacaggatgtggggtcacactcactgtcccaagtttgggaacctgaaaaagtctccattcagaacatggttgttctccctgtcccatgctatcttatcttcctaaatgactaatgaggaagcgggtgttctttttctgcactttgattcgccatctgggttctgtagggtgctctgaaggtgtgatctgccttctggctgatgtggaggaagagcaagcgccttcccaggccacagctgctcacctctcggcagatattttaggcaagcatccgtgtgtcttcccatcttcaggagaaaggtaaatgcaccctaagtgttcacttctggacctttttcaagttcacttgggactgtgtgacagaagggagttggagggaggatgggaatatttttaacactttgttttcctgtgcagaaacataataccagttttcgcagaaatgtgtctcaatctgtgactaccaaagccctcctcagtccttccctcagagggacacatttgctgtttctcccgcaagcagatgttgtggatgaggcgatagactccttggcaagaacgaaaggtgtgatgaaacctccctgctcggaagggtctccgtggaggtgtcctcatttcacatgctgggttttgcaagcgaggaagccaggcagtggaggaactagagagaggcaggcgtgtgtgtggacaagcgctggagccgcagccctcagactggcacgggaacgccagcgttgggtgttcagattccacgcgtatgtctgggctcactcacagcatggccgagtgtctgcagtgctggtcctgacccttccagagcagcagtggacagatgagataagactgtttcagaaacaaagatggccacagccttcctaacaagcaggtcatctggccatgtctgtattgtaactggtaaaaggcttcaagtcagattgatgatcaagaaaagtcaaaaccccagcccaagattgggaaagcaggtggtggttccaagcttttaaaaaattattgaagctctccatcctgttctgtgagtgtgtcttctctttctccttcacgtcatagccgtgacccaccgttcatctctgctcttgcgtaaagatgaccgatggagtccaaagccaagtggcttcaccagctgacaagccaccctcctgcagcctgagtttcacagtccactgggttcgttgtcatgcggtgtttgaatggttaagcccttgcagtatttcagatcgggcaaaaaatatcggatgcacatagcagaaccattggtggtatttatagctttgctttgtactcctcactgtttctgcctacgcaaaatatccatgtttcctctgagaaatctgttgtggactgaaagcgctgctggctgtgaaatttaataaagtgtgtatgctttgctagaaaattatttcttggacaataggaacagtcattgatctgtaaatcctggctcttaacagtgagtggccaaggacttgatcagcccatttcttggtccctcagtgctttaaaatttaagtagcactgcattttgtaatgttgaatatgactctagtgacttgtaggaggcacttgtgaggagatgcttgcttcagtgtaaaagatgctcatggcctgagtcagttgagttttctttcaagaaaccacttcagagtgaaatatccagggtttccccgccctggacatgtccagcctgcccaggcagcacacagccctgtaagtccacctcgtgtgggtgagatttcctcctgcgtgatgacctcatcgccatctctgctgtctcattccacagcctccctccctcttctctcctcctctgccctcgcccttcccccttccccatcccctccccctcctcctctgccctcgcccttacccctcccccttccccttccgctcctcctccctcctccacctctttctcctcctccttccctcctcctccctcctcttcccttctctgccatctttctccccgtgcctattgatcccacataggctcattctgggtacaccggctaaaggctttggtgcattgcagcgttttctcccagcagctgtgtgaaagatgcattttctaagctaaggagaattttctcaagagtggcatactcatgccaaatattattgctctgggccatataggctggtcttcctccacactaaaatgggtgtcttgttttggtacttaaaacagtctactccaggcatccagtccttacagaccaaggaagagcatagcgatgcctgttggaattgcagatgcattctggccttctcccccgtcctgaaacattttctttgaggaaggctcttagaacattagatagtctgctgaggttgttggcccagctccatacacccagtagaacagtggaacaactcatgcttcatgctgccaagctgctgtacttcaaaggaaacagatctagcacactgctgcacccctgcttccacactccacacttcaccccgctgcttttctctgacccgcccctggccttgtaagactcacgtaagctaagtccaggatgcctgtggcctgcggcttgattcttccctttaggattcagcaagttaatggcttcctcgctatagaagtgagactttgacttgatgcctcttggtatatcaaaaagatattcatccagaaagtaccaaatgttctgaaagacccgctcttcactccagttttccctagggtgtttctggcagggcgtttttaaaaggcatctacctgagttgacgctaatacttgtcaccacctggaacgtagttatcggtcggcaggctgaacatactccagattccccagaggccacttctgtagcccagcgatgcatctgagcctctctgcgtggtttatgcttgaaaaatagataatgcttttagatggttcactgccaggccatgggccccacacatctcaggccctgtgtgagggagcacactgagatggtgcaggagtgaatgggcatggcttggcctcgctacctcggggacctgttggagttctggcagcagggtgtctgcaggtgggacggcgttctgggcagagtcagaatggtcagaatgaaacagaacagccaactcacccacaggacagcttattttgaggcaaggttttggattttggaggaagcagccagatgaggcggtgagcctccagaaggtcagcctttggagcacgtaagatactgttacagggtccagaaatcgtgttcacatgggggctttgactcttcaaacagcttttgcagatcgtaaattgcatttgcctagtcgtgtgacctcaaaagaagtcagacatatttaatccagaaatagtttcgtttgagggagggcttgcaggtctgtaaatagcatttgctttcctggttagagattgggatgcagaaggagttttcagtattttttttaaaacactaatgatcattgaagagtatttatgtaaacatacaacgtataatgggtgggggatccgatcatggtgatgtacggggtgaattctcttgccgtgttgcaaatgtgtaaaataaagattatctggcagaac

SEQ ID NO: 429230 - DNA, 5766 bp, Homo sapiens
agagctgaaatgtttaatgctggctctctggggggaaaaaattcctgatttgtagcatctgccaattcctgtgatgtcagtatactcccaccatagccaggttacagctgctgaccctggggcgggaatcgcctgtgcaagccaactccagctcatggggctcactggggctgtgctgctcccacattttttcctggtgattggaggagagaccgcccagcggacttgattccagatagatggatgtgcctctgagtggtcctcatctgcattagaggtggcctcttgactgagaaggtatctgaatgaggcttacttttaaaaatgagaagttaacgagctcttcattttgttctttcttctctctagctgctattaacttagcaaagctgaaacttttcagacattattacgtcttgattgtgtgttacatatacttcactaggatcattgcatttctcctcaaactcgctgttccattccagtggaagtggctctaccagctcctggatgaaacggccacactggtcttctttgttctaacggggtataaattccgtccggcttcagataacccctacctacaactttctcaggaagaagaagacttggaaatggagtccgttgtgacaacatctggggtgatggaaagtatgaagaaagtcaagaaggtgaccaacggctccgtggagccccagggcgagtgggaaggcgccgtgtgacagagccgaccctgaggatggcactgtccaaggaaactgttaacttattcatagtcctattggacagcaggagcagctcctacagtgaactattggcaccaccgacagtgacaccagggcacatggctggagcacagtgccgcggaaacctgattttgtactctcttttatggaaacgatctgtggctgtttagaggcagctggatcctctttcaggcgggaatgggagggcgggcacagggaggaggagaggaagagaaaaggaagaattcatttttaatttaggtttctttttttcttcttcatttcggagctctaaggtgtatgcagttgtgaccccatgtgtggggaagtgtagcaaggacggctggtggagggggaaggagggtgcgaggtgtctgtctgatgctttaggaaatgtctactgaggaccctgggacttaagaagaagggcggggagagtgccattgcctgtttgggagacaaaaatgaacgaaaacaggtgactttggaaagcaaagtcaaaacccagtttaggatgtagcacctgccccaggattcctgccctcggctttgccccagacccttattccagatgctgagagtgaccaggacagcagctcctgaggcccagtggtcttctttccaacaggaaaagaaggctgtgatgtcgctgtcaggatcatgccctgtggcacagcacaggtggtgggaggtggttttctgactgagatgttgcctgatggatggaaagaaatgtatttttaagttcaaaaagcattatcctgtggcgttgcctggacatccactccctgacagcccagagcagcactgtctggcttcccttcatgcttgtggctttgttgtgtttgatcagaattttgggggaaatggaaagttttcctcaaggagcagctgggggcagaataggtagtatttaagcaaatacttaagtccaagcaaatcatccccattaaaaagcttttcctgtaggctagtaggatttctaaatagatgaattcaacagacttggtccccatagtccaagagtatgtatgtgaagaaagtgagcatgattcaacagtttcactctcagggattttaggatggcaaaatacttcacagaaactcaatgattaagttcccttccacacttccagagcttgaatgaacacaggtagccacctaaattgagcagtattgcaactcagagagaaaatcatctgaatagtaggacaagctcagaaggtacattgtgactgagggcttaaaaggagaccaaaacatggccccatcagggaagcttcttaatgcttggggggccagctaggtagggttgcttccaaaagctggagcccacccctgcctaggggttgtcagagagccacacctgcaggggaacaggtacctccgagggtgagagtcgtggtctctgggagttgttttctcacctctggcttagaagggtcaggcagaaaccacaggatgtggggtcacactcactgtcccaagtttgggaacctgaaaaagtctccattcagaacatggttgttctccctgtcccatgctatcttatcttcctaaatgactaatgaggaagcgggtgttctttttctgcactttgattcgccatctgggttctgtagggtgctctgaaggtgtgatctgccttctggctgatgtggaggaagagcaagcgccttcccaggccacagctgctcacctctcggcagatattttaggcaagcatccgtgtgtcttcccatcttcaggagaaaggtaaatgcaccctaagtgttcacttctggacctttttcaagttcacttgggactgtgtgacagaagggagttggagggaggatgggaatatttttaacactttgttttcctgtgcagaaacataataccagttttcgcagaaatgtgtctcaatctgtgactaccaaagccctcctcagtccttccctcagagggacacatttgctgtttctcccgcaagcagatgttgtggatgaggcgatagactccttggcaagaacgaaaggtgtgatgaaacctccctgctcggaagggtctccgtggaggtgtcctcatttcacatgctgggttttgcaagcgaggaagccaggcagtggaggaactagagagaggcaggcgtgtgtgtggacaagcgctggagccgcagccctcagactggcacgggaacgccagcgttgggtgttcagattccacgcgtatgtctgggctcactcacagcatggccgagtgtctgcagtgctggtcctgacccttccagagcagcagtggacagatgagataagactgtttcagaaacaaagatggccacagccttcctaacaagcaggtcatctggccatgtctgtattgtaactggtaaaaggcttcaagtcagattgatgatcaagaaaagtcaaaaccccagcccaagattgggaaagcaggtggtggttccaagcttttaaaaaattattgaagctctccatcctgttctgtgagtgtgtcttctctttctccttcacgtcatagccgtgacccaccgttcatctctgctcttgcgtaaagatgaccgatggagtccaaagccaagtggcttcaccagctgacaagccaccctcctgcagcctgagtttcacagtccactgggttcgttgtcatgcggtgtttgaatggttaagcccttgcagtatttcagatcgggcaaaaaatatcggatgcacatagcagaaccattggtggtatttatagctttgctttgtactcctcactgtttctgcctacgcaaaatatccatgtttcctctgagaaatctgttgtggactgaaagcgctgctggctgtgaaatttaataaagtgtgtatgctttgctagaaaattatttcttggacaataggaacagtcattgatctgtaaatcctggctcttaacagtgagtggccaaggacttgatcagcccatttcttggtccctcagtgctttaaaatttaagtagcactgcattttgtaatgttgaatatgactctagtgacttgtaggaggcacttgtgaggagatgcttgcttcagtgtaaaagatgctcatggcctgagtcagttgagttttctttcaagaaaccacttcagagtgaaatatccagggtttccccgccctggacatgtccagcctgcccaggcagcacacagccctgtaagtccacctcgtgtgggtgagatttcctcctgcgtgatgacctcatcgccatctctgctgtctcattccacagcctccctccctcttctctcctcctctgccctcgcccttcccccttccccatcccctccccctcctcctctgccctcgcccttacccctcccccttccccttccgctcctcctccctcctccacctctttctcctcctccttccctcctcctccctcctcttcccttctctgccatctttctccccgtgcctattgatcccacataggctcattctgggtacaccggctaaaggctttggtgcattgcagcgttttctcccagcagctgtgtgaaagatgcattttctaagctaaggagaattttctcaagagtggcatactcatgccaaatattattgctctgggccatataggctggtcttcctccacactaaaatgggtgtcttgttttggtacttaaaacagtctactccaggcatccagtccttacagaccaaggaagagcatagcgatgcctgttggaattgcagatgcattctggccttctcccccgtcctgaaacattttctttgaggaaggctcttagaacattagatagtctgctgaggttgttggcccagctccatacacccagtagaacagtggaacaactcatgcttcatgctgccaagctgctgtacttcaaaggaaacagatctagcacactgctgcacccctgcttccacactccacacttcaccccgctgcttttctctgacccgcccctggccttgtaagactcacgtaagctaagtccaggatgcctgtggcctgcggcttgattcttccctttaggattcagcaagttaatggcttcctcgctatagaagtgagactttgacttgatgcctcttggtatatcaaaaagatattcatccagaaagtaccaaatgttctgaaagacccgctcttcactccagttttccctagggtgtttctggcagggcgtttttaaaaggcatctacctgagttgacgctaatacttgtcaccacctggaacgtagttatcggtcggcaggctgaacatactccagattccccagaggccacttctgtagcccagcgatgcatctgagcctctctgcgtggtttatgcttgaaaaatagataatgcttttagatggttcactgccaggccatgggccccacacatctcaggccctgtgtgagggagcacactgagatggtgcaggagtgaatgggcatggcttggcctcgctacctcggggacctgttggagttctggcagcagggtgtctgcaggtgggacggcgttctgggcagagtcagaatggtcagaatgaaacagaacagccaactcacccacaggacagcttattttgaggcaaggttttggattttggaggaagcagccagatgaggcggtgagcctccagaaggtcagcctttggagcacgtaagatactgttacagggtccagaaatcgtgttcacatgggggctttgactcttcaaacagcttttgcagatcgtaaattgcatttgcctagtcgtgtgacctcaaaagaagtcagacatatttaatccagaaatagtttcgtttgagggagggcttgcaggtctgtaaatagcatttgctttcctggttagagattgggatgcagaaggagttttcagtattttttttaaaacactaatgatcattgaagagtatttatgtaaacatacaacgtataatgggtgggggatccgatcatggtgatgtacggggtgaattctcttgccgtgttgcaaatgtgtaaaataaagattatctggcagaac

SEQ ID NO: 429231 - DNA, 5451 bp, Homo sapiens
  misc_feature (19)..(19): n is a, c, g, or t
  misc_feature (21)..(21): n is a, c, g, or t
  misc_feature (55)..(55): n is a, c, g, or t
  misc_feature (88)..(88): n is a, c, g, or t
  misc_feature (94)..(94): n is a, c, g, or t
gggaaaagtttcggcaatnangccttggcttaatttaaacctttaggccaaaagncttggaaaacttttttcaagaacaatttatttnaccgtncttggatttgattgtgtgttacatatacttcactaggatcattgcatttctcctcaaactcgctgttccattccagtggaagtggctctaccagctcctggatgaaacggccacactggtcttctttgttctaacggggtataaattccgtccggcttcagataacccctacctacaactttctcaggaagaagaagacttggaaatggagtccgttgtgacaacatctggggtgatggaaagtatgaagaaagtcaagaaggtgaccaacggctccgtggagccccagggcgagtgggaaggcgccgtgtgacagagccgaccctgaggatggcactgtccaaggaaactgttaacttattcatagtcctattggacagcaggagcagctcctacagtgaactattggcaccaccgacagtgacaccagggcacatggctggagcacagtgccgcggaaacctgattttgtactctcttttatggaaacgatctgtggctgtttagaggcagctggatcctctttcaggcgggaatgggagggcgggcacagggaggaggagaggaagagaaaaggaagaattcatttttaatttaggtttctttttttcttcttcatttcggagctctaaggtgtatgcagttgtgaccccatgtgtggggaagtgtagcaaggacggctggtggagggggaaggagggtgcgaggtgtctgtctgatgctttaggaaatgtctactgaggaccctgggacttaagaagaagggcggggagagtgccattgcctgtttgggagacaaaaatgaacgaaaacaggtgactttggaaagcaaagtcaaaacccagtttaggatgtagcacctgccccaggattcctgccctcggctttgccccagacccttattccagatgctgagagtgaccaggacagcagctcctgaggcccagtggtcttctttccaacaggaaaagaaggctgtgatgtcgctgtcaggatcatgccctgtggcacagcacaggtggtgggaggtggttttctgactgagatgttgcctgatggatggaaagaaatgtatttttaagttcaaaaagcattatcctgtggcgttgcctggacatccactccctgacagcccagagcagcactgtctggcttcccttcatgcttgtggctttgttgtgtttgatcagaattttgggggaaatggaaagttttcctcaaggagcagctgggggcagaataggtagtatttaagcaaatacttaagtccaagcaaatcatccccattaaaaagcttttcctgtaggctagtaggatttctaaatagatgaattcaacagacttggtccccatagtccaagagtatgtatgtgaagaaagtgagcatgattcaacagtttcactctcagggattttaggatggcaaaatacttcacagaaactcaatgattaagttcccttccacacttccagagcttgaatgaacacaggtagccacctaaattgagcagtattgcaactcagagagaaaatcatctgaatagtaggacaagctcagaaggtacattgtgactgagggcttaaaaggagaccaaaacatggccccatcagggaagcttcttaatgcttggggggccagctaggtagggttgcttccaaaagctggagcccacccctgcctaggggttgtcagagagccacacctgcaggggaacaggtacctccgagggtgagagtcgtggtctctgggagttgttttctcacctctggcttagaagggtcaggcagaaaccacaggatgtggggtcacactcactgtcccaagtttgggaacctgaaaaagtctccattcagaacatggttgttctccctgtcccatgctatcttatcttcctaaatgactaatgaggaagcgggtgttctttttctgcactttgattcgccatctgggttctgtagggtgctctgaaggtgtgatctgccttctggctgatgtggaggaagagcaagcgccttcccaggccacagctgctcacctctcggcagatattttaggcaagcatccgtgtgtcttcccatcttcaggagaaaggtaaatgcaccctaagtgttcacttctggacctttttcaagttcacttgggactgtgtgacagaagggagttggagggaggatgggaatatttttaacactttgttttcctgtgcagaaacataataccagttttcgcagaaatgtgtctcaatctgtgactaccaaagccctcctcagtccttccctcagagggacacatttgctgtttctcccgcaagcagatgttgtggatgaggcgatagactccttggcaagaacgaaaggtgtgatgaaacctccctgctcggaagggtctccgtggaggtgtcctcatttcacatgctgggttttgcaagcgaggaagccaggcagtggaggaactagagagaggcaggcgtgtgtgtggacaagcgctggagccgcagccctcagactggcacgggaacgccagcgttgggtgttcagattccacgcgtatgtctgggctcactcacagcatggccgagtgtctgcagtgctggtcctgacccttccagagcagcagtggacagatgagataagactgtttcagaaacaaagatggccacagccttcctaacaagcaggtcatctggccatgtctgtattgtaactggtaaaaggcttcaagtcagattgatgatcaagaaaagtcaaaaccccagcccaagattgggaaagcaggtggtggttccaagcttttaaaaaattattgaagctctccatcctgttctgtgagtgtgtcttctctttctccttcacgtcatagccgtgacccaccgttcatctctgctcttgcgtaaagatgaccgatggagtccaaagccaagtggcttcaccagctgacaagccaccctcctgcagcctgagtttcacagtccactgggttcgttgtcatgcggtgtttgaatggttaagcccttgcagtatttcagatcgggcaaaaaatatcggatgcacatagcagaaccattggtggtatttatagctttgctttgtactcctcactgtttctgcctacgcaaaatatccatgtttcctctgagaaatctgttgtggactgaaagcgctgctggctgtgaaatttaataaagtgtgtatgctttgctagaaaattatttcttggacaataggaacagtcattgatctgtaaatcctggctcttaacagtgagtggccaaggacttgatcagcccatttcttggtccctcagtgctttaaaatttaagtagcactgcattttgtaatgttgaatatgactctagtgacttgtaggaggcacttgtgaggagatgcttgcttcagtgtaaaagatgctcatggcctgagtcagttgagttttctttcaagaaaccacttcagagtgaaatatccagggtttccccgccctggacatgtccagcctgcccaggcagcacacagccctgtaagtccacctcgtgtgggtgagatttcctcctgcgtgatgacctcatcgccatctctgctgtctcattccacagcctccctccctcttctctcctcctctgccctcgcccttcccccttccccatcccctccccctcctcctctgccctcgcccttacccctcccccttccccttccgctcctcctccctcctccacctctttctcctcctccttccctcctcctccctcctcttcccttctctgccatctttctccccgtgcctattgatcccacataggctcattctgggtacaccggctaaaggctttggtgcattgcagcgttttctcccagcagctgtgtgaaagatgcattttctaagctaaggagaattttctcaagagtggcatactcatgccaaatattattgctctgggccatataggctggtcttcctccacactaaaatgggtgtcttgttttggtacttaaaacagtctactccaggcatccagtccttacagaccaaggaagagcatagcgatgcctgttggaattgcagatgcattctggccttctcccccgtcctgaaacattttctttgaggaaggctcttagaacattagatagtctgctgaggttgttggcccagctccatacacccagtagaacagtggaacaactcatgcttcatgctgccaagctgctgtacttcaaaggaaacagatctagcacactgctgcacccctgcttccacactccacacttcaccccgctgcttttctctgacccgcccctggccttgtaagactcacgtaagctaagtccaggatgcctgtggcctgcggcttgattcttccctttaggattcagcaagttaatggcttcctcgctatagaagtgagactttgacttgatgcctcttggtatatcaaaaagatattcatccagaaagtaccaaatgttctgaaagacccgctcttcactccagttttccctagggtgtttctggcagggcgtttttaaaaggcatctacctgagttgacgctaatacttgtcaccacctggaacgtagttatcggtcggcaggctgaacatactccagattccccagaggccacttctgtagcccagcgatgcatctgagcctctctgcgtggtttatgcttgaaaaatagataatgcttttagatggttcactgccaggccatgggccccacacatctcaggccctgtgtgagggagcacactgagatggtgcaggagtgaatgggcatggcttggcctcgctacctcggggacctgttggagttctggcagcagggtgtctgcaggtgggacggcgttctgggcagagtcagaatggtcagaatgaaacagaacagccaactcacccacaggacagcttattttgaggcaaggttttggattttggaggaagcagccagatgaggcggtgagcctccagaaggtcagcctttggagcacgtaagatactgttacagggtccagaaatcgtgttcacatgggggctttgactcttcaaacagcttttgcagatcgtaaattgcatttgcctagtcgtgtgacctcaaaagaagtcagacatatttaatccagaaatagtttcgtttgagggagggcttgcaggtctgtaaatagcatttgctttcctggttagagattgggatgcagaaggagttttcagtattttttttaaaacactaatgatcattgaagagtatttatgtaaacatacaacgtataatgggtgggggatccgatcatggtgatgtacggggtgaattctcttgccgtgttgcaaatgtgtaaaataaagattatctggcagaac

SEQ ID NO: 429232 - DNA, 5197 bp, Homo sapiens
tgacgtttcatccaggcagctggtagagccacttccactggaagtggaacagcgagtgtgacaacatctggggtgatggaaagtatgaagaaagtcaagaaggtgaccaacggctccgtggagccccagggcgagtgggaaggcgccgtgtgacagagccgaccctgaggatggcactgtccaaggaaactgttaacttattcatagtcctattggacagcaggagcagctcctacagtgaactattggcaccaccgacagtgacaccagggcacatggctggagcacagtgccgcggaaacctgattttgtactctcttttatggaaacgatctgtggctgtttagaggcagctggatcctctttcaggcgggaatgggagggcgggcacagggaggaggagaggaagagaaaaggaagaattcatttttaatttaggtttctttttttcttcttcatttcggagctctaaggtgtatgcagttgtgaccccatgtgtggggaagtgtagcaaggacggctggtggagggggaaggagggtgcgaggtgtctgtctgatgctttaggaaatgtctactgaggaccctgggacttaagaagaagggcggggagagtgccattgcctgtttgggagacaaaaatgaacgaaaacaggtgactttggaaagcaaagtcaaaacccagtttaggatgtagcacctgccccaggattcctgccctcggctttgccccagacccttattccagatgctgagagtgaccaggacagcagctcctgaggcccagtggtcttctttccaacaggaaaagaaggctgtgatgtcgctgtcaggatcatgccctgtggcacagcacaggtggtgggaggtggttttctgactgagatgttgcctgatggatggaaagaaatgtatttttaagttcaaaaagcattatcctgtggcgttgcctggacatccactccctgacagcccagagcagcactgtctggcttcccttcatgcttgtggctttgttgtgtttgatcagaattttgggggaaatggaaagttttcctcaaggagcagctgggggcagaataggtagtatttaagcaaatacttaagtccaagcaaatcatccccattaaaaagcttttcctgtaggctagtaggatttctaaatagatgaattcaacagacttggtccccatagtccaagagtatgtatgtgaagaaagtgagcatgattcaacagtttcactctcagggattttaggatggcaaaatacttcacagaaactcaatgattaagttcccttccacacttccagagcttgaatgaacacaggtagccacctaaattgagcagtattgcaactcagagagaaaatcatctgaatagtaggacaagctcagaaggtacattgtgactgagggcttaaaaggagaccaaaacatggccccatcagggaagcttcttaatgcttggggggccagctaggtagggttgcttccaaaagctggagcccacccctgcctaggggttgtcagagagccacacctgcaggggaacaggtacctccgagggtgagagtcgtggtctctgggagttgttttctcacctctggcttagaagggtcaggcagaaaccacaggatgtggggtcacactcactgtcccaagtttgggaacctgaaaaagtctccattcagaacatggttgttctccctgtcccatgctatcttatcttcctaaatgactaatgaggaagcgggtgttctttttctgcactttgattcgccatctgggttctgtagggtgctctgaaggtgtgatctgccttctggctgatgtggaggaagagcaagcgccttcccaggccacagctgctcacctctcggcagatattttaggcaagcatccgtgtgtcttcccatcttcaggagaaaggtaaatgcaccctaagtgttcacttctggacctttttcaagttcacttgggactgtgtgacagaagggagttggagggaggatgggaatatttttaacactttgttttcctgtgcagaaacataataccagttttcgcagaaatgtgtctcaatctgtgactaccaaagccctcctcagtccttccctcagagggacacatttgctgtttctcccgcaagcagatgttgtggatgaggcgatagactccttggcaagaacgaaaggtgtgatgaaacctccctgctcggaagggtctccgtggaggtgtcctcatttcacatgctgggttttgcaagcgaggaagccaggcagtggaggaactagagagaggcaggcgtgtgtgtggacaagcgctggagccgcagccctcagactggcacgggaacgccagcgttgggtgttcagattccacgcgtatgtctgggctcactcacagcatggccgagtgtctgcagtgctggtcctgacccttccagagcagcagtggacagatgagataagactgtttcagaaacaaagatggccacagccttcctaacaagcaggtcatctggccatgtctgtattgtaactggtaaaaggcttcaagtcagattgatgatcaagaaaagtcaaaaccccagcccaagattgggaaagcaggtggtggttccaagcttttaaaaaattattgaagctctccatcctgttctgtgagtgtgtcttctctttctccttcacgtcatagccgtgacccaccgttcatctctgctcttgcgtaaagatgaccgatggagtccaaagccaagtggcttcaccagctgacaagccaccctcctgcagcctgagtttcacagtccactgggttcgttgtcatgcggtgtttgaatggttaagcccttgcagtatttcagatcgggcaaaaaatatcggatgcacatagcagaaccattggtggtatttatagctttgctttgtactcctcactgtttctgcctacgcaaaatatccatgtttcctctgagaaatctgttgtggactgaaagcgctgctggctgtgaaatttaataaagtgtgtatgctttgctagaaaattatttcttggacaataggaacagtcattgatctgtaaatcctggctcttaacagtgagtggccaaggacttgatcagcccatttcttggtccctcagtgctttaaaatttaagtagcactgcattttgtaatgttgaatatgactctagtgacttgtaggaggcacttgtgaggagatgcttgcttcagtgtaaaagatgctcatggcctgagtcagttgagttttctttcaagaaaccacttcagagtgaaatatccagggtttccccgccctggacatgtccagcctgcccaggcagcacacagccctgtaagtccacctcgtgtgggtgagatttcctcctgcgtgatgacctcatcgccatctctgctgtctcattccacagcctccctccctcttctctcctcctctgccctcgcccttcccccttccccatcccctccccctcctcctctgccctcgcccttacccctcccccttccccttccgctcctcctccctcctccacctctttctcctcctccttccctcctcctccctcctcttcccttctctgccatctttctccccgtgcctattgatcccacataggctcattctgggtacaccggctaaaggctttggtgcattgcagcgttttctcccagcagctgtgtgaaagatgcattttctaagctaaggagaattttctcaagagtggcatactcatgccaaatattattgctctgggccatataggctggtcttcctccacactaaaatgggtgtcttgttttggtacttaaaacagtctactccaggcatccagtccttacagaccaaggaagagcatagcgatgcctgttggaattgcagatgcattctggccttctcccccgtcctgaaacattttctttgaggaaggctcttagaacattagatagtctgctgaggttgttggcccagctccatacacccagtagaacagtggaacaactcatgcttcatgctgccaagctgctgtacttcaaaggaaacagatctagcacactgctgcacccctgcttccacactccacacttcaccccgctgcttttctctgacccgcccctggccttgtaagactcacgtaagctaagtccaggatgcctgtggcctgcggcttgattcttccctttaggattcagcaagttaatggcttcctcgctatagaagtgagactttgacttgatgcctcttggtatatcaaaaagatattcatccagaaagtaccaaatgttctgaaagacccgctcttcactccagttttccctagggtgtttctggcagggcgtttttaaaaggcatctacctgagttgacgctaatacttgtcaccacctggaacgtagttatcggtcggcaggctgaacatactccagattccccagaggccacttctgtagcccagcgatgcatctgagcctctctgcgtggtttatgcttgaaaaatagataatgcttttagatggttcactgccaggccatgggccccacacatctcaggccctgtgtgagggagcacactgagatggtgcaggagtgaatgggcatggcttggcctcgctacctcggggacctgttggagttctggcagcagggtgtctgcaggtgggacggcgttctgggcagagtcagaatggtcagaatgaaacagaacagccaactcacccacaggacagcttattttgaggcaaggttttggattttggaggaagcagccagatgaggcggtgagcctccagaaggtcagcctttggagcacgtaagatactgttacagggtccagaaatcgtgttcacatgggggctttgactcttcaaacagcttttgcagatcgtaaattgcatttgcctagtcgtgtgacctcaaaagaagtcagacatatttaatccagaaatagtttcgtttgagggagggcttgcaggtctgtaaatagcatttgctttcctggttagagattgggatgcagaaggagttttcagtattttttttaaaacactaatgatcattgaagagtatttatgtaaacatacaacgtataatgggtgggggatccgatcatggtgatgtacggggtgaattctcttgccgtgttgcaaatgtgtaaaataaagattatctggcagaac

SEQ ID NO: 429233 - DNA, 4080 bp, Homo sapiens
acccacgcgtccgacccacgcgtccgcggacgcgtgggtcgacccacgcgtccgattcaacagacttggtccccatagtccaagagtatgtatgtgaagaaagtgagcatgattcaacagtttcactctcagggattttaggatggcaaaatacttcacagaaactcaatgattaagttcccttccacacttccagagcttgaatgaacacaggtagccacctaaattgagcagtattgcaactcagagagaaaatcatctgaatagtaggacaagctcagaaggtacattgtgactgagggcttaaaaggagaccaaaacatggccccatcagggaagcttcttaatgcttggggggccagctaggtagggttgcttccaaaagctggagcccacccctgcctaggggttgtcagagagccacacctgcaggggaacaggtacctccgagggtgagagtcgtggtctctgggagttgttttctcacctctggcttagaagggtcaggcagaaaccacaggatgtggggtcacactcactgtcccaagtttgggaacctgaaaaagtctccattcagaacatggttgttctccctgtcccatgctatcttatcttcctaaatgactaatgaggaagcgggtgttctttttctgcactttgattcgccatctgggttctgtagggtgctctgaaggtgtgatctgccttctggctgatgtggaggaagagcaagcgccttcccaggccacagctgctcacctctcggcagatattttaggcaagcatccgtgtgtcttcccatcttcaggagaaaggtaaatgcaccctaagtgttcacttctggacctttttcaagttcacttgggactgtgtgacagaagggagttggagggaggatgggaatatttttaacactttgttttcctgtgcagaaacataataccagttttcgcagaaatgtgtctcaatctgtgactaccaaagccctcctcagtccttccctcagagggacacatttgctgtttctcccgcaagcagatgttgtggatgaggcgatagactccttggcaagaacgaaaggtgtgatgaaacctccctgctcggaagggtctccgtggaggtgtcctcatttcacatgctgggttttgcaagcgaggaagccaggcagtggaggaactagagagaggcaggcgtgtgtgtggacaagcgctggagccgcagccctcagactggcacgggaacgccagcgttgggtgttcagattccacgcgtatgtctgggctcactcacagcatggccgagtgtctgcagtgctggtcctgacccttccagagcagcagtggacagatgagataagactgtttcagaaacaaagatggccacagccttcctaacaagcaggtcatctggccatgtctgtattgtaactggtaaaaggcttcaagtcagattgatgatcaagaaaagtcaaaaccccagcccaagattgggaaagcaggtggtggttccaagcttttaaaaaattattgaagctctccatcctgttctgtgagtgtgtcttctctttctccttcacgtcatagccgtgacccaccgttcatctctgctcttgcgtaaagatgaccgatggagtccaaagccaagtggcttcaccagctgacaagccaccctcctgcagcctgagtttcacagtccactgggttcgttgtcatgcggtgtttgaatggttaagcccttgcagtatttcagatcgggcaaaaaatatcggatgcacatagcagaaccattggtggtatttatagctttgctttgtactcctcactgtttctgcctacgcaaaatatccatgtttcctctgagaaatctgttgtggactgaaagcgctgctggctgtgaaatttaataaagtgtgtatgctttgctagaaaattatttcttggacaataggaacagtcattgatctgtaaatcctggctcttaacagtgagtggccaaggacttgatcagcccatttcttggtccctcagtgctttaaaatttaagtagcactgcattttgtaatgttgaatatgactctagtgacttgtaggaggcacttgtgaggagatgcttgcttcagtgtaaaagatgctcatggcctgagtcagttgagttttctttcaagaaaccacttcagagtgaaatatccagggtttccccgccctggacatgtccagcctgcccaggcagcacacagccctgtaagtccacctcgtgtgggtgagatttcctcctgcgtgatgacctcatcgccatctctgctgtctcattccacagcctccctccctcttctctcctcctctgccctcgcccttcccccttccccatcccctccccctcctcctctgccctcgcccttacccctcccccttccccttccgctcctcctccctcctccacctctttctcctcctccttccctcctcctccctcctcttcccttctctgccatctttctccccgtgcctattgatcccacataggctcattctgggtacaccggctaaaggctttggtgcattgcagcgttttctcccagcagctgtgtgaaagatgcattttctaagctaaggagaattttctcaagagtggcatactcatgccaaatattattgctctgggccatataggctggtcttcctccacactaaaatgggtgtcttgttttggtacttaaaacagtctactccaggcatccagtccttacagaccaaggaagagcatagcgatgcctgttggaattgcagatgcattctggccttctcccccgtcctgaaacattttctttgaggaaggctcttagaacattagatagtctgctgaggttgttggcccagctccatacacccagtagaacagtggaacaactcatgcttcatgctgccaagctgctgtacttcaaaggaaacagatctagcacactgctgcacccctgcttccacactccacacttcaccccgctgcttttctctgacccgcccctggccttgtaagactcacgtaagctaagtccaggatgcctgtggcctgcggcttgattcttccctttaggattcagcaagttaatggcttcctcgctatagaagtgagactttgacttgatgcctcttggtatatcaaaaagatattcatccagaaagtaccaaatgttctgaaagacccgctcttcactccagttttccctagggtgtttctggcagggcgtttttaaaaggcatctacctgagttgacgctaatacttgtcaccacctggaacgtagttatcggtcggcaggctgaacatactccagattccccagaggccacttctgtagcccagcgatgcatctgagcctctctgcgtggtttatgcttgaaaaatagataatgcttttagatggttcactgccaggccatgggccccacacatctcaggccctgtgtgagggagcacactgagatggtgcaggagtgaatgggcatggcttggcctcgctacctcggggacctgttggagttctggcagcagggtgtctgcaggtgggacggcgttctgggcagagtcagaatggtcagaatgaaacagaacagccaactcacccacaggacagcttattttgaggcaaggttttggattttggaggaagcagccagatgaggcggtgagcctccagaaggtcagcctttggagcacgtaagatactgttacagggtccagaaatcgtgttcacatgggggctttgactcttcaaacagcttttgcagatcgtaaattgcatttgcctagtcgtgtgacctcaaaagaagtcagacatatttaatccagaaatagtttcgtttgagggagggcttgcaggtctgtaaatagcatttgctttcctggttagagattgggatgcagaaggagttttcagtattttttttaaaacactaatgatcattgaagagtatttatgtaaacatacaacgtataatgggtgggggatccgatcatggtgatgtacggggtgaattctcttgccgtgttgcaaatgtgtaaaataaagattatctggcagaac

SEQ ID NO: 429234 - DNA, 4316 bp, Homo sapiens
  misc_feature (31)..(31): n is a, c, g, or t
atacatttctttccatccatcaggcaacatnctcagtcagaaaaccacctcccaccacctgtgctgtgccacagggcatgatccctgacagcccagagcagcactgtctggcttcccttcatgcttgtggctttgttgtgtttgatcagaattttgggggaaatggaaagttttcctcaaggagcagctgggggcagaataggtagtatttaagcaaatacttaagtccaagcaaatcatccccattaaaaagcttttcctgtaggctagtaggatttctaaatagatgaattcaacagacttggtccccatagtccaagagtatgtatgtgaagaaagtgagcatgattcaacagtttcactctcagggattttaggatggcaaaatacttcacagaaactcaatgattaagttcccttccacacttccagagcttgaatgaacacaggtagccacctaaattgagcagtattgcaactcagagagaaaatcatctgaatagtaggacaagctcagaaggtacattgtgactgagggcttaaaaggagaccaaaacatggccccatcagggaagcttcttaatgcttggggggccagctaggtagggttgcttccaaaagctggagcccacccctgcctaggggttgtcagagagccacacctgcaggggaacaggtacctccgagggtgagagtcgtggtctctgggagttgttttctcacctctggcttagaagggtcaggcagaaaccacaggatgtggggtcacactcactgtcccaagtttgggaacctgaaaaagtctccattcagaacatggttgttctccctgtcccatgctatcttatcttcctaaatgactaatgaggaagcgggtgttctttttctgcactttgattcgccatctgggttctgtagggtgctctgaaggtgtgatctgccttctggctgatgtggaggaagagcaagcgccttcccaggccacagctgctcacctctcggcagatattttaggcaagcatccgtgtgtcttcccatcttcaggagaaaggtaaatgcaccctaagtgttcacttctggacctttttcaagttcacttgggactgtgtgacagaagggagttggagggaggatgggaatatttttaacactttgttttcctgtgcagaaacataataccagttttcgcagaaatgtgtctcaatctgtgactaccaaagccctcctcagtccttccctcagagggacacatttgctgtttctcccgcaagcagatgttgtggatgaggcgatagactccttggcaagaacgaaaggtgtgatgaaacctccctgctcggaagggtctccgtggaggtgtcctcatttcacatgctgggttttgcaagcgaggaagccaggcagtggaggaactagagagaggcaggcgtgtgtgtggacaagcgctggagccgcagccctcagactggcacgggaacgccagcgttgggtgttcagattccacgcgtatgtctgggctcactcacagcatggccgagtgtctgcagtgctggtcctgacccttccagagcagcagtggacagatgagataagactgtttcagaaacaaagatggccacagccttcctaacaagcaggtcatctggccatgtctgtattgtaactggtaaaaggcttcaagtcagattgatgatcaagaaaagtcaaaaccccagcccaagattgggaaagcaggtggtggttccaagcttttaaaaaattattgaagctctccatcctgttctgtgagtgtgtcttctctttctccttcacgtcatagccgtgacccaccgttcatctctgctcttgcgtaaagatgaccgatggagtccaaagccaagtggcttcaccagctgacaagccaccctcctgcagcctgagtttcacagtccactgggttcgttgtcatgcggtgtttgaatggttaagcccttgcagtatttcagatcgggcaaaaaatatcggatgcacatagcagaaccattggtggtatttatagctttgctttgtactcctcactgtttctgcctacgcaaaatatccatgtttcctctgagaaatctgttgtggactgaaagcgctgctggctgtgaaatttaataaagtgtgtatgctttgctagaaaattatttcttggacaataggaacagtcattgatctgtaaatcctggctcttaacagtgagtggccaaggacttgatcagcccatttcttggtccctcagtgctttaaaatttaagtagcactgcattttgtaatgttgaatatgactctagtgacttgtaggaggcacttgtgaggagatgcttgcttcagtgtaaaagatgctcatggcctgagtcagttgagttttctttcaagaaaccacttcagagtgaaatatccagggtttccccgccctggacatgtccagcctgcccaggcagcacacagccctgtaagtccacctcgtgtgggtgagatttcctcctgcgtgatgacctcatcgccatctctgctgtctcattccacagcctccctccctcttctctcctcctctgccctcgcccttcccccttccccatcccctccccctcctcctctgccctcgcccttacccctcccccttccccttccgctcctcctccctcctccacctctttctcctcctccttccctcctcctccctcctcttcccttctctgccatctttctccccgtgcctattgatcccacataggctcattctgggtacaccggctaaaggctttggtgcattgcagcgttttctcccagcagctgtgtgaaagatgcattttctaagctaaggagaattttctcaagagtggcatactcatgccaaatattattgctctgggccatataggctggtcttcctccacactaaaatgggtgtcttgttttggtacttaaaacagtctactccaggcatccagtccttacagaccaaggaagagcatagcgatgcctgttggaattgcagatgcattctggccttctcccccgtcctgaaacattttctttgaggaaggctcttagaacattagatagtctgctgaggttgttggcccagctccatacacccagtagaacagtggaacaactcatgcttcatgctgccaagctgctgtacttcaaaggaaacagatctagcacactgctgcacccctgcttccacactccacacttcaccccgctgcttttctctgacccgcccctggccttgtaagactcacgtaagctaagtccaggatgcctgtggcctgcggcttgattcttccctttaggattcagcaagttaatggcttcctcgctatagaagtgagactttgacttgatgcctcttggtatatcaaaaagatattcatccagaaagtaccaaatgttctgaaagacccgctcttcactccagttttccctagggtgtttctggcagggcgtttttaaaaggcatctacctgagttgacgctaatacttgtcaccacctggaacgtagttatcggtcggcaggctgaacatactccagattccccagaggccacttctgtagcccagcgatgcatctgagcctctctgcgtggtttatgcttgaaaaatagataatgcttttagatggttcactgccaggccatgggccccacacatctcaggccctgtgtgagggagcacactgagatggtgcaggagtgaatgggcatggcttggcctcgctacctcggggacctgttggagttctggcagcagggtgtctgcaggtgggacggcgttctgggcagagtcagaatggtcagaatgaaacagaacagccaactcacccacaggacagcttattttgaggcaaggttttggattttggaggaagcagccagatgaggcggtgagcctccagaaggtcagcctttggagcacgtaagatactgttacagggtccagaaatcgtgttcacatgggggctttgactcttcaaacagcttttgcagatcgtaaattgcatttgcctagtcgtgtgacctcaaaagaagtcagacatatttaatccagaaatagtttcgtttgagggagggcttgcaggtctgtaaatagcatttgctttcctggttagagattgggatgcagaaggagttttcagtattttttttaaaacactaatgatcattgaagagtatttatgtaaacatacaacgtataatgggtgggggatccgatcatggtgatgtacggggtgaattctcttgccgtgttgcaaatgtgtaaaataaagattatctggcagaac

SEQ ID NO: 429235 - DNA, 2344 bp, Homo sapiens
gacaaataaaaatacggtctagtacgaggctctgtggttaatcggcagaggtggtggtatttatagctttgctttgtactcctcactgtttctgcctacgcaaaatatccatgtttcctctgagaaatctgttgtggactgaaagcgctgctggctgtgaaatttaataaagtgtgtatgctttgctagaaaattatttcttggacaataggaacagtcattgatctgtaaatcctggctcttaacagtgagtggccaaggacttgatcagcccatttcttggtccctcagtgctttaaaatttaagtagcactgcattttgtaatgttgaatatgactctagtgacttgtaggaggcacttgtgaggagatgcttgcttcagtgtaaaagatgctcatggcctgagtcagttgagttttctttcaagaaaccacttcagagtgaaatatccagggtttccccgccctggacatgtccagcctgcccaggcagcacacagccctgtaagtccacctcgtgtgggtgagatttcctcctgcgtgatgacctcatcgccatctctgctgtctcattccacagcctccctccctcttctctcctcctctgccctcgcccttcccccttccccatcccctccccctcctcctctgccctcgcccttacccctcccccttccccttccgctcctcctccctcctccacctctttctcctcctccttccctcctcctccctcctcttcccttctctgccatctttctccccgtgcctattgatcccacataggctcattctgggtacaccggctaaaggctttggtgcattgcagcgttttctcccagcagctgtgtgaaagatgcattttctaagctaaggagaattttctcaagagtggcatactcatgccaaatattattgctctgggccatataggctggtcttcctccacactaaaatgggtgtcttgttttggtacttaaaacagtctactccaggcatccagtccttacagaccaaggaagagcatagcgatgcctgttggaattgcagatgcattctggccttctcccccgtcctgaaacattttctttgaggaaggctcttagaacattagatagtctgctgaggttgttggcccagctccatacacccagtagaacagtggaacaactcatgcttcatgctgccaagctgctgtacttcaaaggaaacagatctagcacactgctgcacccctgcttccacactccacacttcaccccgctgcttttctctgacccgcccctggccttgtaagactcacgtaagctaagtccaggatgcctgtggcctgcggcttgattcttccctttaggattcagcaagttaatggcttcctcgctatagaagtgagactttgacttgatgcctcttggtatatcaaaaagatattcatccagaaagtaccaaatgttctgaaagacccgctcttcactccagttttccctagggtgtttctggcagggcgtttttaaaaggcatctacctgagttgacgctaatacttgtcaccacctggaacgtagttatcggtcggcaggctgaacatactccagattccccagaggccacttctgtagcccagcgatgcatctgagcctctctgcgtggtttatgcttgaaaaatagataatgcttttagatggttcactgccaggccatgggccccacacatctcaggccctgtgtgagggagcacactgagatggtgcaggagtgaatgggcatggcttggcctcgctacctcggggacctgttggagttctggcagcagggtgtctgcaggtgggacggcgttctgggcagagtcagaatggtcagaatgaaacagaacagccaactcacccacaggacagcttattttgaggcaaggttttggattttggaggaagcagccagatgaggcggtgagcctccagaaggtcagcctttggagcacgtaagatactgttacagggtccagaaatcgtgttcacatgggggctttgactcttcaaacagcttttgcagatcgtaaattgcatttgcctagtcgtgtgacctcaaaagaagtcagacatatttaatccagaaatagtttcgtttgagggagggcttgcaggtctgtaaatagcatttgctttcctggttagagattgggatgcagaaggagttttcagtattttttttaaaacactaatgatcattgaagagtatttatgtaaacatacaacgtataatgggtgggggatccgatcatggtgatgtacggggtgaattctcttgccgtgttgcaaatgtgtaaaataaagattatctggcagaac

SEQ ID NO: 429236 - DNA, 7273 bp, Homo sapiens
tattattgcaaccatttcgcttgtatttgagtgtgaagcgcctagaaaaccacaggacccctacggcgagccgggaatttttagatattttcctccgagtcaacgctcagtgaaatcagttcaatcagtggcccgacaccgtgcggctgacacagcttatcccccgaccctgagatcaggggtccccggagcccaaggtcgcttccaaagctcagcgaggcggaggtgcggcccgggctggtctggttcggccaccgttgttatggcaaccgccaataggttggcttcatctctaactgaaagtctgcacaggagcggccgatcgaagggccccgaggtgggcagcacaggctcctcgacgacttcctaggtcgcaatctccaggaaaacgaccacagggtcagcggagctagccgccgagccccgctccccgggcccttccggcggctgcgccctttcaccccggacgtgggcgggagaggaagcggctggtgatgctggaacaaacatggccgctctggcgcccgtcggctcccccgcctcccgcggtcctaggctggccgcgggcctccggctgctcccaatgctgggtttgctgcagttgctggccgagcctggcctgggccgcgtccatcacctggcactcaaggatgatgtgaggcataaagttcatctgaacacctttggcttcttcaaggatgggtacatggtggtgaatgtcagtagcctctcactgaatgagcctgaagacaaggatgtgactattggatttagcctagaccgtacaaagaatgatggcttttcttcttacctggatgaagatgtgaattactgtattttaaagaaacagtctgtctctgtcacccttttaatcctagacatctccagaagtgaggtaagagtaaagtctccaccagaagctggtacccagttaccaaagatcatcttcagcagggatgagaaagtccttggtcagagccaggagcctaatgttaaccctgcttcagcaggcaaccagacccagaagacacaagatggtggaaagtctaaaagaagtacagtggattcaaaggccatgggagagaaatccttttctgttcataataatggtggggcagtgtcatttcagtttttctttaacatcagcactgatgaccaagaaggcctttacagtctttattttcataaatgccttggaaaagaattgccaagtgacaagtttacattcagccttgatattgagatcacagagaagaatcctgacagctacctctcagcaggagaaattcctctccccaaattatacatctcaatggcctttttcttctttctttctgggaccatctggattcatatccttcgaaaacgacggaatgatgtatttaaaatccactggctgatggcggcccttcctttcaccaagtctctttccttggtgttccatgcaattgactaccactacatctcctcccagggcttccctatcgaaggctgggctgttgtgtactacataactcaccttttgaaaggggcgctactcttcatcaccattgcactcattggcactggctgggctttcattaagcacatcctttctgataaagacaaaaagatcttcatgattgtcattccactccaggtcctggcaaatgtagcctacatcatcatagagtccaccgaggagggcacgactgaatatggcttgtggaaggactctctatttctggtcgacctgttgtgttgtggtgccatcctcttcccagtggtgtggtcaatcagacatttacaagaagcatcagcaacagatggaaaagctgctattaacttagcaaagctgaaacttttcagacattattacgtcttgattgtgtgttacatatacttcactaggatcattgcatttctcctcaaactcgctgttccattccagtggaagtggctctaccagctcctggatgaaacggccacactggtcttctttgttctaacggggtataaattccgtccggcttcagataacccctacctacaactttctcaggaagaagaagacttggaaatggagtccgttgtgacaacatctggggtgatggaaagtatgaagaaagtcaagaaggtgaccaacggctccgtggagccccagggcgagtgggaaggcgccgtgtgacagagccgaccctgaggatggcactgtccaaggaaactgttaacttattcatagtcctattggacagcaggagcagctcctacagtgaactattggcaccaccgacagtgacaccagggcacatggctggagcacagtgccgcggaaacctgattttgtactctcttttatggaaacgatctgtggctgtttagaggcagctggatcctctttcaggcgggaatgggagggcgggcacagggaggaggagaggaagagaaaaggaagaattcatttttaatttaggtttctttttttcttcttcatttcggagctctaaggtgtatgcagttgtgaccccatgtgtggggaagtgtagcaaggacggctggtggagggggaaggagggtgcgaggtgtctgtctgatgctttaggaaatgtctactgaggaccctgggacttaagaagaagggcggggagagtgccattgcctgtttgggagacaaaaatgaacgaaaacaggtgactttggaaagcaaagtcaaaacccagtttaggatgtagcacctgccccaggattcctgccctcggctttgccccagacccttattccagatgctgagagtgaccaggacagcagctcctgaggcccagtggtcttctttccaacaggaaaagaaggctgtgatgtcgctgtcaggatcatgccctgtggcacagcacaggtggtgggaggtggttttctgactgagatgttgcctgatggatggaaagaaatgtatttttaagttcaaaaagcattatcctgtggcgttgcctggacatccactccctgacagcccagagcagcactgtctggcttcccttcatgcttgtggctttgttgtgtttgatcagaattttgggggaaatggaaagttttcctcaaggagcagctgggggcagaataggtagtatttaagcaaatacttaagtccaagcaaatcatccccattaaaaagcttttcctgtaggctagtaggatttctaaatagatgaattcaacagacttggtccccatagtccaagagtatgtatgtgaagaaagtgagcatgattcaacagtttcactctcagggattttaggatggcaaaatacttcacagaaactcaatgattaagttcccttccacacttccagagcttgaatgaacacaggtagccacctaaattgagcagtattgcaactcagagagaaaatcatctgaatagtaggacaagctcagaaggtacattgtgactgagggcttaaaaggagaccaaaacatggccccatcagggaagcttcttaatgcttggggggccagctaggtagggttgcttccaaaagctggagcccacccctgcctaggggttgtcagagagccacacctgcaggggaacaggtacctccgagggtgagagtcgtggtctctgggagttgttttctcacctctggcttagaagggtcaggcagaaaccacaggatgtggggtcacactcactgtcccaagtttgggaacctgaaaaagtctccattcagaacatggttgttctccctgtcccatgctatcttatcttcctaaatgactaatgaggaagcgggtgttctttttctgcactttgattcgccatctgggttctgtagggtgctctgaaggtgtgatctgccttctggctgatgtggaggaagagcaagcgccttcccaggccacagctgctcacctctcggcagatattttaggcaagcatccgtgtgtcttcccatcttcaggagaaaggtaaatgcaccctaagtgttcacttctggacctttttcaagttcacttgggactgtgtgacagaagggagttggagggaggatgggaatatttttaacactttgttttcctgtgcagaaacataataccagttttcgcagaaatgtgtctcaatctgtgactaccaaagccctcctcagtccttccctcagagggacacatttgctgtttctcccgcaagcagatgttgtggatgaggcgatagactccttggcaagaacgaaaggtgtgatgaaacctccctgctcggaagggtctccgtggaggtgtcctcatttcacatgctgggttttgcaagcgaggaagccaggcagtggaggaactagagagaggcaggcgtgtgtgtggacaagcgctggagccgcagccctcagactggcacgggaacgccagcgttgggtgttcagattccacgcgtatgtctgggctcactcacagcatggccgagtgtctgcagtgctggtcctgacccttccagagcagcagtggacagatgagataagactgtttcagaaacaaagatggccacagccttcctaacaagcaggtcatctggccatgtctgtattgtaactggtaaaaggcttcaagtcagattgatgatcaagaaaagtcaaaaccccagcccaagattgggaaagcaggtggtggttccaagcttttaaaaaattattgaagctctccatcctgttctgtgagtgtgtcttctctttctccttcacgtcatagccgtgacccaccgttcatctctgctcttgcgtaaagatgaccgatggagtccaaagccaagtggcttcaccagctgacaagccaccctcctgcagcctgagtttcacagtccactgggttcgttgtcatgcggtgtttgaatggttaagcccttgcagtatttcagatcgggcaaaaaatatcggatgcacatagcagaaccattggtggtatttatagctttgctttgtactcctcactgtttctgcctacgcaaaatatccatgtttcctctgagaaatctgttgtggactgaaagcgctgctggctgtgaaatttaataaagtgtgtatgctttgctagaaaattatttcttggacaataggaacagtcattgatctgtaaatcctggctcttaacagtgagtggccaaggacttgatcagcccatttcttggtccctcagtgctttaaaatttaagtagcactgcattttgtaatgttgaatatgactctagtgacttgtaggaggcacttgtgaggagatgcttgcttcagtgtaaaagatgctcatggcctgagtcagttgagttttctttcaagaaaccacttcagagtgaaatatccagggtttccccgccctggacatgtccagcctgcccaggcagcacacagccctgtaagtccacctcgtgtgggtgagatttcctcctgcgtgatgacctcatcgccatctctgctgtctcattccacagcctccctccctcttctctcctcctctgccctcgcccttcccccttccccatcccctccccctcctcctctgccctcgcccttacccctcccccttccccttccgctcctcctccctcctccacctctttctcctcctccttccctcctcctccctcctcttcccttctctgccatctttctccccgtgcctattgatcccacataggctcattctgggtacaccggctaaaggctttggtgcattgcagcgttttctcccagcagctgtgtgaaagatgcattttctaagctaaggagaattttctcaagagtggcatactcatgccaaatattattgctctgggccatataggctggtcttcctccacactaaaatgggtgtcttgttttggtacttaaaacagtctactccaggcatccagtccttacagaccaaggaagagcatagcgatgcctgttggaattgcagatgcattctggccttctcccccgtcctgaaacattttctttgaggaaggctcttagaacattagatagtctgctgaggttgttggcccagctccatacacccagtagaacagtggaacaactcatgcttcatgctgccaagctgctgtacttcaaaggaaacagatctagcacactgctgcacccctgcttccacactccacacttcaccccgctgcttttctctgacccgcccctggccttgtaagactcacgtaagctaagtccaggatgcctgtggcctgcggcttgattcttccctttaggattcagcaagttaatggcttcctcgctatagaagtgagactttgacttgatgcctcttggtatatcaaaaagatattcatccagaaagtaccaaatgttctgaaagacccgctcttcactccagttttccctagggtgtttctggcagggcgtttttaaaaggcatctacctgagttgacgctaatacttgtcaccacctggaacgtagttatcggtcggcaggctgaacatactccagattccccagaggccacttctgtagcccagcgatgcatctgagcctctctgcgtggtttatgcttgaaaaatagataatgcttttagatggttcactgccaggccatgggccccacacatctcaggccctgtgtgagggagcacactgagatggtgcaggagtgaatgggcatggcttggcctcgctacctcggggacctgttggagttctggcagcagggtgtctgcaggtgggacggcgttctgggcagagtcagaatggtcagaatgaaacagaacagccaactcacccacaggacagcttattttgaggcaaggttttggattttggaggaagcagccagatgaggcggtgagcctccagaaggtcagcctttggagcacgtaagatactgttacagggtccagaaatcgtgttcacatgggggctttgactcttcaaacagcttttgcagatcgtaaattgcatttgcctagtcgtgtgacctcaaaagaagtcagacatatttaatccagaaatagtttcgtttgagggagggcttgcaggtctgtaaatagcatttgctttcctggttagagattgggatgcagaaggagttttcagtattttttttaaaacactaatgatcattgaagagtatttatgtaaacatacaacgtataatgggtgggggatccgatcatggtgatgtacggggtgaattctcttgccgtgttgcaaatgtgtaaaataaagattatctggcagaacaccgtcgaagtgttgtctaaatcatggaatagctatgaccattaatacgatgcactgccgtc

SEQ ID NO: 429237 - DNA, 5536 bp, Homo sapiens
tattattgcaaccatttcgcttgtatttgagtgtgaagcgcctagaaaaccacaggacccctacggcgagccgggaatttttagatattttcctccgagtcaacgctcagtgaaatcagttcaatcagtggcccgacaccgtgcggctgacacagcttatcccccgaccctgagatcaggggtccccggagcccaaggtcgcttccaaagctcagcgaggcggaggtgcggcccgggctggtctggttcggccaccgttgttatggcaaccgccaataggttggcttcatctctaactgaaagtctgcacaggagcggccgatcgaagggccccgaggtgggcagcacaggctcctcgacgacttcctaggtcgcaatctccaggaaaacgaccacagggtcagcggagctagccgccgagccccgctccccgggcccttccggcggctgcgccctttcaccccggacgtgggcgggagaggaagcggctggtgatgctggaacaaacatggccgctctggcgcccgtcggctcccccgcctcccgcggtcctaggctggccgcgggcctccggctgctcccaatgctgggtttgctgcagttgctggccgagcctggcctgggccgcgtccatcacctggcactcaaggatgatgtgaggcataaagttcatctgaacacctttggcttcttcaaggatgggtacatggtggtgaatgtcagtagcctctcactgaatgagcctgaagacaaggatgtgactattggatttagcctagaccgtacaaagaatgatggcttttcttcttacctggatgaagatgtgaattactgtattttaaagaaacagtctgtctctgtcacccttttaatcctagacatctccagaagtgaggtaagagtaaagtctccaccagaagctggtacccagttaccaaagatcatcttcagcagggatgagaaagtccttggtcagagccaggagcctaatgttaaccctgcttcagcaggcaaccagacccagaagacacaagatggtggaaagtctaaaagaagtacagtggattcaaaggccatgggagagaaatccttttctgttcataataatggtggggcagtgtcatttcagtttttctttaacatcagcactgatgaccaagaaggcctttacagtctttattttcataaatgccttggaaaagaattgccaagtgacaagtttacattcagccttgatattgagatcacagagaagaatcctgacagctacctctcagcaggagaaattcctctccccaaattatacatctcaatggcctttttcttctttctttctgggaccatctggattcatatccttcgaaaacgacggaatgatgtatttaaaatccactggctgatggcggcccttcctttcaccaagtctctttccttggtgttccatgcaattgactaccactacatctcctcccagggcttccctatcgaaggctgggctgttgtgtactacataactcaccttttgaaaggggcgctactcttcatcaccattgcactcattggcactggctgggctttcattaagcacatcctttctgataaagacaaaaagatcttcatgattgtcattccactccaggtcctggcaaatgtagcctacatcatcatagagtccaccgaggagggcacgactgaatatggcttgtggaaggactctctatttctggtcgacctgttgtgttgtggtgccatcctcttcccagtggtgtggtcaatcagacatttacaagaagcatcagcaacagatggaaaagctgctattaacttagcaaagctgaaacttttcagacattattacgtcttgattgtgtgttacatatacttcactaggatcattgcatttctcctcaaactcgctgttccattccagtggaagtggctctaccagctcctggatgaaacggccacactggtcttctttgttctaacggggtataaattccgtccggcttcagataacccctacctacaactttctcaggaagaagaagacttggaaatggagtccgttgtgacaacatctggggtgatggaaagtatgaagaaagtcaagaaggtgaccaacggctccgtggagccccagggcgagtgggaaggcgccgtgtgacagagccgaccctgaggatggcactgtccaaggaaactgttaacttattcatagtcctattggacagcaggagcagctcctacagtgaactattggcaccaccgacagtgacaccagggcacatggctggagcacagtgccgcggaaacctgattttgtactctcttttatggaaacgatctgtggctgtttagaggcagctggatcctctttcaggcgggaatgggagggcgggcacagggaggaggagaggaagagaaaaggaagaattcatttttaatttaggtttctttttttcttcttcatttcggagctctaaggtgtatgcagttgtgaccccatgtgtggggaagtgtagcaaggacggctggtggagggggaaggagggtgcgaggtgtctgtctgatgctttaggaaatgtctactgaggaccctgggacttaagaagaagggcggggagagtgccattgcctgtttgggagacaaaaatgaacgaaaacaggtgactttggaaagcaaagtcaaaacccagtttaggatgtagcacctgccccaggattcctgccctcggctttgccccagacccttattccagatgctgagagtgaccaggacagcagctcctgaggcccagtggtcttctttccaacaggaaaagaaggctgtgatgtcgctgtcaggatcatgccctgtggcacagcacaggtggtgggaggtggttttctgactgagatgttgcctgatggatggaaagaaatgtatttttaagttcaaaaagcattatcctgtggcgttgcctggacatccactccctgacagcccagagcagcactgtctggcttcccttcatgcttgtggctttgttgtgtttgatcagaattttgggggaaatggaaagttttcctcaaggagcagctgggggcagaataggtagtatttaagcaaatacttaagtccaagcaaatcatccccattaaaaagcttttcctgtaggctagtaggatttctaaatagatgaattcaacagacttggtccccatagtccaagagtatgtatgtgaagaaagtgagcatgattcaacagtttcactctcagggattttaggatggcaaaatacttcacagaaactcaatgattaagttcccttccacacttccagagcttgaatgaacacaggtagccacctaaattgagcagtattgcaactcagagagaaaatcatctgaatagtaggacaagctcagaaggtacattgtgactgagggcttaaaaggagaccaaaacatggccccatcagggaagcttcttaatgcttggggggccagctaggtagggttgcttccaaaagctggagcccacccctgcctaggggttgtcagagagccacacctgcaggggaacaggtacctccgagggtgagagtcgtggtctctgggagttgttttctcacctctggcttagaagggtcaggcagaaaccacaggatgtggggtcacactcactgtcccaagtttgggaacctgaaaaagtctccattcagaacatggttgttctccctgtcccatgctatcttatcttcctaaatgactaatgaggaagcgggtgttctttttctgcactttgattcgccatctgggttctgtagggtgctctgaaggtgtgatctgccttctggctgatgtggaggaagagcaagcgccttcccaggccacagctgctcacctctcggcagatattttaggcaagcatccgtgtgtcttcccatcttcaggagaaaggtaaatgcaccctaagtgttcacttctggacctttttcaagttcacttgggactgtgtgacagaagggagttggagggaggatgggaatatttttaacactttgttttcctgtgcagaaacataataccagttttcgcagaaatgtgtctcaatctgtgactaccaaagccctcctcagtccttccctcagagggacacatttgctgtttctcccgcaagcagatgttgtggatgaggcgatagactccttggcaagaacgaaaggtgtgatgaaacctccctgctcggaagggtctccgtggaggtgtcctcatttcacatgctgggttttgcaagcgaggaagctcttagaacattagatagtctgctgaggttgttggcccagctccatacacccagtagaacagtggaacaactcatgcttcatgctgccaagctgctgtacttcaaaggaaacagatctagcacactgctgcacccctgcttccacactccacacttcaccccgctgcttttctctgacccgcccctggccttgtaagactcacgtaagctaagtccaggatgcctgtggcctgcggcttgattcttccctttaggattcagcaagttaatggcttcctcgctatagaagtgagactttgacttgatgcctcttggtatatcaaaaagatattcatccagaaagtaccaaatgttctgaaagacccgctcttcactccagttttccctagggtgtttctggcagggcgtttttaaaaggcatctacctgagttgacgctaatacttgtcaccacctggaacgtagttatcggtcggcaggctgaacatactccagattccccagaggccacttctgtagcccagcgatgcatctgagcctctctgcgtggtttatgcttgaaaaatagataatgcttttagatggttcactgccaggccatgggccccacacatctcaggccctgtgtgagggagcacactgagatggtgcaggagtgaatgggcatggcttggcctcgctacctcggggacctgttggagttctggcagcagggtgtctgcaggtgggacggcgttctgggcagagtcagaatggtcagaatgaaacagaacagccaactcacccacaggacagcttattttgaggcaaggttttggattttggaggaagcagccagatgaggcggtgagcctccagaaggtcagcctttggagcacgtaagatactgttacagggtccagaaatcgtgttcacatgggggctttgactcttcaaacagcttttgcagatcgtaaattgcatttgcctagtcgtgtgacctcaaaagaagtcagacatatttaatccagaaatagtttcgtttgagggagggcttgcaggtctgtaaatagcatttgctttcctggttagagattgggatgcagaaggagttttcagtattttttttaaaacactaatgatcattgaagagtatttatgtaaacatacaacgtataatgggtgggggatccgatcatggtgatgtacggggtgaattctcttgccgtgttgcaaatgtgtaaaataaagattatctggcagaac

SEQ ID NO: 429238 - DNA, 5057 bp, Homo sapiens
tattattgcaaccatttcgcttgtatttgagtgtgaagcgcctagaaaaccacaggacccctacggcgagccgggaatttttagatattttcctccgagtcaacgctcagtgaaatcagttcaatcagtggcccgacaccgtgcggctgacacagcttatcccccgaccctgagatcaggggtccccggagcccaaggtcgcttccaaagctcagcgaggcggaggtgcggcccgggctggtctggttcggccaccgttgttatggcaaccgccaataggttggcttcatctctaactgaaagtctgcacaggagcggccgatcgaagggccccgaggtgggcagcacaggctcctcgacgacttcctaggtcgcaatctccaggaaaacgaccacagggtcagcggagctagccgccgagccccgctccccgggcccttccggcggctgcgccctttcaccccggacgtgggcgggagaggaagcggctggtgatgctggaacaaacatggccgctctggcgcccgtcggctcccccgcctcccgcggtcctaggctggccgcgggcctccggctgctcccaatgctgggtttgctgcagttgctggccgagcctggcctgggccgcgtccatcacctggcactcaaggatgatgtgaggcataaagttcatctgaacacctttggcttcttcaaggatgggtacatggtggtgaatgtcagtagcctctcactgaatgagcctgaagacaaggatgtgactattggatttagcctagaccgtacaaagaatgatggcttttcttcttacctggatgaagatgtgaattactgtattttaaagaaacagtctgtctctgtcacccttttaatcctagacatctccagaagtgaggtaagagtaaagtctccaccagaagctggtacccagttaccaaagatcatcttcagcagggatgagaaagtccttggtcagagccaggagcctaatgttaaccctgcttcagcaggcaaccagacccagaagacacaagatggtggaaagtctaaaagaagtacagtggattcaaaggccatgggagagaaatccttttctgttcataataatggtggggcagtgtcatttcagtttttctttaacatcagcactgatgaccaagaaggcctttacagtctttattttcataaatgccttggaaaagaattgccaagtgacaagtttacattcagccttgatattgagatcacagagaagaatcctgacagctacctctcagcaggagaaattcctctccccaaattatacatctcaatggcctttttcttctttctttctgggaccatctggattcatatccttcgaaaacgacggaatgatgtatttaaaatccactggctgatggcggcccttcctttcaccaagtctctttccttggtgttccatgcaattgactaccactacatctcctcccagggcttccctatcgaaggctgggctgttgtgtactacataactcaccttttgaaaggggcgctactcttcatcaccattgcactcattggcactggctgggctttcattaagcacatcctttctgataaagacaaaaagatcttcatgattgtcattccactccaggtcctggcaaatgtagcctacatcatcatagagtccaccgaggagggcacgactgaatatggcttgtggaaggactctctatttctggtcgacctgttgtgttgtggtgccatcctcttcccagtggtgtggtcaatcagacatttacaagaagcatcagcaacagatggaaaagctgctattaacttagcaaagctgaaacttttcagacattattacgtcttgattgtgtgttacatatacttcactaggatcattgcatttctcctcaaactcgctgttccattccagtggaagtggctctaccagctcctggatgaaacggccacactggtcttctttgttctaacggggtataaattccgtccggcttcagataacccctacctacaactttctcaggaagaagaagacttggaaatggagtccgttgtgacaacatctggggtgatggaaagtatgaagaaagtcaagaaggtgaccaacggctccgtggagccccagggcgagtgggaaggcgccgtgtgacagagccgaccctgaggatggcactgtccaaggaaactgttaacttattcatagtcctattggacagcaggagcagctcctacagtgaactattggcaccaccgacagtgacaccagggcacatggctggagcacagtgccgcggaaacctgattttgtactctcttttatggaaacgatctgtggctgtttagaggcagctggatcctctttcaggcgggaatgggagggcgggcacagggaggaggagaggaagagaaaaggaagaattcatttttaatttaggtttctttttttcttcttcatttcggagctctaaggtgtatgcagttgtgaccccatgtgtggggaagtgtagcaaggacggctggtggagggggaaggagggtgcgaggtgtctgtctgatgctttaggaaatgtctactgaggaccctgggacttaagaagaagggcggggagagtgccattgcctgtttgggagacaaaaatgaacgaaaacaggtgactttggaaagcaaagtcaaaacccagtttaggatgtagcacctgccccaggattcctgccctcggctttgccccagacccttattccagatgctgagagtgaccaggacagcagctcctgaggcccagtggtcttctttccaacaggaaaagaaggctgtgatgtcgctgtcaggatcatgccctgtggcacagcacaggtggtgggaggtggttttctgactgagatgttgcctgatggatggaaagaaatgtatttttaagttcaaaaagcattatcctgtggcgttgcctggacatccactccctgacagcccagagcagcactgtctggcttcccttcatgcttgtggctttgttgtgtttgatcagaattttgggggaaatggaaagttttcctcaaggagcagctgggggcagaataggtagtatttaagcaaatacttaagtccaagcaaatcatccccattaaaaagcttttcctgtaggctagtaggatttctaaatagatgaattcaacagacttggtccccatagtccaagagtatgtatgtgaagaaagtgagcatgattcaacagtttcactctcagggattttaggatggcaaaatacttcacagaaactcaatgattaagttcccttccacacttccagagcttgaatgaacacaggtagccacctaaattgagcagtattgcaactcagagagaaaatcatctgaatagtaggacaagctcagaaggtacattgtgactgagggcttaaaaggagaccaaaacatggccccatcagggaagcttcttaatgcttggggggccagctaggtagggttgcttccaaaagctggagcccacccctgcctaggggttgtcagagagccacacctgcaggggaacaggtacctccgagggtgagagtcgtggtctctgggagttgttttctcacctctggcttagaagggtcaggcagaaaccacaggatgtggggtcacactcactgtcccaagtttgggaacctgaaaaagtctccattcagaacatggttgttctccctgtcccatgctatcttatcttcctaaatgactaatgaggaagcgggtgttctttttctgcactttgattcgccatctgggttctgtagggtgctctgaaggtgtgatctgccttctggctgatgtggaggaagagcaagcgccttcccaggccacagctgctcacctctcggcagatattttaggcaagcatccgtgtgtcttcccatcttcaggagaaaggtaaatgcaccctaagtgttcacttctggacctttttcaagttcacttgggactgtgtgacagaagggagttggagggaggatgggaatatttttaacactttgttttcctgtgcagaaacataataccagttttcgcagaaatgtgtctcaatctgtgactaccaaagccctcctcagtccttccctcagagggacacatttgctgtttctcccgcaagcagatgttgtggatgaggcgatagactccttggcaagaacgaaaggtgtgatgaaacctccctgctcggaagggtctccgtggaggtgtcctcatttcacatgctgggttttgcaagcgaggaagccaggcagtggaggaactagagagaggcaggcgtgtgtgtggacaagcgctggagccgcagccctcagactggcacgggaacgccagcgttgggtgttcagattccacgcgtatgtctgggctcactcacagcatggccgagtgtctgcagtgctggtcctgacccttccagagcagcagtggacagatgagataagactgtttcagaaacaaagatggccacagccttcctaacaagcaggtcatctggccatgtctgtattgtaactggtaaaaggcttcaagtcagattgatgatcaagaaaagtcaaaaccccagcccaagattgggaaagcaggtggtggttccaagcttttaaaaaattattgaagctctccatcctgttctgtgagtgtgtcttctctttctccttcacgtcatagccgtgacccaccgttcatctctgctcttgcgtaaagatgaccgatggagtccaaagccaagtggcttcaccagctgacaagccaccctcctgcagcctgagtttcacagtccactgggttcgttgtcatgcggtgtttgaatggttaagcccttgcagtatttcagatcgggcaaaaaatatcggatgcacatagcagaaccattggtggtatttatagctttgctttgtactcctcactgtttctgcctacgcaaaatatccatgtttcctctgagaaatctgttgtggactgaaagcgctgctggctgtgaaatttaataaagtgtgtatgctttgctaga

SEQ ID NO: 429239 - DNA, 1725 bp, Homo sapiens
  misc_feature (40)..(40): n is a, c, g, or t
taatcggcctaagtgctacgagggccccgagcggtttttnaatatcggcagaggcttcccttccgctcctcctccctcctccacctctttctcctcctccttccctcctcctccctcctcttcccttctctgccatctttctccccgtgcctattgatcccacataggctcattctgggtacaccggctaaaggctttggtgcattgcagcgttttctcccagcagctgtgtgaaagatgcattttctaagctaaggagaattttctcaagagtggcatactcatgccaaatattattgctctgggccatataggctggtcttcctccacactaaaatgggtgtcttgttttggtacttaaaacagtctactccaggcatccagtccttacagaccaaggaagagcatagcgatgcctgttggaattgcagatgcattctggccttctcccccgtcctgaaacattttctttgaggaaggctcttagaacattagatagtctgctgaggttgttggcccagctccatacacccagtagaacagtggaacaactcatgcttcatgctgccaagctgctgtacttcaaaggaaacagatctagcacactgctgcacccctgcttccacactccacacttcaccccgctgcttttctctgacccgcccctggccttgtaagactcacgtaagctaagtccaggatgcctgtggcctgcggcttgattcttccctttaggattcagcaagttaatggcttcctcgctatagaagtgagactttgacttgatgcctcttggtatatcaaaaagatattcatccagaaagtaccaaatgttctgaaagacccgctcttcactccagttttccctagggtgtttctggcagggcgtttttaaaaggcatctacctgagttgacgctaatacttgtcaccacctggaacgtagttatcggtcggcaggctgaacatactccagattccccagaggccacttctgtagcccagcgatgcatctgagcctctctgcgtggtttatgcttgaaaaatagataatgcttttagatggttcactgccaggccatgggccccacacatctcaggccctgtgtgagggagcacactgagatggtgcaggagtgaatgggcatggcttggcctcgctacctcggggacctgttggagttctggcagcagggtgtctgcaggtgggacggcgttctgggcagagtcagaatggtcagaatgaaacagaacagccaactcacccacaggacagcttattttgaggcaaggttttggattttggaggaagcagccagatgaggcggtgagcctccagaaggtcagcctttggagcacgtaagatactgttacagggtccagaaatcgtgttcacatgggggctttgactcttcaaacagcttttgcagatcgtaaattgcatttgcctagtcgtgtgacctcaaaagaagtcagacatatttaatccagaaatagtttcgtttgagggagggcttgcaggtctgtaaatagcatttgctttcctggttagagattgggatgcagaaggagttttcagtattttttttaaaacactaatgatcattgaagagtatttatgtaaacatacaacgtataatgggtgggggatccgatcatggtgatgtacggggtgaattctcttgccgtgttgcaaatgtgtaaaataaagattatctggcagaac

SEQ ID NO: 429240 - DNA, 3185 bp, Homo sapiens
tattattgcaaccatttcgcttgtatttgagtgtgaagcgcctagaaaaccacaggacccctacggcgagccgggaatttttagatattttcctccgagtcaacgctcagtgaaatcagttcaatcagtggcccgacaccgtgcggctgacacagcttatcccccgaccctgagatcaggggtccccggagcccaaggtcgcttccaaagctcagcgaggcggaggtgcggcccgggctggtctggttcggccaccgttgttatggcaaccgccaataggttggcttcatctctaactgaaagtctgcacaggagcggccgatcgaagggccccgaggtgggcagcacaggctcctcgacgacttcctaggtcgcaatctccaggaaaacgaccacagggtcagcggagctagccgccgagccccgctccccgggcccttccggcggctgcgccctttcaccccggacgtgggcgggagaggaagcggctggtgatgctggaacaaacatggccgctctggcgcccgtcggctcccccgcctcccgcggtcctaggctggccgcgggcctccggctgctcccaatgctgggtttgctgcagttgctggccgagcctggcctgggccgcgtccatcacctggcactcaaggatgatgtgaggcataaagttcatctgaacacctttggcttcttcaaggatgggtacatggtggtgaatgtcagtagcctctcactgaatgagcctgaagacaaggatgtgactattggatttagcctagaccgtacaaagaatgatggcttttcttcttacctggatgaagatgtgaattactgtattttaaagaaacagtctgtctctgtcacccttttaatcctagacatctccagaagtgaggtaagagtaaagtctccaccagaagctggtacccagttaccaaagatcatcttcagcagggatgagaaagtccttggtcagagccaggagcctaatgttaaccctgcttcagcaggcaaccagacccagaagacacaagatggtggaaagtctaaaagaagtacagtggattcaaaggccatgggagagaaatccttttctgttcataataatggtggggcagtgtcatttcagtttttctttaacatcagcactgatgaccaagaaggcctttacagtctttattttcataaatgccttggaaaagaattgccaagtgacaagtttacattcagccttgatattgagatcacagagaagaatcctgacagctacctctcagcaggagaaattcctctccccaaattatacatctcaatggcctttttcttctttctttctgggaccatctggattcatatccttcgaaaacgacggaatgatgtatttaaaatccactggctgatggcggcccttcctttcaccaagtctctttccttggtgttccatgcaattgactaccactacatctcctcccagggcttccctatcgaaggctgggctgttgtgtactacataactcaccttttgaaaggggcgctactcttcatcaccattgcactcattggcactggctgggctttcattaagcacatcctttctgataaagacaaaaagatcttcatgattgtcattccactccaggtcctggcaaatgtagcctacatcatcatagagtccaccgaggagggcacgactgaatatggcttgtggaaggactctctatttctggtcgacctgttgtgttgtggtgccatcctcttcccagtggtgtggtcaatcagacatttacaagaagcatcagcaacagatggaaaagctgctattaacttagcaaagctgaaacttttcagacattattacgtcttgattgtgtgttacatatacttcactaggatcattgcatttctcctcaaactcgctgttccattccagtggaagtggctctaccagctcctggatgaaacggccacactggtcttctttgttctaacggggtataaattccgtccggcttcagataacccctacctacaactttctcaggaagaagaagacttggaaatggagtccgttgtgacaacatctggggtgatggaaagtatgaagaaagtcaagaaggtgaccaacggctccgtggagccccagggcgagtgggaaggcgccgtgtgacagagccgaccctgaggatggcactgtccaaggaaactgttaacttattcatagtcctattggacagcaggagcagctcctacagtgaactattggcaccaccgacagtgacaccagggcacatggctggagcacagtgccgcggaaacctgattttgtactctcttttatggaaacgatctgtggctgtttagaggcagctggatcctctttcaggcgggaatgggagggcgggcacagggaggaggagaggaagagaaaaggaagaattcatttttaatttaggtttctttttttcttcttcatttcggagctctaaggtgtatgcagttgtgaccccatgtgtggggaagtgtagcaaggacggctggtggagggggaaggagggtgcgaggtgtctgtctgatgctttaggaaatgtctactgaggaccctgggacttaagaagaagggcggggagagtgccattgcctgtttgggagacaaaaatgaacgaaaacaggtgactttggaaagcaaagtcaaaacccagtttaggatgtagcacctgccccaggattcctgccctcggctttgccccagacccttattccagatgctgagagtgaccaggacagcagctcctgaggcccagtggtcttctttccaacaggaaaagaaggctgtgatgtcgctgtcaggatcatgccctgtggcacagcacaggtggtgggaggtggttttctgactgagatgttgcctgatggatggaaagaaatgtatttttaagttcaaaaagcattatcctgtggcgttgcctggacatccactccctgacagcccagagcagcactgtctggcttcccttcatgcttgtggctttgttgtgtttgatcagaattttgggggaaatggaaagttttcctcaaggagcagctgggggcagaataggtagtatttaagcaaatacttaagtccaagcaaatcatccccattaaaaagcttttcctgtaggctagtaggatttctaaatagatga

SEQ ID NO: 429241 - DNA, 2268 bp, Homo sapiens
tattattgcaaccatttcgcttgtatttgagtgtgaagcgcctagaaaaccacaggacccctacggcgagccgggaatttttagatattttcctccgagtcaacgctcagtgaaatcagttcaatcagtggcccgacaccgtgcggctgacacagcttatcccccgaccctgagatcaggggtccccggagcccaaggtcgcttccaaagctcagcgaggcggaggtgcggcccgggctggtctggttcggccaccgttgttatggcaaccgccaataggttggcttcatctctaactgaaagtctgcacaggagcggccgatcgaagggccccgaggtgggcagcacaggctcctcgacgacttcctaggtcgcaatctccaggaaaacgaccacagggtcagcggagctagccgccgagccccgctccccgggcccttccggcggctgcgccctttcaccccggacgtgggcgggagaggaagcggctggtgatgctggaacaaacatggccgctctggcgcccgtcggctcccccgcctcccgcggtcctaggctggccgcgggcctccggctgctcccaatgctgggtttgctgcagttgctggccgagcctggcctgggccgcgtccatcacctggcactcaaggatgatgtgaggcataaagttcatctgaacacctttggcttcttcaaggatgggtacatggtggtgaatgtcagtagcctctcactgaatgagcctgaagacaaggatgtgactattggatttagcctagaccgtacaaagaatgatggcttttcttcttacctggatgaagatgtgaattactgtattttaaagaaacagtctgtctctgtcacccttttaatcctagacatctccagaagtgaggtaagagtaaagtctccaccagaagctggtacccagttaccaaagatcatcttcagcagggatgagaaagtccttggtcagagccaggagcctaatgttaaccctgcttcagcaggcaaccagacccagaagacacaagatggtggaaagtctaaaagaagtacagtggattcaaaggccatgggagagaaatccttttctgttcataataatggtggggcagtgtcatttcagtttttctttaacatcagcactgatgaccaagaaggcctttacagtctttattttcataaatgccttggaaaagaattgccaagtgacaagtttacattcagccttgatattgagatcacagagaagaatcctgacagctacctctcagcaggagaaattcctctccccaaattatacatctcaatggcctttttcttctttctttctgggaccatctggattcatatccttcgaaaacgacgtcattggcactggctgggctttcattaagcacatcctttctgataaagacaaaaagatcttcatgattgtcattccactccaggtcctggcaaatgtagcctacatcatcatagagtccaccgaggagggcacgactgaatatggcttgtggaaggactctctatttctggtcgacctgttgtgttgtggtgccatcctcttcccagtggtgtggtcaatcagacatttacaagaagcatcagcaacagatggaaaagagcagccaggggtagtttggagaaggaggtgttgagtcagttgtataaggaggaggttgggggtgactgctgcttattaagatgattcatttcatttccactcgtggttgtgattttcaccttctcaaaactgagtcagcaagagaaaatcttgtcttagaagggccagataacacttcgctgtgagaacaggagggataatggattggagatggctatgtgtaaagcagccctgcctgctgatttaacacactttcaaaatagatgtgtcagtattcatttaaagcaagactctgatgacagaaggaaccttgaaaactacctgatattgaaatggttgtgccctttatagcccttttgcatctccttgactttccagtcatgcctcctaaatcagaagaaaagctgcaaagaaaatgttttgtgtggttctgggcttatttgaataatgttcatgaccacaggctgccatagcacaagtgagaatttcagaccacaagggtttaaggagcagtgctctcttctctcaaagctcagaacggtctctggatccatggtatcgtacacccagtgtggatattaacattctttaatgcaggttatgaataataaataaaacaggtttttgttaataaagtt

SEQ ID NO: 429242 - DNA, 2604 bp, Homo sapiens
tattattgcaaccatttcgcttgtatttgagtgtgaagcgcctagaaaaccacaggacccctacggcgagccgggaatttttagatattttcctccgagtcaacgctcagtgaaatcagttcaatcagtggcccgacaccgtgcggctgacacagcttatcccccgaccctgagatcaggggtccccggagcccaaggtcgcttccaaagctcagcgaggcggaggtgcggcccgggctggtctggttcggccaccgttgttatggcaaccgccaataggttggcttcatctctaactgaaagtctgcacaggagcggccgatcgaagggccccgaggtgggcagcacaggctcctcgacgacttcctaggtcgcaatctccaggaaaacgaccacagggtcagcggagctagccgccgagccccgctccccgggcccttccggcggctgcgccctttcaccccggacgtgggcgggagaggaagcggctggtgatgctggaacaaacatggccgctctggcgcccgtcggctcccccgcctcccgcggtcctaggctggccgcgggcctccggctgctcccaatgctgggtttgctgcagttgctggccgagcctggcctgggccgcgtccatcacctggcactcaaggatgatgtgaggcataaagttcatctgaacacctttggcttcttcaaggatgggtacatggtggtgaatgtcagtagcctctcactgaatgagcctgaagacaaggatgtgactattggatttagcctagaccgtacaaagaatgatggcttttcttcttacctggatgaagatgtgaattactgtattttaaagaaacagtctgtctctgtcacccttttaatcctagacatctccagaagtgaggtaagagtaaagtctccaccagaagctggtacccagttaccaaagatcatcttcagcagggatgagaaagtccttggtcagagccaggagcctaatgttaaccctgcttcagcaggcaaccagacccagaagacacaagatggtggaaagtctaaaagaagtacagtggattcaaaggccatgggagagaaatccttttctgttcataataatggtggggcagtgtcatttcagtttttctttaacatcagcactgatgaccaagaaggcctttacagtctttattttcataaatgccttggaaaagaattgccaagtgacaagtttacattcagccttgatattgagatcacagagaagaatcctgacagctacctctcagcaggagaaattcctctccccaaattatacatctcaatggcctttttcttctttctttctgggaccatctggattcatatccttcgaaaacgacggaatgatgtatttaaaatccactggctgatggcggcccttcctttcaccaagtctctttccttggtgttccatgcaattgactaccactacatctcctcccagggcttccctatcgaaggctgggctgttgtgtactacataactcaccttttgaaaggggcgctactcttcatcaccattgcactcattggcactggctgggctttcattaagcacatcctttctgataaagacaaaaagatcttcatgattgtcattccactccaggtcctggcaaatgtagcctacatcatcatagagtccaccgaggagggcacgactgaatatggcttgtggaaggactctctatttctggtcgacctgttgtgttgtggtgccatcctcttcccagtggtgtggtcaatcagacatttacaagaagcatcagcaacagatggaaaagaaggcaagttctctcgtgctcattttgtgttgctcagcttgctctgaacccacgtgctgcggcactgcggaggagtggaggcagcctatggtgtcaagatgctgtcttcctgggaggagagctaggggaggcctggggcccacttcgtgagagcagccaggggtagtttggagaaggaggtgttgagtcagttgtataaggaggaggttgggggtgactgctgcttattaagatgattcatttcatttccactcgtggttgtgattttcaccttctcaaaactgagtcagcaagagaaaatcttgtcttagaagggccagataacacttcgctgtgagaacaggagggataatggattggagatggctatgtgtaaagcagccctgcctgctgatttaacacactttcaaaatagatgtgtcagtattcatttaaagcaagactctgatgacagaaggaaccttgaaaactacctgatattgaaatggttgtgccctttatagcccttttgcatctccttgactttccagtcatgcctcctaaatcagaagaaaagctgcaaagaaaatgttttgtgtggttctgggcttatttgaataatgttcatgaccacaggctgccatagcacaagtgagaatttcagaccacaagggtttaaggagcagtgctctcttctctcaaagctcagaacggtctctggatccatggtatcgtacacccagtgtggatattaacattctttaatgcaggttatgaataataaataaaacaggtttttgttaataaagtt

SEQ ID NO: 429243 - DNA, 2493 bp, Homo sapiens
tattattgcaaccatttcgcttgtatttgagtgtgaagcgcctagaaaaccacaggacccctacggcgagccgggaatttttagatattttcctccgagtcaacgctcagtgaaatcagttcaatcagtggcccgacaccgtgcggctgacacagcttatcccccgaccctgagatcaggggtccccggagcccaaggtcgcttccaaagctcagcgaggcggaggtgcggcccgggctggtctggttcggccaccgttgttatggcaaccgccaataggttggcttcatctctaactgaaagtctgcacaggagcggccgatcgaagggccccgaggtgggcagcacaggctcctcgacgacttcctaggtcgcaatctccaggaaaacgaccacagggtcagcggagctagccgccgagccccgctccccgggcccttccggcggctgcgccctttcaccccggacgtgggcgggagaggaagcggctggtgatgctggaacaaacatggccgctctggcgcccgtcggctcccccgcctcccgcggtcctaggctggccgcgggcctccggctgctcccaatgctgggtttgctgcagttgctggccgagcctggcctgggccgcgtccatcacctggcactcaaggatgatgtgaggcataaagttcatctgaacacctttggcttcttcaaggatgggtacatggtggtgaatgtcagtagcctctcactgaatgagcctgaagacaaggatgtgactattggatttagcctagaccgtacaaagaatgatggcttttcttcttacctggatgaagatgtgaattactgtattttaaagaaacagtctgtctctgtcacccttttaatcctagacatctccagaagtgaggtaagagtaaagtctccaccagaagctggtacccagttaccaaagatcatcttcagcagggatgagaaagtccttggtcagagccaggagcctaatgttaaccctgcttcagcaggcaaccagacccagaagacacaagatggtggaaagtctaaaagaagtacagtggattcaaaggccatgggagagaaatccttttctgttcataataatggtggggcagtgtcatttcagtttttctttaacatcagcactgatgaccaagaaggcctttacagtctttattttcataaatgccttggaaaagaattgccaagtgacaagtttacattcagccttgatattgagatcacagagaagaatcctgacagctacctctcagcaggagaaattcctctccccaaattatacatctcaatggcctttttcttctttctttctgggaccatctggattcatatccttcgaaaacgacggaatgatgtatttaaaatccactggctgatggcggcccttcctttcaccaagtctctttccttggtgttccatgcaattgactaccactacatctcctcccagggcttccctatcgaaggctgggctgttgtgtactacataactcaccttttgaaaggggcgctactcttcatcaccattgcactcattggcactggctgggctttcattaagcacatcctttctgataaagacaaaaagatcttcatgattgtcattccactccaggtcctggcaaatgtagcctacatcatcatagagtccaccgaggagggcacgactgaatatggcttgtggaaggactctctatttctggtcgacctgttgtgttgtggtgccatcctcttcccagtggtgtggtcaatcagacatttacaagaagcatcagcaacagatggaaaagctgctattaacttagcaaagctgaaacttttcagacattattacgtcttgattgtgtgttacatatacttcactaggatcattgcatttctcctcaaactcgctgttccattccagtggaagtggctctaccagctcctggatgaaacggccacactggtcttctttgttctaacggggtataaattccgtccggcttcagataacccctacctacaactttctcaggaagaagaagacttggaaatggagtccgttgtgacaacatctggggtgatggaaagtatgaagaaagtcaagaaggtgaccaacggctccgtggagccccagggcgagtgggaaggcgccgtgtgacagagccgaccctgaggatggcactgtccaaggaaactgttaacttattcatagtcctattggacagcaggagcagctcttggacactaggaaaaaccttgtgagagagtaaaaattttacacccatagtaagctaaaagcagcaccattagaaaggtcaggtcaacaccactacttaaaatccaaactttatggattctgcaccatgggcccattttccttttaaaacttttgtggtttaggtactgaaaattttctcgttagctgggtattaaatgatgcataggccatttattcaccagttttccctgtgacacaggtgttga

SEQ ID NO: 429244 - DNA, 2499 bp, Homo sapiens
tattattgcaaccatttcgcttgtatttgagtgtgaagcgcctagaaaaccacaggacccctacggcgagccgggaatttttagatattttcctccgagtcaacgctcagtgaaatcagttcaatcagtggcccgacaccgtgcggctgacacagcttatcccccgaccctgagatcaggggtccccggagcccaaggtcgcttccaaagctcagcgaggcggaggtgcggcccgggctggtctggttcggccaccgttgttatggcaaccgccaataggttggcttcatctctaactgaaagtctgcacaggagcggccgatcgaagggccccgaggtgggcagcacaggctcctcgacgacttcctaggtcgcaatctccaggaaaacgaccacagggtcagcggagctagccgccgagccccgctccccgggcccttccggcggctgcgccctttcaccccggacgtgggcgggagaggaagcggctggtgatgctggaacaaacatggccgctctggcgcccgtcggctcccccgcctcccgcggtcctaggctggccgcgggcctccggctgctcccaatgctgggtttgctgcagttgctggccgagcctggcctgggccgcgtccatcacctggcactcaaggatgatgtgaggcataaagttcatctgaacacctttggcttcttcaaggatgggtacatggtggtgaatgtcagtagcctctcactgaatgagcctgaagacaaggatgtgactattggatttagcctagaccgtacaaagaatgatggcttttcttcttacctggatgaagatgtgaattactgtattttaaagaaacagtctgtctctgtcacccttttaatcctagacatctccagaagtgaggtaagagtaaagtctccaccagaagctggtacccagttaccaaagatcatcttcagcagggatgagaaagtccttggtcagagccaggagcctaatgttaaccctgcttcagcaggcaaccagacccagaagacacaagatggtggaaagtctaaaagaagtacagtggattcaaaggccatgggagagaaatccttttctgttcataataatggtggggcagtgtcatttcagtttttctttaacatcagcactgatgaccaagaaggcctttacagtctttattttcataaatgccttggaaaagaattgccaagtgacaagtttacattcagccttgatattgagatcacagagaagaatcctgacagctacctctcagcaggagaaattcctctccccaaattatacatctcaatggcctttttcttctttctttctgggaccatctggattcatatccttcgaaaacgacggaatgatgtatttaaaatccactggctgatggcggcccttcctttcaccaagtctctttccttggtgttccatgcaattgactaccactacatctcctcccagggcttccctatcgaaggctgggctgttgtgtactacataactcaccttttgaaaggggcgctactcttcatcaccattgcactcattggcactggctgggctttcattaagcacatcctttctgataaagacaaaaagatcttcatgattgtcattccactccaggtcctggcaaatgtagcctacatcatcatagagtccaccgaggagggcacgactgaatatggcttgtggaaggactctctatttctggtcgacctgttgtgttgtggtgccatcctcttcccagtggtgtggtcaatcagacatttacaagaagcatcagcaacagatggaaaagctgctattaacttagcaaagctgaaacttttcagacattattacgtcttgattgtgtgttacatatacttcactaggatcattgcatttctcctcaaactcgctgttccattccagtggaagtggctctaccagctcctggatgaaacggccacactggtcttctttgttctaacggggtataaattccgtccggcttcagataacccctacctacaactttctcaggaagaagaagacttggaaatggagtccgtgtaagaaatctttcttccctcttccttagccctgacccctttgcctaacacaaagcagcacagtgtgaatcgggtcggctgctctcagcatttcgtggctgcaggggtggttcctctatttttagcagaaggaagcggacactggagccccaggctgtctgatctggtttgaagtacagtatctgccaaacctagctgggtcttgtcagggaagatggaacttgccgttccactaagcatcattggagcctgctttcaagaactcagtggcaagaacttaggaatatacgtggccagttcacgagggagaacagggggccgactttctgtcaggcccgccatcaggcgcttacgtctgaaaatggaatcttctgagtcatctctaagtctgctaatgatcctcagacatcctctatcgtcagataactg

SEQ ID NO: 429245 - DNA, 2293 bp, Homo sapiens
tattattgcaaccatttcgcttgtatttgagtgtgaagcgcctagaaaaccacaggacccctacggcgagccgggaatttttagatattttcctccgagtcaacgctcagtgaaatcagttcaatcagtggcccgacaccgtgcggctgacacagcttatcccccgaccctgagatcaggggtccccggagcccaaggtcgcttccaaagctcagcgaggcggaggtgcggcccgggctggtctggttcggccaccgttgttatggcaaccgccaataggttggcttcatctctaactgaaagtctgcacaggagcggccgatcgaagggccccgaggtgggcagcacaggctcctcgacgacttcctaggtcgcaatctccaggaaaacgaccacagggtcagcggagctagccgccgagccccgctccccgggcccttccggcggctgcgccctttcaccccggacgtgggcgggagaggaagcggctggtgatgctggaacaaacatggccgctctggcgcccgtcggctcccccgcctcccgcggtcctaggctggccgcgggcctccggctgctcccaatgctgggtttgctgcagttgctggccgagcctggcctgggccgcgtccatcacctggcactcaaggatgatgtgaggcataaagttcatctgaacacctttggcttcttcaaggatgggtacatggtggtgaatgtcagtagcctctcactgaatgagcctgaagacaaggatgtgactattggatttagcctagaccgtacaaagaatgatggcttttcttcttacctggatgaagatgtgaattactgtattttaaagaaacagtctgtctctgtcacccttttaatcctagacatctccagaagtgaggtaagagtaaagtctccaccagaagctggtacccagttaccaaagatcatcttcagcagggatgagaaagtccttggtcagagccaggagcctaatgttaaccctgcttcagcaggcaaccagacccagaagacacaagatggtggaaagtctaaaagaagtacagtggattcaaaggccatgggagagaaatccttttctgttcataataatggtggggcagtgtcatttcagtttttctttaacatcagcactgatgaccaagaaggcctttacagtctttattttcataaatgccttggaaaagaattgccaagtgacaagtttacattcagccttgatattgagatcacagagaagaatcctgacagctacctctcagcaggagaaattcctctccccaaattatacatctcaatggcctttttcttctttctttctgggaccatctggattcatatccttcgaaaacgacggaatgatgtatttaaaatccactggctgatggcggcccttcctttcaccaagtctctttccttggtgttccatgcaattgactaccactacatctcctcccagggcttccctatcgaaggctgggctgttgtgtactacataactcaccttttgaaaggggcgctactcttcatcaccattgcactcattggcactggctgggctttcattaagcacatcctttctgataaagacaaaaagatcttcatgattgtcattccactccaggtcctggcaaatgtagcctacatcatcatagagtccaccgaggagggcacgactgaatatggcttgtggaaggactctctatttctggtcgacctgttgtgttgtggtgccatcctcttcccagtggtgtggtcaatcagacatttacaagaagcatcagcaacagatggaaaaggtgacagcatgggacctcttcagcagagagcgaatctgagagcaggaagtcgcatagctgctattaacttagcaaagctgaaacttttcagacattattacgtcttgattgtgtgttacatatacttcactaggatcattgcatttctcctcaaacctaaaaaaaaaaaaaaaaaaaaaaaaaaaaaaaaaaaaaaaaaaaaaaaaaccccgcgggcccttttttgggggggggggaaaaagggggaaaaaaggggccatgtcgctcttagtcgtcgtttccccggcccccgactttttcgttgtgaacaaaggggggaaatattggcggggtcctccccataaaagggaggaccgttatttatttccgcataaacacccgcggtgttatcccggctggtttttagagatctcgccgacaacaaaatcaagcacgataaacaccagacaaaaaagtattctctatagatacacaccgag

SEQ ID NO: 429246 - DNA, 1632 bp, Homo sapiens
tattattgcaaccatttcgcttgtatttgagtgtgaagcgcctagaaaaccacaggacccctacggcgagccgggaatttttagatattttcctccgagtcaacgctcagtgaaatcagttcaatcagtggcccgacaccgtgcggctgacacagcttatcccccgaccctgagatcaggggtccccggagcccaaggtcgcttccaaagctcagcgaggcggaggtgcggcccgggctggtctggttcggccaccgttgttatggcaaccgccaataggttggcttcatctctaactgaaagtctgcacaggagcggccgatcgaagggccccgaggtgggcagcacaggctcctcgacgacttcctaggtcgcaatctccaggaaaacgaccacagggtcagcggagctagccgccgagccccgctccccgggcccttccggcggctgcgccctttcaccccggacgtgggcgggagaggaagcggctggtgatgctggaacaaacatggccgctctggcgcccgtcggctcccccgcctcccgcggtcctaggctggccgcgggcctccggctgctcccaatgctgggtttgctgcagttgctggccgagcctggcctgggccgcgtccatcacctggcactcaaggatgatgtgaggcataaagttcatctgaacacctttggcttcttcaaggatgggtacatggtggtgaatgtcagtagcctctcactgaatgagcctgaagacaaggatgtgactattggatttagcctagaccgtacaaagaatgatggcttttcttcttacctggatgaagatgtgaattactgtattttaaagaaacagtctgtctctgtcacccttttaatcctagacatctccagaagtgaggtaagagtaaagtctccaccagaagctggtacccagttaccaaagatcatcttcagcagggatgagaaagtccttggtcagagccaggagcctaatgttaaccctgcttcagcaggcaaccagacccagaagacacaagatggtggaaagtctaaaagaagtacagtggattcaaaggccatgggagagaaatccttttctgttcataataatggtggggcagtgtcatttcagtttttctttaacatcagcactgatgaccaagaaggcctttacagtctttattttcataaatgccttggaaaagaattgccaagtgacaagtttacattcagccttgatattgagatcacagagaagaatcctgacagctacctctcagcaggagaaattcctctccccaaattatacatctcaatggcctttttcttctttctttctgggaccatctggattcatatccttcgaaaacgacggaatgatgtatttaaaatccactggctgatggcggcccttcctttcaccaagtctctttccttggtgttccatgcaattgactaccactacatctcctcccagggcttccctatcgaaggctgggctgttgtgtactacataactcaccttttgaaaggggcgctactcttcatcaccattgcactcattggcactggctgggctttcattaagcacatcctttctgataaagacaaaaaaatacaaatgttgcgcggagg

SEQ ID NO: 429247 - DNA, 628 bp, Homo sapiens
cttctatgccggtgtcatcctaaaacatactattatgtctttttaggccatgggagagaaatccttttctgttcataataatggtggggcagtgtcatttcaggtatgtatgctctttgtgtaaagcctcctagaatttctctctaccatgtaaaagggtaatttttttttagaggaattttgaatttaggaataacaacttaggtatgccctgtatcagtcacttaaatgcagtagctctccttataacaagcccacaaggtggatattgttacccatctacttatcaaatcagaagtctctgagagtgaataactttgtgactatctagtgtaggtgacacggtacagtttccaacccagtcctgcctggctgttcccatgacccctttgccccaatcccatgctacctcccattcaaagtgtgccagaagcatagtaccccattctgaaaggaccattgatgatgatttacggtgatgttgtaattttagagatgatttcacctagactcagaggctttgagtgacctgcttagctgtcagagttattaattgcccatgagtgtttaggggcagcataatagcatacgtatgggaacaagatactggactgggcctcagaaccca

SEQ ID NO: 429248 - DNA, 499 bp, Homo sapiens
accccagcgaggcggagccggcgcccggaggagcaagaggaggaggaggaggagaggtcggagccgtctccaggagcccttagagaccgagtcccggcggcgacggcggggcagcgcaccggcaggcggattcattccacttaaaacctgaaaacattggaccacacaaagtcttactggtaagttcttcatttcttaaacaaagtgactgtttgactttatttttgagatgatattcacacttctaagttagatgcttccctaccagtgctatgatgagatgtctatttatttgtacttttctttaatctctataatttatgatgtttccatgccttaaaaaaacagagcaacccatgttcctttgtaagaccatgggcaggataaagatccatgattacatgccaaatactactaaaataaaaacttttttgggtaatgaaactatttccaggcccctgttgatgggagtatccaaaacaacagagtgttatttcag

SEQ ID NO: 429249 - DNA, 303 bp, Homo sapiens
  misc_feature (98)..(98): n is a, c, g, or t
  misc_feature (114)..(114): n is a, c, g, or t
  misc_feature (193)..(193): n is a, c, g, or t
  misc_feature (208)..(208): n is a, c, g, or t
cagcggcgggaaccactcggtttgctgcgataccatggaaggaggcgggggaagcggcaacaaaaccacagggggattggccggctttttcggagccngggacaggtctactcngcacgcggatttggctggcgtcccgattcattccacttaaaacctgaaaacattggaccacacaaagtcttactgatgntccagaccaacttcnttgacatggagaacatgtttgacttgctgaaaaagggagacagaagtgaaggaccttcctggagcagggcccttccgctttcagaagggccgtat

SEQ ID NO: 429250 - DNA, 4335 bp, Homo sapiens
accccagcgaggcggagccggcgcccggaggagcaagaggaggaggaggaggagaggtcggagccgtctccaggagcccttagagaccgagtcccggcggcgacggcggggcagcgcaccggcaggcggattcattccacttaaaacctgaaaacattggaccacacaaagtcttactgatttcaggtaaaaacaataattgaagatgtccagcaaaacagcaagcaccaacaatatagcccaggcaaggagaactgtgcagcagttaagattagaagcctccattgaaagaataaaggtttcgaaggcatcagcggacctcatgtcctactgtgaggaacatgccaggagtgaccctttgctgataggaataccaacttcagaaaaccctttcaaggataaaaaaacttgcatcatcttatagtggaatagagaaacagctcctcgcctcttcccaacaacgcaaattatgagcagctccttgaagagatttaccttcagcttatttggtaaccactgctaataactaaaatgttctcagcttggaataatggactctgaagtctctattttccaagttgtcctttctcttaaaataccctttactgatttaatacagaataacaatcttattttccacttggtaactatggctttatgttgggttactgtttaaggaaagttgatctgggcctttttaaaaacataattatatactttagaaatacaagggattccgatatgtcaggacctaaatggcctaagcacctgtcaaattaaaattccaaaattcattgaaatcctaaagccttgatattatattctttataaggcgtgtgccagcctgtatagtatataagagagaggggtgtttgtgtgtatatatatatgcctttgtgtatacacttatcaaagctattttcttatgaaaacgtccctctctccataccatcagtttctcagttccagaagttatacctttattttgagctgtgtataggtagaataaaaaattcctttcatatcgttattgtacaaaaagtaaagagtatcctaaagattgtattcattgtaatcaagtaatgcaatcatctctcctctcttgaaatcttgctggacctcttaggctacaataaactgtaccaaactaaactgacagtccttcgataatatgaaacattaatttacaaggacccgttagggcttcaatgatgctgagtctggaaaaggggaggagacccttgggaggactccaggcagctgtgctcccagggctcatgttctctactggattagggatagtcacctctgaaatctccaccctgatgattggaatgaaacggagtgaacatgagcccagctgagagaggagcaggaatgtgtgaaaaacagctgctctccttgtcccagctttgtgattgagccctctgtcttgctctctctgccttccctgtgtctttcttctcttaccagagcatctgtttgcagaggtaacattaccttccccagccacaggtatgtggaatacggtgaggaaaaaaaaaattaaaaaaaaaatgcaagctgtcaggatgcttaagctcttttcagacatctgcagtttcatccctaccttgttcacataccatccaagaggcacataggctacccaagagagccttggattcagtggtacactccttgggcccaagggctttagcagctggatatggggttccttgattttcctctgggcccaaatatagccctcacactcttggaatttccaggtatgggggtagccccaaaaggaggaatctcctatggccaataaggtatcttgactttatcaaagtagaagagagggtcacttcggagtcaaatcatacactaggcctttgatgctttaattcttcttcagttcattaaaagtaactactaaggaaaggttaaaaacttcccctcaaaaaggaatcaaccccaggaagtaattatttacaacgattttcccaaattttgtacaatctgtcctggaaagcaaaccccttttaaaatctaatgtctgggctttgagtattagctcatttagggtggacaaatgcattactgttttcaaactgctcacatttattcagtatttctccaagttgctatctactcagccttatgaatgcccctcgcttttctaaggccatgtgaaaatcacggcactgcccttagccttgtgtcatctgctttttcgttctgcgatatgcccagttcccaaatcaattataggtacctgtttaggagagaggaagattttacctctcaaagggtgagatttgaaatttacactaaaaagacaactttacatttaatgcttcacttaatgagacattcttttttttataagtctatttttctactcagtttcagaacactaatctgattttcactctgatttttaacgtttctttaaatatttataatgtagcttctttcaaaatattttcatgaaaaattacttttattataccattatgtgcatgttattggtagcaggcatagtttattatttagtactgaaacatgctcttttacctaacagtaaacaagtatgttttgatatatatctgttaatatgcttatagtggtaagaaatggacttgaggtcccaggagatttcattttattcaccctggtcagatacaataaaggctatgagtataaatacataacttcctaaccaggtgtagggcatgttcatgaatatcaaatcttttgatgctggacccaagagaggaaaagttgtagctaaatgttgatttacttataactagacgtctatgtgagaaaatatatgtatacatatatatgatatgcagaagtcactttttttatcaggctttattctccttacaaagccacagtttaactgtctgcaacagttggtttatgttaatgatagacaaatacccagtgtttgttactttttccaactaccactgtaatgataatctttctcacgtatatacatgcaacttcttggcttcatttccatgaagctgtttcaatatattcagtatactttgtccttaatgctgcttctgttaacagtgatctctttctttttttcattcttatatcttcattagttcatcataaatctgtccagttgaggcctcaggaccacggcatgatttcatgactccgaagtattttacagaaacattttttaaataagggaaatattttatataccagatggttcacaagtgatggctcatagctagtttttttttttcttctaaaaaatgtcaggtttttaaaatcatttaccttattaaaatgaaaagtgccatacttaacttttaaaggaaagacctgacttgctttttctctatttagactgtttttgtactttactaatctttaaactatcaggaaaaaaaccaaaactttataccaatgatttagtaattttgaggcatagggtagcttacgtagtggaggatgtgccaaatattctcttcaaatgccaccttctcaatttataactaaaatagtgttatctgactaattcctctgaattttgatgtaagatctatataggcccccaaaatgatcgtagtacatgccagtcatttctcagtgaaataaatacaataccagagtacattatgggttttattgctttcttttatggtagacctgttaatggggaaaaaatacatcaaatcaaatagaatcttatatctgtatgttaaaatagagcacttacctgaagtcagtggcctggatcatagccctggatcatttcccagtctgtcctgtgctgtgtgaccttggacaaggcgcttcatctctctgggcctctatttctccatttgtaaaacaagtggctgcagtagatgatggctgagagcccttcctgttcccagatgccttggtccaaagaccccacccctctgctggtcctgccaacgtgttggtgctataagctgcttcagatataaaattggtttatctataatgtttgttcatttaatagcttctaaaaggcctttttgttatacagtgctttttttctagttttatggacttggttactgtaataatgtcttgtttttagccatgtaactacaaacagatattctcttgatgtcttagtaaatttgcatttgatatatcattgatgagattttgttgttatgtaatattctttggctacgcatctgtccagcatcttattaaccataatactgtgatcattatttggaaatatgtcctatggaaagaataaaagcatgtacttcacagctagcatgttcacagatttgaaagaagtttcattaaaagcaccattgctttctg

SEQ ID NO: 429251 - DNA, 4370 bp, Homo sapiens
tgtttttaaaagtgctagtcaccagactgcacccttgccagcgcttcgcagctctcgaagtaaattatcgcaggatggcggccctcacctaggagaaccaggaaggcaggcagcgctagaacgacgggattgaattttactattgccaaaacaatcacattcaaattcattccacttaaaacctgaaaacattggaccacacaaagtcttactgatttcaggtaaaaacaataattgaagatgtccagcaaaacagcaagcaccaacaatatagcccaggcaaggagaactgtgcagcagttaagattagaagcctccattgaaagaataaaggtttcgaaggcatcagcggacctcatgtcctactgtgaggaacatgccaggagtgaccctttgctgataggaataccaacttcagaaaaccctttcaaggataaaaaaacttgcatcatcttatagtggaatagagaaacagctcctcgcctcttcccaacaacgcaaattatgagcagctccttgaagagatttaccttcagcttatttggtaaccactgctaataactaaaatgttctcagcttggaataatggactctgaagtctctattttccaagttgtcctttctcttaaaataccctttactgatttaatacagaataacaatcttattttccacttggtaactatggctttatgttgggttactgtttaaggaaagttgatctgggcctttttaaaaacataattatatactttagaaatacaagggattccgatatgtcaggacctaaatggcctaagcacctgtcaaattaaaattccaaaattcattgaaatcctaaagccttgatattatattctttataaggcgtgtgccagcctgtatagtatataagagagaggggtgtttgtgtgtatatatatatgcctttgtgtatacacttatcaaagctattttcttatgaaaacgtccctctctccataccatcagtttctcagttccagaagttatacctttattttgagctgtgtataggtagaataaaaaattcctttcatatcgttattgtacaaaaagtaaagagtatcctaaagattgtattcattgtaatcaagtaatgcaatcatctctcctctcttgaaatcttgctggacctcttaggctacaataaactgtaccaaactaaactgacagtccttcgataatatgaaacattaatttacaaggacccgttagggcttcaatgatgctgagtctggaaaaggggaggagacccttgggaggactccaggcagctgtgctcccagggctcatgttctctactggattagggatagtcacctctgaaatctccaccctgatgattggaatgaaacggagtgaacatgagcccagctgagagaggagcaggaatgtgtgaaaaacagctgctctccttgtcccagctttgtgattgagccctctgtcttgctctctctgccttccctgtgtctttcttctcttaccagagcatctgtttgcagaggtaacattaccttccccagccacaggtatgtggaatacggtgaggaaaaaaaaaattaaaaaaaaaatgcaagctgtcaggatgcttaagctcttttcagacatctgcagtttcatccctaccttgttcacataccatccaagaggcacataggctacccaagagagccttggattcagtggtacactccttgggcccaagggctttagcagctggatatggggttccttgattttcctctgggcccaaatatagccctcacactcttggaatttccaggtatgggggtagccccaaaaggaggaatctcctatggccaataaggtatcttgactttatcaaagtagaagagagggtcacttcggagtcaaatcatacactaggcctttgatgctttaattcttcttcagttcattaaaagtaactactaaggaaaggttaaaaacttcccctcaaaaaggaatcaaccccaggaagtaattatttacaacgattttcccaaattttgtacaatctgtcctggaaagcaaaccccttttaaaatctaatgtctgggctttgagtattagctcatttagggtggacaaatgcattactgttttcaaactgctcacatttattcagtatttctccaagttgctatctactcagccttatgaatgcccctcgcttttctaaggccatgtgaaaatcacggcactgcccttagccttgtgtcatctgctttttcgttctgcgatatgcccagttcccaaatcaattataggtacctgtttaggagagaggaagattttacctctcaaagggtgagatttgaaatttacactaaaaagacaactttacatttaatgcttcacttaatgagacattcttttttttataagtctatttttctactcagtttcagaacactaatctgattttcactctgatttttaacgtttctttaaatatttataatgtagcttctttcaaaatattttcatgaaaaattacttttattataccattatgtgcatgttattggtagcaggcatagtttattatttagtactgaaacatgctcttttacctaacagtaaacaagtatgttttgatatatatctgttaatatgcttatagtggtaagaaatggacttgaggtcccaggagatttcattttattcaccctggtcagatacaataaaggctatgagtataaatacataacttcctaaccaggtgtagggcatgttcatgaatatcaaatcttttgatgctggacccaagagaggaaaagttgtagctaaatgttgatttacttataactagacgtctatgtgagaaaatatatgtatacatatatatgatatgcagaagtcactttttttatcaggctttattctccttacaaagccacagtttaactgtctgcaacagttggtttatgttaatgatagacaaatacccagtgtttgttactttttccaactaccactgtaatgataatctttctcacgtatatacatgcaacttcttggcttcatttccatgaagctgtttcaatatattcagtatactttgtccttaatgctgcttctgttaacagtgatctctttctttttttcattcttatatcttcattagttcatcataaatctgtccagttgaggcctcaggaccacggcatgatttcatgactccgaagtattttacagaaacattttttaaataagggaaatattttatataccagatggttcacaagtgatggctcatagctagtttttttttttcttctaaaaaatgtcaggtttttaaaatcatttaccttattaaaatgaaaagtgccatacttaacttttaaaggaaagacctgacttgctttttctctatttagactgtttttgtactttactaatctttaaactatcaggaaaaaaaccaaaactttataccaatgatttagtaattttgaggcatagggtagcttacgtagtggaggatgtgccaaatattctcttcaaatgccaccttctcaatttataactaaaatagtgttatctgactaattcctctgaattttgatgtaagatctatataggcccccaaaatgatcgtagtacatgccagtcatttctcagtgaaataaatacaataccagagtacattatgggttttattgctttcttttatggtagacctgttaatggggaaaaaatacatcaaatcaaatagaatcttatatctgtatgttaaaatagagcacttacctgaagtcagtggcctggatcatagccctggatcatttcccagtctgtcctgtgctgtgtgaccttggacaaggcgcttcatctctctgggcctctatttctccatttgtaaaacaagtggctgcagtagatgatggctgagagcccttcctgttcccagatgccttggtccaaagaccccacccctctgctggtcctgccaacgtgttggtgctataagctgcttcagatataaaattggtttatctataatgtttgttcatttaatagcttctaaaaggcctttttgttatacagtgctttttttctagttttatggacttggttactgtaataatgtcttgtttttagccatgtaactacaaacagatattctcttgatgtcttagtaaatttgcatttgatatatcattgatgagattttgttgttatgtaatattctttggctacgcatctgtccagcatcttattaaccataatactgtgatcattatttggaaatatgtcctatggaaagaataaaagcatgtacttcacagctagcatgttcacagatttgaaagaagtttcattaaaagcaccattgctttctg

SEQ ID NO: 429252 - DNA, 4400 bp, Homo sapiens
tgtttttaaaagtgctagtcaccagactgcacccttgccagcgcttcgcagctctcgaagtaaattatcgcaggatggcggccctcacctaggagaaccaggaaggcaggcagcgctagaacgacgggattgaattttactattgccaaaacaatcacattcaaattcattccacttaaaacctgaaaacattggaccacacaaagtcttactggccttgcctcattttattgttaagatttagatttcaggtaaaaacaataattgaagatgtccagcaaaacagcaagcaccaacaatatagcccaggcaaggagaactgtgcagcagttaagattagaagcctccattgaaagaataaaggtttcgaaggcatcagcggacctcatgtcctactgtgaggaacatgccaggagtgaccctttgctgataggaataccaacttcagaaaaccctttcaaggataaaaaaacttgcatcatcttatagtggaatagagaaacagctcctcgcctcttcccaacaacgcaaattatgagcagctccttgaagagatttaccttcagcttatttggtaaccactgctaataactaaaatgttctcagcttggaataatggactctgaagtctctattttccaagttgtcctttctcttaaaataccctttactgatttaatacagaataacaatcttattttccacttggtaactatggctttatgttgggttactgtttaaggaaagttgatctgggcctttttaaaaacataattatatactttagaaatacaagggattccgatatgtcaggacctaaatggcctaagcacctgtcaaattaaaattccaaaattcattgaaatcctaaagccttgatattatattctttataaggcgtgtgccagcctgtatagtatataagagagaggggtgtttgtgtgtatatatatatgcctttgtgtatacacttatcaaagctattttcttatgaaaacgtccctctctccataccatcagtttctcagttccagaagttatacctttattttgagctgtgtataggtagaataaaaaattcctttcatatcgttattgtacaaaaagtaaagagtatcctaaagattgtattcattgtaatcaagtaatgcaatcatctctcctctcttgaaatcttgctggacctcttaggctacaataaactgtaccaaactaaactgacagtccttcgataatatgaaacattaatttacaaggacccgttagggcttcaatgatgctgagtctggaaaaggggaggagacccttgggaggactccaggcagctgtgctcccagggctcatgttctctactggattagggatagtcacctctgaaatctccaccctgatgattggaatgaaacggagtgaacatgagcccagctgagagaggagcaggaatgtgtgaaaaacagctgctctccttgtcccagctttgtgattgagccctctgtcttgctctctctgccttccctgtgtctttcttctcttaccagagcatctgtttgcagaggtaacattaccttccccagccacaggtatgtggaatacggtgaggaaaaaaaaaattaaaaaaaaaatgcaagctgtcaggatgcttaagctcttttcagacatctgcagtttcatccctaccttgttcacataccatccaagaggcacataggctacccaagagagccttggattcagtggtacactccttgggcccaagggctttagcagctggatatggggttccttgattttcctctgggcccaaatatagccctcacactcttggaatttccaggtatgggggtagccccaaaaggaggaatctcctatggccaataaggtatcttgactttatcaaagtagaagagagggtcacttcggagtcaaatcatacactaggcctttgatgctttaattcttcttcagttcattaaaagtaactactaaggaaaggttaaaaacttcccctcaaaaaggaatcaaccccaggaagtaattatttacaacgattttcccaaattttgtacaatctgtcctggaaagcaaaccccttttaaaatctaatgtctgggctttgagtattagctcatttagggtggacaaatgcattactgttttcaaactgctcacatttattcagtatttctccaagttgctatctactcagccttatgaatgcccctcgcttttctaaggccatgtgaaaatcacggcactgcccttagccttgtgtcatctgctttttcgttctgcgatatgcccagttcccaaatcaattataggtacctgtttaggagagaggaagattttacctctcaaagggtgagatttgaaatttacactaaaaagacaactttacatttaatgcttcacttaatgagacattcttttttttataagtctatttttctactcagtttcagaacactaatctgattttcactctgatttttaacgtttctttaaatatttataatgtagcttctttcaaaatattttcatgaaaaattacttttattataccattatgtgcatgttattggtagcaggcatagtttattatttagtactgaaacatgctcttttacctaacagtaaacaagtatgttttgatatatatctgttaatatgcttatagtggtaagaaatggacttgaggtcccaggagatttcattttattcaccctggtcagatacaataaaggctatgagtataaatacataacttcctaaccaggtgtagggcatgttcatgaatatcaaatcttttgatgctggacccaagagaggaaaagttgtagctaaatgttgatttacttataactagacgtctatgtgagaaaatatatgtatacatatatatgatatgcagaagtcactttttttatcaggctttattctccttacaaagccacagtttaactgtctgcaacagttggtttatgttaatgatagacaaatacccagtgtttgttactttttccaactaccactgtaatgataatctttctcacgtatatacatgcaacttcttggcttcatttccatgaagctgtttcaatatattcagtatactttgtccttaatgctgcttctgttaacagtgatctctttctttttttcattcttatatcttcattagttcatcataaatctgtccagttgaggcctcaggaccacggcatgatttcatgactccgaagtattttacagaaacattttttaaataagggaaatattttatataccagatggttcacaagtgatggctcatagctagtttttttttttcttctaaaaaatgtcaggtttttaaaatcatttaccttattaaaatgaaaagtgccatacttaacttttaaaggaaagacctgacttgctttttctctatttagactgtttttgtactttactaatctttaaactatcaggaaaaaaaccaaaactttataccaatgatttagtaattttgaggcatagggtagcttacgtagtggaggatgtgccaaatattctcttcaaatgccaccttctcaatttataactaaaatagtgttatctgactaattcctctgaattttgatgtaagatctatataggcccccaaaatgatcgtagtacatgccagtcatttctcagtgaaataaatacaataccagagtacattatgggttttattgctttcttttatggtagacctgttaatggggaaaaaatacatcaaatcaaatagaatcttatatctgtatgttaaaatagagcacttacctgaagtcagtggcctggatcatagccctggatcatttcccagtctgtcctgtgctgtgtgaccttggacaaggcgcttcatctctctgggcctctatttctccatttgtaaaacaagtggctgcagtagatgatggctgagagcccttcctgttcccagatgccttggtccaaagaccccacccctctgctggtcctgccaacgtgttggtgctataagctgcttcagatataaaattggtttatctataatgtttgttcatttaatagcttctaaaaggcctttttgttatacagtgctttttttctagttttatggacttggttactgtaataatgtcttgtttttagccatgtaactacaaacagatattctcttgatgtcttagtaaatttgcatttgatatatcattgatgagattttgttgttatgtaatattctttggctacgcatctgtccagcatcttattaaccataatactgtgatcattatttggaaatatgtcctatggaaagaataaaagcatgtacttcacagctagcatgttcacagatttgaaagaagtttcattaaaagcaccattgctttctg

SEQ ID NO: 429253 - DNA, 4288 bp, Homo sapiens
caggcgagagatgctgctagtttgcccagatgggagcagaggagatgccaacgcatgattggattctggaggtattttgaagattcattccacttaaaacctgaaaacattggaccacacaaagtcttactgatttcaggtaaaaacaataattgaagatgtccagcaaaacagcaagcaccaacaatatagcccaggcaaggagaactgtgcagcagttaagattagaagcctccattgaaagaataaaggtttcgaaggcatcagcggacctcatgtcctactgtgaggaacatgccaggagtgaccctttgctgataggaataccaacttcagaaaaccctttcaaggataaaaaaacttgcatcatcttatagtggaatagagaaacagctcctcgcctcttcccaacaacgcaaattatgagcagctccttgaagagatttaccttcagcttatttggtaaccactgctaataactaaaatgttctcagcttggaataatggactctgaagtctctattttccaagttgtcctttctcttaaaataccctttactgatttaatacagaataacaatcttattttccacttggtaactatggctttatgttgggttactgtttaaggaaagttgatctgggcctttttaaaaacataattatatactttagaaatacaagggattccgatatgtcaggacctaaatggcctaagcacctgtcaaattaaaattccaaaattcattgaaatcctaaagccttgatattatattctttataaggcgtgtgccagcctgtatagtatataagagagaggggtgtttgtgtgtatatatatatgcctttgtgtatacacttatcaaagctattttcttatgaaaacgtccctctctccataccatcagtttctcagttccagaagttatacctttattttgagctgtgtataggtagaataaaaaattcctttcatatcgttattgtacaaaaagtaaagagtatcctaaagattgtattcattgtaatcaagtaatgcaatcatctctcctctcttgaaatcttgctggacctcttaggctacaataaactgtaccaaactaaactgacagtccttcgataatatgaaacattaatttacaaggacccgttagggcttcaatgatgctgagtctggaaaaggggaggagacccttgggaggactccaggcagctgtgctcccagggctcatgttctctactggattagggatagtcacctctgaaatctccaccctgatgattggaatgaaacggagtgaacatgagcccagctgagagaggagcaggaatgtgtgaaaaacagctgctctccttgtcccagctttgtgattgagccctctgtcttgctctctctgccttccctgtgtctttcttctcttaccagagcatctgtttgcagaggtaacattaccttccccagccacaggtatgtggaatacggtgaggaaaaaaaaaattaaaaaaaaaatgcaagctgtcaggatgcttaagctcttttcagacatctgcagtttcatccctaccttgttcacataccatccaagaggcacataggctacccaagagagccttggattcagtggtacactccttgggcccaagggctttagcagctggatatggggttccttgattttcctctgggcccaaatatagccctcacactcttggaatttccaggtatgggggtagccccaaaaggaggaatctcctatggccaataaggtatcttgactttatcaaagtagaagagagggtcacttcggagtcaaatcatacactaggcctttgatgctttaattcttcttcagttcattaaaagtaactactaaggaaaggttaaaaacttcccctcaaaaaggaatcaaccccaggaagtaattatttacaacgattttcccaaattttgtacaatctgtcctggaaagcaaaccccttttaaaatctaatgtctgggctttgagtattagctcatttagggtggacaaatgcattactgttttcaaactgctcacatttattcagtatttctccaagttgctatctactcagccttatgaatgcccctcgcttttctaaggccatgtgaaaatcacggcactgcccttagccttgtgtcatctgctttttcgttctgcgatatgcccagttcccaaatcaattataggtacctgtttaggagagaggaagattttacctctcaaagggtgagatttgaaatttacactaaaaagacaactttacatttaatgcttcacttaatgagacattcttttttttataagtctatttttctactcagtttcagaacactaatctgattttcactctgatttttaacgtttctttaaatatttataatgtagcttctttcaaaatattttcatgaaaaattacttttattataccattatgtgcatgttattggtagcaggcatagtttattatttagtactgaaacatgctcttttacctaacagtaaacaagtatgttttgatatatatctgttaatatgcttatagtggtaagaaatggacttgaggtcccaggagatttcattttattcaccctggtcagatacaataaaggctatgagtataaatacataacttcctaaccaggtgtagggcatgttcatgaatatcaaatcttttgatgctggacccaagagaggaaaagttgtagctaaatgttgatttacttataactagacgtctatgtgagaaaatatatgtatacatatatatgatatgcagaagtcactttttttatcaggctttattctccttacaaagccacagtttaactgtctgcaacagttggtttatgttaatgatagacaaatacccagtgtttgttactttttccaactaccactgtaatgataatctttctcacgtatatacatgcaacttcttggcttcatttccatgaagctgtttcaatatattcagtatactttgtccttaatgctgcttctgttaacagtgatctctttctttttttcattcttatatcttcattagttcatcataaatctgtccagttgaggcctcaggaccacggcatgatttcatgactccgaagtattttacagaaacattttttaaataagggaaatattttatataccagatggttcacaagtgatggctcatagctagtttttttttttcttctaaaaaatgtcaggtttttaaaatcatttaccttattaaaatgaaaagtgccatacttaacttttaaaggaaagacctgacttgctttttctctatttagactgtttttgtactttactaatctttaaactatcaggaaaaaaaccaaaactttataccaatgatttagtaattttgaggcatagggtagcttacgtagtggaggatgtgccaaatattctcttcaaatgccaccttctcaatttataactaaaatagtgttatctgactaattcctctgaattttgatgtaagatctatataggcccccaaaatgatcgtagtacatgccagtcatttctcagtgaaataaatacaataccagagtacattatgggttttattgctttcttttatggtagacctgttaatggggaaaaaatacatcaaatcaaatagaatcttatatctgtatgttaaaatagagcacttacctgaagtcagtggcctggatcatagccctggatcatttcccagtctgtcctgtgctgtgtgaccttggacaaggcgcttcatctctctgggcctctatttctccatttgtaaaacaagtggctgcagtagatgatggctgagagcccttcctgttcccagatgccttggtccaaagaccccacccctctgctggtcctgccaacgtgttggtgctataagctgcttcagatataaaattggtttatctataatgtttgttcatttaatagcttctaaaaggcctttttgttatacagtgctttttttctagttttatggacttggttactgtaataatgtcttgtttttagccatgtaactacaaacagatattctcttgatgtcttagtaaatttgcatttgatatatcattgatgagattttgttgttatgtaatattctttggctacgcatctgtccagcatcttattaaccataatactgtgatcattatttggaaatatgtcctatggaaagaataaaagcatgtacttcacagctagcatgttcacagatttgaaagaagtttcattaaaagcaccattgctttctg

SEQ ID NO: 429254 - DNA, 3422 bp, Homo sapiens
ccgcctactactactactaaatcgcggccgcgtcgacatcagtttctcagttccagaagttatacctttattttgagctgtgtataggtagaataaaaaattcctttcatatcgttattgtacaaaaagtaaagagtatcctaaagattgtattcattgtaatcaagtaatgcaatcatctctcctctcttgaaatcttgctggacctcttaggctacaataaactgtaccaaactaaactgacagtccttcgataatatgaaacattaatttacaaggacccgttagggcttcaatgatgctgagtctggaaaaggggaggagacccttgggaggactccaggcagctgtgctcccagggctcatgttctctactggattagggatagtcacctctgaaatctccaccctgatgattggaatgaaacggagtgaacatgagcccagctgagagaggagcaggaatgtgtgaaaaacagctgctctccttgtcccagctttgtgattgagccctctgtcttgctctctctgccttccctgtgtctttcttctcttaccagagcatctgtttgcagaggtaacattaccttccccagccacaggtatgtggaatacggtgaggaaaaaaaaaattaaaaaaaaaatgcaagctgtcaggatgcttaagctcttttcagacatctgcagtttcatccctaccttgttcacataccatccaagaggcacataggctacccaagagagccttggattcagtggtacactccttgggcccaagggctttagcagctggatatggggttccttgattttcctctgggcccaaatatagccctcacactcttggaatttccaggtatgggggtagccccaaaaggaggaatctcctatggccaataaggtatcttgactttatcaaagtagaagagagggtcacttcggagtcaaatcatacactaggcctttgatgctttaattcttcttcagttcattaaaagtaactactaaggaaaggttaaaaacttcccctcaaaaaggaatcaaccccaggaagtaattatttacaacgattttcccaaattttgtacaatctgtcctggaaagcaaaccccttttaaaatctaatgtctgggctttgagtattagctcatttagggtggacaaatgcattactgttttcaaactgctcacatttattcagtatttctccaagttgctatctactcagccttatgaatgcccctcgcttttctaaggccatgtgaaaatcacggcactgcccttagccttgtgtcatctgctttttcgttctgcgatatgcccagttcccaaatcaattataggtacctgtttaggagagaggaagattttacctctcaaagggtgagatttgaaatttacactaaaaagacaactttacatttaatgcttcacttaatgagacattcttttttttataagtctatttttctactcagtttcagaacactaatctgattttcactctgatttttaacgtttctttaaatatttataatgtagcttctttcaaaatattttcatgaaaaattacttttattataccattatgtgcatgttattggtagcaggcatagtttattatttagtactgaaacatgctcttttacctaacagtaaacaagtatgttttgatatatatctgttaatatgcttatagtggtaagaaatggacttgaggtcccaggagatttcattttattcaccctggtcagatacaataaaggctatgagtataaatacataacttcctaaccaggtgtagggcatgttcatgaatatcaaatcttttgatgctggacccaagagaggaaaagttgtagctaaatgttgatttacttataactagacgtctatgtgagaaaatatatgtatacatatatatgatatgcagaagtcactttttttatcaggctttattctccttacaaagccacagtttaactgtctgcaacagttggtttatgttaatgatagacaaatacccagtgtttgttactttttccaactaccactgtaatgataatctttctcacgtatatacatgcaacttcttggcttcatttccatgaagctgtttcaatatattcagtatactttgtccttaatgctgcttctgttaacagtgatctctttctttttttcattcttatatcttcattagttcatcataaatctgtccagttgaggcctcaggaccacggcatgatttcatgactccgaagtattttacagaaacattttttaaataagggaaatattttatataccagatggttcacaagtgatggctcatagctagtttttttttttcttctaaaaaatgtcaggtttttaaaatcatttaccttattaaaatgaaaagtgccatacttaacttttaaaggaaagacctgacttgctttttctctatttagactgtttttgtactttactaatctttaaactatcaggaaaaaaaccaaaactttataccaatgatttagtaattttgaggcatagggtagcttacgtagtggaggatgtgccaaatattctcttcaaatgccaccttctcaatttataactaaaatagtgttatctgactaattcctctgaattttgatgtaagatctatataggcccccaaaatgatcgtagtacatgccagtcatttctcagtgaaataaatacaataccagagtacattatgggttttattgctttcttttatggtagacctgttaatggggaaaaaatacatcaaatcaaatagaatcttatatctgtatgttaaaatagagcacttacctgaagtcagtggcctggatcatagccctggatcatttcccagtctgtcctgtgctgtgtgaccttggacaaggcgcttcatctctctgggcctctatttctccatttgtaaaacaagtggctgcagtagatgatggctgagagcccttcctgttcccagatgccttggtccaaagaccccacccctctgctggtcctgccaacgtgttggtgctataagctgcttcagatataaaattggtttatctataatgtttgttcatttaatagcttctaaaaggcctttttgttatacagtgctttttttctagttttatggacttggttactgtaataatgtcttgtttttagccatgtaactacaaacagatattctcttgatgtcttagtaaatttgcatttgatatatcattgatgagattttgttgttatgtaatattctttggctacgcatctgtccagcatcttattaaccataatactgtgatcattatttggaaatatgtcctatggaaagaataaaagcatgtacttcacagctagcatgttcacagatttgaaagaagtttcattaaaagcaccattgctttctg

SEQ ID NO: 429255 - DNA, 4412 bp, Homo sapiens
accccagcgaggcggagccggcgcccggaggagcaagaggaggaggaggaggagaggtcggagccgtctccaggagcccttagagaccgagtcccggcggcgacggcggggcagcgcaccggcaggcggattcattccacttaaaacctgaaaacattggaccacacaaagtcttactgatttcaggtaaaaacaataattgaagatgtccagcaaaacagcaagcaccaacaatatagcccaggcaaggagaactgtgcagcagttaagattagaagcctccattgaaagaataaaggtttcgaaggcatcagcggacctcatgtcctactgtgaggaacatgccaggagtgaccctttgctgataggaataccaacttcagaaaaccctttcaaggataaaaaaacttgcatcatcttatagtggaatagagaaacagctcctcgcctcttcccaacaacgcaaattatgagcagctccttgaagagatttaccttcagcttatttggtaaccactgctaataactaaaatgttctcagcttggaataatggactctgaagtctctattttccaagttgtcctttctcttaaaataccctttactgatttaatacagaataacaatcttattttccacttggtaactatggctttatgttgggttactgtttaaggaaagttgatctgggcctttttaaaaacataattatatactttagaaatacaagggattccgatatgtcaggacctaaatggcctaagcacctgtcaaattaaaattccaaaattcattgaaatcctaaagccttgatattatattctttataaggcgtgtgccagcctgtatagtatataagagagaggggtgtttgtgtgtatatatatatgcctttgtgtatacacttatcaaagctattttcttatgaaaacgtccctctctccataccatcagtttctcagttccagaagttatacctttattttgagctgtgtataggtagaataaaaaattcctttcatatcgttattgtacaaaaagtaaagagtatcctaaagattgtattcattgtaatcaagtaatgcaatcatctctcctctcttgaaatcttgctggacctcttaggctacaataaactgtaccaaactaaactgacagtccttcgataatatgaaacattaatttacaaggacccgttagggcttcaatgatgctgagtctggaaaaggggaggagacccttgggaggactccaggcagctgtgctcccagggctcatgttctctactggattagggatagtcacctctgaaatctccaccctgatgattggaatgaaacggagtgaacatgagcccagctgagagaggagcaggaatgtgtgaaaaacagctgctctccttgtcccagctttgtgattgagccctctgtcttgctctctctgccttccctgtgtctttcttctcttaccagagcatctgtttgcagaggtaacattaccttccccagccacaggtatgtggaatacggtgaggaaaaaaaaaattaaaaaaaaaatgcaagctgtcaggatgcttaagctcttttcagacatctgcagtttcatccctaccttgttcacataccatccaagaggcacataggctacccaagagagccttggattcagtggtacactccttgggcccaagggctttagcagctggatatggggttccttgattttcctctgggcccaaatatagccctcacactcttggaatttccaggtatgggggtagccccaaaaggaggaatctcctatggccaataaggtatcttgactttatcaaagtagaagagagggtcacttcggagtcaaatcatacactaggcctttgatgctttaattcttcttcagttcattaaaagtaactactaaggaaaggttaaaaacttcccctcaaaaaggaatcaaccccaggaagtaattatttacaacgattttcccaaattttgtacaatctgtcctggaaagcaaaccccttttaaaatctaatgtctgggctttgagtattagctcatttagggtggacaaatgcattactgttttcaaactgctcacatttattcagtatttctccaagttgctatctactcagccttatgaatgcccctcgcttttctaaggccatgtgaaaatcacggcactgcccttagccttgtgtcatctgctttttcgttctgcgatatgcccagttcccaaatcaattataggtacctgtttaggagagaggaagattttacctctcaaagggtgagatttgaaatttacactaaaaagacaactttacatttaatgcttcacttaatgagacattcttttttttataagtctatttttctactcagtttcagaacactaatctgattttcactctgatttttaacgtttctttaaatatttataatgtagcttctttcaaaatattttcatgaaaaattacttttattataccattatgtgcatgttattggtagcaggcatagtttattatttagtactgaaacatgctcttttacctaacagtaaacaagtatgttttgatatatatctgttaatatgcttatagtggtaagaaatggacttgaggtcccaggagatttcattttattcaccctggtcagatacaataaaggctatgagtataaatacataacttcctaaccaggtgtagggcatgttcatgaatatcaaatcttttgatgctggacccaagagaggaaaagttgtagctaaatgttgatttacttataactagacgtctatgtgagaaaatatatgtatacatatatatgatatgcagaagtcactttttttatcaggctttattctccttacaaagccacagtttaactgtctgcaacagttggtttatgttaatgatagacaaatacccagtgtttgttactttttccaactaccactgtaatgataatctttctcacgtatatacatgcaacttcttggcttcatttccatgaagctgtttcaatatattcagtatactttgtccttaatgctgcttctgttaacagtgatctctttctttttttcattcttatatcttcattagttcatcataaatctgtccagttgaggcctcaggaccacggcatgatttcatgactccgaagtattttacagaaacattttttaaataagggaaatattttatataccagatggttcacaagtgatggctcatagctagtttttttttttcttctaaaaaatgtcaggtttttaaaatcatttaccttattaaaatgaaaagtgccatacttaacttttaaaggaaagacctgacttgctttttctctatttagactgtttttgtactttactaatctttaaactatcaggaaaaaaaccaaaactttataccaatgatttagtaattttgaggcatagggtagcttacgtagtggaggatgtgccaaatattctcttcaaatgccaccttctcaatttataactaaaatagtgttatctgactaattcctctgaattttgatgtaagatctatataggcccccaaaatgatcgtagtacatgccagtcatttctcagtgaaataaatacaataccagagtacattatgggttttattgctttcttttatggtagacctgttaatggggaaaaaatacatcaaatcaaatagaatcttatatctgtatgttaaaatagagcacttacctgaagtcagtggcctggatcatagccctggatcatttcccagtctgtcctgtgctgtgtgaccttggacaaggcgcttcatctctctgggcctctatttctccatttgtaaaacaagtggctgcagtagatgatggctgagagcccttcctgttcccagatgccttggtccaaagaccccacccctctgctggtcctgccaacgtgttggtgctataagctgcttcagatataaaattggtttatctataatgtttgttcatttaatagcttctaaaaggcctttttgttatacagtgctttttttctagttttatggacttggttactgtaataatgtcttgtttttagccatgtaactacaaacagatattctcttgatgtcttagtaaatttgcatttgatatatcattgatgagattttgttgttatgtaatattctttggctacgcatctgtccagcatcttattaaccataatactgtgatcattatttggaaatatgtcctatggaaagaataaaagcatgtacttcacagctagcatgttcacagatttgaaagaagtttcattaaaagcaccattgctttctgtactgcgtcagtgcctcattgtatcatcctacttgtgttttgctcaataaatgaataaaagaccatttctcttcccc

SEQ ID NO: 429256 - DNA, 1971 bp, Homo sapiens
agctttggctataaccgtaacggcgcgtcgttgcgacagcgcgctatcgatcatctgatttttaacgtttctttaaatatttataatgtagcttctttcaaaatattttcatgaaaaattacttttattataccattatgtgcatgttattggtagcaggcatagtttattatttagtactgaaacatgctcttttacctaacagtaaacaagtatgttttgatatatatctgttaatatgcttatagtggtaagaaatggacttgaggtcccaggagatttcattttattcaccctggtcagatacaataaaggctatgagtataaatacataacttcctaaccaggtgtagggcatgttcatgaatatcaaatcttttgatgctggacccaagagaggaaaagttgtagctaaatgttgatttacttataactagacgtctatgtgagaaaatatatgtatacatatatatgatatgcagaagtcactttttttatcaggctttattctccttacaaagccacagtttaactgtctgcaacagttggtttatgttaatgatagacaaatacccagtgtttgttactttttccaactaccactgtaatgataatctttctcacgtatatacatgcaacttcttggcttcatttccatgaagctgtttcaatatattcagtatactttgtccttaatgctgcttctgttaacagtgatctctttctttttttcattcttatatcttcattagttcatcataaatctgtccagttgaggcctcaggaccacggcatgatttcatgactccgaagtattttacagaaacattttttaaataagggaaatattttatataccagatggttcacaagtgatggctcatagctagtttttttttttcttctaaaaaatgtcaggtttttaaaatcatttaccttattaaaatgaaaagtgccatacttaacttttaaaggaaagacctgacttgctttttctctatttagactgtttttgtactttactaatctttaaactatcaggaaaaaaaccaaaactttataccaatgatttagtaattttgaggcatagggtagcttacgtagtggaggatgtgccaaatattctcttcaaatgccaccttctcaatttataactaaaatagtgttatctgactaattcctctgaattttgatgtaagatctatataggcccccaaaatgatcgtagtacatgccagtcatttctcagtgaaataaatacaataccagagtacattatgggttttattgctttcttttatggtagacctgttaatggggaaaaaatacatcaaatcaaatagaatcttatatctgtatgttaaaatagagcacttacctgaagtcagtggcctggatcatagccctggatcatttcccagtctgtcctgtgctgtgtgaccttggacaaggcgcttcatctctctgggcctctatttctccatttgtaaaacaagtggctgcagtagatgatggctgagagcccttcctgttcccagatgccttggtccaaagaccccacccctctgctggtcctgccaacgtgttggtgctataagctgcttcagatataaaattggtttatctataatgtttgttcatttaatagcttctaaaaggcctttttgttatacagtgctttttttctagttttatggacttggttactgtaataatgtcttgtttttagccatgtaactacaaacagatattctcttgatgtcttagtaaatttgcatttgatatatcattgatgagattttgttgttatgtaatattctttggctacgcatctgtccagcatcttattaaccataatactgtgatcattatttggaaatatgtcctatggaaagaataaaagcatgtacttcacagctagcatgttcacagatttgaaagaagtttcattaaaagcaccattgctttctg

SEQ ID NO: 429257 - DNA, 4416 bp, Homo sapiens
  misc_feature (4338)..(4338): n is a, c, g, or t
  misc_feature (4341)..(4341): n is a, c, g, or t
accccagcgaggcggagccggcgcccggaggagcaagaggaggaggaggaggagaggtcggagccgtctccaggagcccttagagaccgagtcccggcggcgacggcggggcagcgcaccggcaggcggattcattccacttaaaacctgaaaacattggaccacacaaagtcttactgatttcaggtaaaaacaataattgaagatgtccagcaaaacagcaagcaccaacaatatagcccaggcaaggagaactgtgcagcagttaagattagaagcctccattgaaagaataaaggtttcgaaggcatcagcggacctcatgtcctactgtgaggaacatgccaggagtgaccctttgctgataggaataccaacttcagaaaaccctttcaaggataaaaaaacttgcatcatcttatagtggaatagagaaacagctcctcgcctcttcccaacaacgcaaattatgagcagctccttgaagagatttaccttcagcttatttggtaaccactgctaataactaaaatgttctcagcttggaataatggactctgaagtctctattttccaagttgtcctttctcttaaaataccctttactgatttaatacagaataacaatcttattttccacttggtaactatggctttatgttgggttactgtttaaggaaagttgatctgggcctttttaaaaacataattatatactttagaaatacaagggattccgatatgtcaggacctaaatggcctaagcacctgtcaaattaaaattccaaaattcattgaaatcctaaagccttgatattatattctttataaggcgtgtgccagcctgtatagtatataagagagaggggtgtttgtgtgtatatatatatgcctttgtgtatacacttatcaaagctattttcttatgaaaacgtccctctctccataccatcagtttctcagttccagaagttatacctttattttgagctgtgtataggtagaataaaaaattcctttcatatcgttattgtacaaaaagtaaagagtatcctaaagattgtattcattgtaatcaagtaatgcaatcatctctcctctcttgaaatcttgctggacctcttaggctacaataaactgtaccaaactaaactgacagtccttcgataatatgaaacattaatttacaaggacccgttagggcttcaatgatgctgagtctggaaaaggggaggagacccttgggaggactccaggcagctgtgctcccagggctcatgttctctactggattagggatagtcacctctgaaatctccaccctgatgattggaatgaaacggagtgaacatgagcccagctgagagaggagcaggaatgtgtgaaaaacagctgctctccttgtcccagctttgtgattgagccctctgtcttgctctctctgccttccctgtgtctttcttctcttaccagagcatctgtttgcagaggtaacattaccttccccagccacaggtatgtggaatacggtgaggaaaaaaaaaattaaaaaaaaaatgcaagctgtcaggatgcttaagctcttttcagacatctgcagtttcatccctaccttgttcacataccatccaagaggcacataggctacccaagagagccttggattcagtggtacactccttgggcccaagggctttagcagctggatatggggttccttgattttcctctgggcccaaatatagccctcacactcttggaatttccaggtatgggggtagccccaaaaggaggaatctcctatggccaataaggtatcttgactttatcaaagtagaagagagggtcacttcggagtcaaatcatacactaggcctttgatgctttaattcttcttcagttcattaaaagtaactactaaggaaaggttaaaaacttcccctcaaaaaggaatcaaccccaggaagtaattatttacaacgattttcccaaattttgtacaatctgtcctggaaagcaaaccccttttaaaatctaatgtctgggctttgagtattagctcatttagggtggacaaatgcattactgttttcaaactgctcacatttattcagtatttctccaagttgctatctactcagccttatgaatgcccctcgcttttctaaggccatgtgaaaatcacggcactgcccttagccttgtgtcatctgctttttcgttctgcgatatgcccagttcccaaatcaattataggtacctgtttaggagagaggaagattttacctctcaaagggtgagatttgaaatttacactaaaaagacaactttacatttaatgcttcacttaatgagacattcttttttttataagtctatttttctactcagtttcagaacactaatctgattttcactctgatttttaacgtttctttaaatatttataatgtagcttctttcaaaatattttcatgaaaaattacttttattataccattatgtgcatgttattggtagcaggcatagtttattatttagtactgaaacatgctcttttacctaacagtaaacaagtatgttttgatatatatctgttaatatgcttatagtggtaagaaatggacttgaggtcccaggagatttcattttattcaccctggtcagatacaataaaggctatgagtataaatacataacttcctaaccaggtgtagggcatgttcatgaatatcaaatcttttgatgctggacccaagagaggaaaagttgtagctaaatgttgatttacttataactagacgtctatgtgagaaaatatatgtatacatatatatgatatgcagaagtcactttttttatcaggctttattctccttacaaagccacagtttaactgtctgcaacagttggtttatgttaatgatagacaaatacccagtgtttgttactttttccaactaccactgtaatgataatctttctcacgtatatacatgcaacttcttggcttcatttccatgaagctgtttcaatatattcagtatactttgtccttaatgctgcttctgttaacagtgatctctttctttttttcattcttatatcttcattagttcatcataaatctgtccagttgaggcctcaggaccacggcatgatttcatgactccgaagtattttacagaaacattttttaaataagggaaatattttatataccagatggttcacaagtgatggctcatagctagtttttttttttcttctaaaaaatgtcaggtttttaaaatcatttaccttattaaaatgaaaagtgccatacttaacttttaaaggaaagacctgacttgctttttctctatttagactgtttttgtactttactaatctttaaactatcaggaaaaaaaccaaaactttataccaatgatttagtaattttgaggcatagggtagcttacgtagtggaggatgtgccaaatattctcttcaaatgccaccttctcaatttataactaaaatagtgttatctgactaattcctctgaattttgatgtaagatctatataggcccccaaaatgatcgtagtacatgccagtcatttctcagtgaaataaatacaataccagagtacattatgggttttattgctttcttttatggtagacctgttaatggggaaaaaatacatcaaatcaaatagaatcttatatctgtatgttaaaatagagcacttacctgaagtcagtggcctggatcatagccctggatcatttcccagtctgtcctgtgctgtgtgaccttggacaaggcgcttcatctctctgggcctctatttctccatttgtaaaacaagtggctgcagtagatgatggctgagagcccttcctgttcccagatgccttggtccaaagaccccacccctctgctggtcctgccaacgtgttggtgctataagctgcttcagatataaaattggtttatctataatgtttgttcatttaatagcttctaaaaggcctttttgttatacagtgctttttttctagttttatggacttggttactgtaataatgtcttgtttttagccatgtaactacaaacagatattctcttgatgtcttagtaaatttgcatttgatatatcattgatgagattttgttgttatgtaatattctttggctacgcatctgtccagcatcttattaaccataatactgtgatcattatttggaaatatgtcctatggaaagaataaaagcatgtacttcacagctagcatgttcacagatttgaaagaagtttcattaaaagcaccattgctttctgaanaanaacaaaaaaaaaagggggggcggcataaaattcccctggggcccattaccgtccagtttttgtcccaggccatag

SEQ ID NO: 429258 - DNA, 4637 bp, Homo sapiens
accccagcgaggcggagccggcgcccggaggagcaagaggaggaggaggaggagaggtcggagccgtctccaggagcccttagagaccgagtcccggcggcgacggcggggcagcgcaccggcaggcggattcattccacttaaaacctgaaaacattggaccacacaaagtcttactgatttcaggtaaaaacaataattgaagatgtccagcaaaacagcaagcaccaacaatatagcccaggcaaggagaactgtgcagcagttaagattagaagcctccattgaaagaataaaggtttcgaaggcatcagcggacctcatgtcctactgtgaggaacatgccaggagtgaccctttgctgataggaataccaacttcagaaaaccctttcaaggataaaaaaacttgcatcatcttatagtggaatagagaaacagctcctcgcctcttcccaacaacgcaaattatgagcagctccttgaagagatttaccttcagcttatttggtaaccactgctaataactaaaatgttctcagcttggaataatggactctgaagtctctattttccaagttgtcctttctcttaaaataccctttactgatttaatacagaataacaatcttattttccacttggtaactatggctttatgttgggttactgtttaaggaaagttgatctgggcctttttaaaaacataattatatactttagaaatacaagggattccgatatgtcaggacctaaatggcctaagcacctgtcaaattaaaattccaaaattcattgaaatcctaaagccttgatattatattctttataaggcgtgtgccagcctgtatagtatataagagagaggggtgtttgtgtgtatatatatatgcctttgtgtatacacttatcaaagctattttcttatgaaaacgtccctctctccataccatcagtttctcagttccagaagttatacctttattttgagctgtgtataggtagaataaaaaattcctttcatatcgttattgtacaaaaagtaaagagtatcctaaagattgtattcattgtaatcaagtaatgcaatcatctctcctctcttgaaatcttgctggacctcttaggctacaataaactgtaccaaactaaactgacagtccttcgataatatgaaacattaatttacaaggacccgttagggcttcaatgatgctgagtctggaaaaggggaggagacccttgggaggactccaggcagctgtgctcccagggctcatgttctctactggattagggatagtcacctctgaaatctccaccctgatgattggaatgaaacggagtgaacatgagcccagctgagagaggagcaggaatgtgtgaaaaacagctgctctccttgtcccagctttgtgattgagccctctgtcttgctctctctgccttccctgtgtctttcttctcttaccagagcatctgtttgcagaggtaacattaccttccccagccacaggtatgtggaatacggtgaggaaaaaaaaaattaaaaaaaaaatgcaagctgtcaggatgcttaagctcttttcagacatctgcagtttcatccctaccttgttcacataccatccaagaggcacataggctacccaagagagccttggattcagtggtacactccttgggcccaagggctttagcagctggatatggggttccttgattttcctctgggcccaaatatagccctcacactcttggaatttccaggtatgggggtagccccaaaaggaggaatctcctatggccaataaggtatcttgactttatcaaagtagaagagagggtcacttcggagtcaaatcatacactaggcctttgatgctttaattcttcttcagttcattaaaagtaactactaaggaaaggttaaaaacttcccctcaaaaaggaatcaaccccaggaagtaattatttacaacgattttcccaaattttgtacaatctgtcctggaaagcaaaccccttttaaaatctaatgtctgggctttgagtattagctcatttagggtggacaaatgcattactgttttcaaactgctcacatttattcagtatttctccaagttgctatctactcagccttatgaatgcccctcgcttttctaaggccatgtgaaaatcacggcactgcccttagccttgtgtcatctgctttttcgttctgcgatatgcccagttcccaaatcaattataggtacctgtttaggagagaggaagattttacctctcaaagggtgagatttgaaatttacactaaaaagacaactttacatttaatgcttcacttaatgagacattcttttttttataagtctatttttctactcagtttcagaacactaatctgattttcactctgatttttaacgtttctttaaatatttataatgtagcttctttcaaaatattttcatgaaaaattacttttattataccattatgtgcatgttattggtagcaggcatagtttattatttagtactgaaacatgctcttttacctaacagtaaacaagtatgttttgatatatatctgttaatatgcttatagtggtaagaaatggacttgaggtcccaggagatttcattttattcaccctggtcagatacaataaaggctatgagtataaatacataacttcctaaccaggtgtagggcatgttcatgaatatcaaatcttttgatgctggacccaagagaggaaaagttgtagctaaatgttgatttacttataactagacgtctatgtgagaaaatatatgtatacatatatatgatatgcagaagtcactttttttatcaggctttattctccttacaaagccacagtttaactgtctgcaacagttggtttatgttaatgatagacaaatacccagtgtttgttactttttccaactaccactgtaatgataatctttctcacgtatatacatgcaacttcttggcttcatttccatgaagctgtttcaatatattcagtatactttgtccttaatgctgcttctgttaacagtgatctctttctttttttcattcttatatcttcattagttcatcataaatctgtccagttgaggcctcaggaccacggcatgatttcatgactccgaagtattttacagaaacattttttaaataagggaaatattttatataccagatggttcacaagtgatggctcatagctagtttttttttttcttctaaaaaatgtcaggtttttaaaatcatttaccttattaaaatgaaaagtgccatacttaacttttaaaggaaagacctgacttgctttttctctatttagactgtttttgtactttactaatctttaaactatcaggaaaaaaaccaaaactttataccaatgatttagtaattttgaggcatagggtagcttacgtagtggaggatgtgccaaatattctcttcaaatgccaccttctcaatttataactaaaatagtgttatctgactaattcctctgaattttgatgtaagatctatataggcccccaaaatgatcgtagtacatgccagtcatttctcagtgaaataaatacaataccagagtacattatgggttttattgctttcttttatggtagacctgttaatggggaaaaaatacatcaaatcaaatagaatcttatatctgtatgttaaaatagagcacttacctgaagtcagtggcctggatcatagccctggatcatttcccagtctgtcctgtgctgtgtgaccttggacaaggcgcttcatctctctgggcctctatttctccatttgtaaaacaagtggctgcagtagatgatggctgagagcccttcctgttcccagatgccttggtccaaagaccccacccctctgctggtcctgccaacgtgttggtgctataagctgcttcagatataaaattggtttatctataatgtttgttcatttaatagcttctaaaaggcctttttgttatacagtgctttttttctagttttatggacttggttactgtaataatgtcttgtttttagccatgtaactacaaacagatattctcttgatgtcttagtaaatttgcatttgatatatcattgatgagattttgttgttatgtaatattctttggctacgcatctgtccagcatcttattaaccataatactgtgatcattatttggaaatatgtcctatggaaagaataaaagcatgtacttcacagctagcatgttcacagatttgaaagaagtttcattaaaagcaccattgctttctgaaaaaaaaaaaaaaaatataaaataattaaaaaaaataaaataataataggataataaaaatatgtataaaagaacaaagataaagtaaaaataaaataatatagagacacagataaacatctaggaagtagattaaatgaaagaagcgtatatgaattcaagaaaataaagctgggaaatgtatttgctataaaatgagaagtctcactgatagaggttctttattgctcatttggtgctacaaaactggactctgaaatctgtcacaaatacaaattgtacatttggagatgtctcaaag

SEQ ID NO: 429259 - DNA, 2117 bp, Homo sapiens
aactttacgacaggcgggattgttttgtggctgtcagctttccccgtggtctgagtttgtggctgcatttttatctctggtggctctgctacggcggcgcagaaatgaggcagaagcggaaaggagatctcagccctgctgagctgatgatgctgactataggagatgttattaaacaactgattgaagcccacgagcaggggaaagacatcgatctaaataaggtgaaaaccaagacagctgccaaatatggcctttctgcccagccccgcctggtggatatcattgctgccgtccctcctcagtatcgcaaggtcttgatgcccaagttaaaggcgaaacccatcagaactgctagtgggattgctgtcgtggctgtgatgtgcaaaccccacagatgtccacacatcagttttacaggaaatatatgtgtatactgccctggtggacctgattctgattttgagtattccacccagtcttacactggctatgagccaacctccatgagagctatccgtgccagatatgaccctttcctacagacaagacaccgaatagaacagttaaaacaacttggtcatagtgtggataaagtggagtttattgtgatgggtggaacgtttatggcccttccagaagaatacagagattattttattcgaaatttacatgatgccttatcaggacatacttccaacaatatttacgaggcagtcaagtattctgagagaagcctcacaaagtgtattggaattactattgaaaccagaccagattactgcatgaagcgacatttaagtgacatgttgacctatggctgcacaaggctggagattggggtgcagagtgtttatgaagatgtggctagagacaccaacaggggccacactgtgaaggcagtgtgtgagtcatttcacctggccaaagattccggttttaaagtggtggcccatatgatgcctgacctgccaaacgtgggactagaaagagacattgaacagttcacagagttttttgagaaccctgcttttcgtcccgatgggctgaaactctatcctaccctggtgattcgtgggaccgggctttatgagctttggaaatcaggaagatataagagttactctcctagtgacctggttgaattggtggctcggatcctagccctcgtgcctccatggactcgagtgtaccgagtacagagggatattccaatgcctttagttagctcaggagtagagcatggtaacctgagagagctggcacttgcaagaatgaaagacctcggaatacagtgtcgagatgtgagaaccagagaagttggaatccaagaaattcatcacaaagtacggccataccaggttgaattggtaaggagagattatgttgcaaatggtggctgggaaacattcttgtcatacgaagacccagatcaagacattttgattggcctcctacgattacgcaagtgttcagaagaaactttccgtttcgaattgggtggaggtgtctccatagtacgagagctgcatgtgtatgggagtgtggtccctgtgagcagccgggatcctactaaatttcagcatcagggatttggcatgctgctgatggaggaagcagaaagaatagctagagaagaacatgggtctgggaaaatcgctgtgatatcaggggtcggcaccaggaattattatagaaagatcggctacagattacaaggcccgtacatggtgaagatgctgaaataatggccacaccagtccactcttctgcagtatcctccctggcagaacacggagaatcaggatttcttaaatactcaacagagaggctgagcagagcaaatggggggcttcaccctcatcccgcagctgcagagactggaaactgccttcaaggccacggctggtcatctgctgaccacaccccagatccgccctctcctgcgtgcaccccaaaaaatcacttgcgtttttgaggcttaaatcatctatccagtttctacattttgcatgaggcctgcaggtggcctattttgactcagacggtgaaaaaagcaaattaactcatttggacaccataactcatgcaataaaactgattgtcattcgaggagc

SEQ ID NO: 429260 - DNA, 1973 bp, Homo sapiens
aactttacgacaggcgggattgttttgtggctgtcagctttccccgtggtctgagtttgtggctgcatttttatctctggtggctctgctacggcggcgcagaaatgaggcagaagcggaaaggagatctcagccctgctgagctgatgatgctgactataggagatgttattaaacaactgattgaagcccacgagcaggggaaagacatcgatctaaataaggtgaaaaccaagacagctgccaaatatggcctttctgcccagccccgcctggtggatatcattgctgccgtccctcctcagtatcgcaaggtcttgatgcccaagttaaaggcgaaacccatcagaactgctagtgggattgctgtcgtggctgtgatgtgcaaaccccacagatgtccacacatcagttttacaggaaatatatgtgtatactgccctggtggacctgattctgattttgagtattccacccagtcttacactggctatgagccaacctccatgagagctatccgtgccagatatgaccctttcctacagacaagacaccgaatagaacagttaaaacaacttggtcatagtgtggataaagtggagtttattgtgatgggtggaacgtttatggcccttccagaagaatacagagattattttattcgaaatttacatgatgccttatcaggacatacttccaacaatatttacgaggcagtcaagtattctgagagaagcctcacaaagtgtattggaattactattgaaaccagaccagattactgcatgaagcgacatttaagtgacatgttgacctatggctgcacaaggctggagattggggtgcagagtgtttatgaagatgtggctagagacaccaacaggggccacactgtgaaggcagtgtgtgagtcatttcacctggccaaagattccggttttaaagtggtggcccatatgatgcctgacctgccaaacgtgggactagaaagagacattgaacagttcacagagttttttgagaaccctgcttttcgtcccgatgggctgaaactctatcctaccctggtgattcgtgggaccgggctttatgagctttggaaatcaggaagatataagagttactctcctagtgacctggttgaattggtggctcggatcctagccctcgtgcctccatggactcgagtgtaccgagtacagagggatattccaatgcctttagttagctcaggagtagagcatggtaacctgagagagctggcacttgcaagaatgaaagacctcggaatacagtgtcgagatgtgagaaccagagaagttggaatccaagaaattcatcacaaagtacggccataccaggttgaattggtaaggagagattatgttgcaaatggtggctgggaaacattcttgtcatacgaagacccagatcaagacattttgattggcctcctacgattacgcaagtgttcagaaagaatagctagagaagaacatgggtctgggaaaatcgctgtgatatcaggggtcggcaccaggaattattatagaaagatcggctacagattacaaggcccgtacatggtgaagatgctgaaataatggccacaccagtccactcttctgcagtatcctccctggcagaacacggagaatcaggatttcttaaatactcaacagagaggctgagcagagcaaatggggggcttcaccctcatcccgcagctgcagagactggaaactgccttcaaggccacggctggtcatctgctgaccacaccccagatccgccctctcctgcgtgcaccccaaaaaatcacttgcgtttttgaggcttaaatcatctatccagtttctacattttgcatgaggcctgcaggtggcctattttgactcagacggtgaaaaaagcaaattaactcatttggacaccataactcatgcaataaaactgattgtcattcgaggagc

SEQ ID NO: 429261 - DNA, 524 bp, Homo sapiens
tggggtggggcgcagaacaatctatgtagtccaaagcaccgcgttcaactgcacgactctcttattaaccccgctacggggtcggcaccaggaattattatagaaagatcggctacagattacaaggcccgtacatggtgaagatgctgaaataatggccacaccagtccactcttctgcagtatcctccctggcagaacacggagaatcaggatttcttaaatactcaacagagaggctgagcagagcaaatggggggcttcaccctcatcccgcagctgcagagactggaaactgccttcaaggccacggctggtcatctgctgaccacaccccagatccgccctctcctgcgtgcaccccaaaaaatcacttgcgtttttgaggcttaaatcatctatccagtttctacattttgcatgaggcctgcaggtggcctattttgactcagacggtgaaaaaagcaaattaactcatttggacaccataactcatgcaataaaactgattgtcattcgaggagc

SEQ ID NO: 429262 - DNA, 410 bp, Homo sapiens
gagacgggtagatcacctgaggtcaagaattcaagaccagcctggccaacatggtgaaaccccgtctctactaaaaatacaaaaattagctgggcatgagccaccgctcccagcctttgattttttaaggtggattttggttgttataaatggagaaaggtaagagttcaagttcaacccgtgtgtgaaagcaaaacaatggaaaacaggattggcttcttcaaaggctcctcttgtagaactgcctctttgaaatttcgaggtaatctactttggagactctgcctggagagggtcagttcctaagttaaaagcatcgcttaaccttggctcctgtggcattttacaaaggtttaaaggaattgattcctctgaaagggcctgaaaataaaaagtctttaacatacaaa

SEQ ID NO: 429263 - DNA, 3176 bp, Homo sapiens
aactttacgacaggcgggattgttttgtggctgtcagctttccccgtggtctgagtttgtggctgcatttttatctctggtggctctgctacggcggcgcagaaatgaggcagaagcggaaaggagatctcagccctgctgagctgatgatgctgactataggagatgttattaaacaactgattgaagcccacgagcaggggaaagacatcgatctaaataaggtgaaaaccaagacagctgccaaatatggcctttctgcccagccccgcctggtggatatcattgctgccgtccctcctcagtatcgcaaggtcttgatgcccaagttaaaggcgaaacccatcagaactgctagtgggattgctgtcgtggctgtgatgtgcaaaccccacagatgtccacacatcagttttacaggaaatatatgtgtatactgccctggtggacctgattctgattttgagtattccacccagtcttacactggctatgagccaacctccatgagagctatccgtgccagatatgaccctttcctacagacaagacaccgaatagaacagttaaaacaacttggtcatagtgtggataaagtggagtttattgtgatgggtggaacgtttatggcccttccagaagaatacagagattattttattcgaaatttacatgatgccttatcaggacatacttccaacaatatttacgaggcagtcaagtattctgagagaagcctcacaaagtgtattggaattactattgaaaccagaccagattactgcatgaagcgacatttaagtgacatgttgacctatggctgcacaaggctggagattggggtgcagagtgtttatgaagatgtggctagagacaccaacaggggccacactgtgaaggcagtgtgtgagtcatttcacctggccaaagattccggttttaaagtggtggcccatatgatgcctgacctgccaaacgtgggactagaaagagacattgaacagttcacagagttttttgagaaccctgcttttcgtcccgatgggctgaaactctatcctaccctggtgattcgtgggaccgggctttatgagctttggaaatcaggaagatataagagttactctcctagtgacctggttgaattggtggctcggatcctagccctcgtgcctccatggactcgagtgtaccgagtacagagggatattccaatgcctttagttagctcaggagtagagcatggtaacctgagagagctggcacttgcaagaatgaaagacctcggaatacagtgtcgagatgtgagaaccagagaagttggaatccaagaaattcatcacaaagtacggccataccaggttgaattggtaaggagagattatgttgcaaatggtggctgggaaacattcttgtcatacgaagacccagatcaagacattttgattggcctcctacgattacgcaagtgttcagaagaaactttccgtttcgaattgggtggaggtgtctccatagtacgagagctgcatgtgtatgggagtgtggtccctgtgagcagccgggatcctactaaatttcagcatcagggatttggcatgctgctgatggaggaagcagaaagaatagctagagaagaacatgggtctgggaaaatcgctgtgatatcaggggtcggcaccaggaattattatagaaagatcggctacagattacaaggcccgtacatggtgaagatgctgaaataatggccacaccagtccactcttctgcagtatcctccctggcagaacacggagaatcaggatttcttaaatactcaacagagaggctgagcagagcaaatggggggcttcaccctcatcccgcagctgcagagactggaaactgccttcaaggccacggctggtcatctgctgaccacaccccagatccgccctctcctgcgtgcaccccaaaaaatcacttgcgtttttgaggcttaaatcatctatccagtttctacattttgcatgaggcctgcaggtggcctattttgactcagacggtgaaaaaagcaaattaactcatttggacaccataactcatgcaataaaactgattgtcattcgaggagcaaacttaagagtagtttatttatataccctggggacagaaagtcaggttgaaacaggaaaaccaccagactctaatctcagccctttaacgacatacgcattggagcgcaagttaggaaaatgagcttttgttttcatggaaatcattctgattacagtgctgatgtttagaaataaatagcagtgtgactgggaaagaggaattgcagttgtgggggtgtgagcctggcagcagccagccagcagcctctcccaggcgggagtctaccatccgagacggcgatgacaaagagcttcattccacattctttgttatctctacttcccaccctcttggcaactacagagcagtgtgggcagccccaagtgtggtccccagagagcgtttggctttcctgtctgtctatcctgagcgggtggagtctcaggttgtgtgcccctaaatcaagatttgcttccacagaagccattacttgcaattttttttttttttctgagaaagtctcgctgtgtcacccaggctggagtgcagtggcgcaatctcactgcatcctccgcctcccgggttcaagcgattctcccgcctcagcctcctgagtagctgggattacaggcacccgccgctgctaatttttgtatttttagtagagatgggggtttcaccatattggtcaggctggtctcgaactcctgacctcaggtgatcaacccaccttggcctccctaaatgccgggattacaggcatgagccaccgctcccagcctttgattttttaaggtggattttggttgttataaatggagaaaggtaagagttcaagttcaacccgtgtgtgaaagcaaaacaatggaaaacaggattggcttcttcaaaggctcctcttgtagaactgcctctttgaaatttcgaggtaatctactttggagactctgcctggagagggtcagttcctaagttaaaagcatcgcttaaccttggctcctgtggcattttacaaaggtttaaaggaattgattcctctgaaagggcctgaaaataaaaagtctttaacatacaaa

SEQ ID NO: 429264 - DNA, 3718 bp, Homo sapiens
aactttacgacaggcgggattgttttgtggctgtcagctttccccgtggtctgagtttgtggctgcatttttatctctggtggctctgctacggcggcgcagaaatgaggcagaagcggaaaggagatctcagccctgctgagctgatgatgctgactataggagatgttattaaacaactgattgaagcccacgagcaggggaaagacatcgatctaaataaggtgaaaaccaagacagctgccaaatatggcctttctgcccagccccgcctggtggatatcattgctgccgtccctcctcagtatcgcaaggtcttgatgcccaagttaaaggcgaaacccatcagaactgctagtgggattgctgtcgtggctgtgatgtgcaaaccccacagatgtccacacatcagttttacaggaaatatatgtgtatactgccctggtggacctgattctgattttgagtattccacccagtcttacactggctatgagccaacctccatgagagctatccgtgccagatatgaccctttcctacagacaagacaccgaatagaacagttaaaacaacttggtcatagtgtggataaagtggagtttattgtgatgggtggaacgtttatggcccttccagaagaatacagagattattttattcgaaatttacatgatgccttatcaggacatacttccaacaatatttacgaggcagtcaagtattctgagagaagcctcacaaagtgtattggaattactattgaaaccagaccagattactgcatgaagcgacatttaagtgacatgttgacctatggctgcacaaggctggagattggggtgcagagtgtttatgaagatgtggctagagacaccaacaggggccacactgtgaaggcagtgtgtgagtcatttcacctggccaaagattccggttttaaagtggtggcccatatgatgcctgacctgccaaacgtgggactagaaagagacattgaacagttcacagagttttttgagaaccctgcttttcgtcccgatgggctgaaactctatcctaccctggtgattcgtgggaccgggctttatgagctttggaaatcaggaagatataagagttactctcctagtgacctggttgaattggtggctcggatcctagccctcgtgcctccatggactcgagtgtaccgagtacagagggatattccaatgcctttagttagctcaggagtagagcatggtaacctgagagagctggcacttgcaagaatgaaagacctcggaatacagtgtcgagatgtgagaaccagagaagttggaatccaagaaattcatcacaaagtacggccataccaggttgaattggtaaggagagattatgttgcaaatggtggctgggaaacattcttgtcatacgaagacccagatcaagacattttgattggcctcctacgattacgcaagtgttcagaagaaactttccgtttcgaattgggtggaggtgtctccatagtacgagagctgcatgtgtatgggagtgtggtccctgtgagcagccgggatcctactaaatttcagcatcagggatttggcatgctgctgatggaggaagcagaaagaatagctagagaagaacatgggtctgggaaaatcgctgtgatatcaggggtcggcaccaggaattattatagaaagatcggctacagattacaaggcccgtacatggtgaagatgctgaaataatggccacaccagtccactcttctgcagtatcctccctggcagaacacggagaatcaggatttcttaaatactcaacagagaggctgagcagagcaaatggggggcttcaccctcatcccgcagctgcagagactggaaactgccttcaaggccacggctggtcatctgctgaccacaccccagatccgccctctcctgcgtgcaccccaaaaaatcacttgcgtttttgaggcttaaatcatctatccagtttctacattttgcatgaggcctgcaggtggcctattttgactcagacggtgaaaaaagcaaattaactcatttggacaccataactcatgcaataaaactgattgtcattcgaggagcaaacttaagagtagtttatttatataccctggggacagaaagtcaggttgaaacaggaaaaccaccagactctaatctcagccctttaacgacatacgcattggagcgcaagttaggaaaatgagcttttgttttcatggaaatcattctgattacagtgctgatgtttagaaataaatagcagtgtgactgggaaagaggaattgcagttgtgggggtgtgagcctggcagcagccagccagcagcctctcccaggcgggagtctaccatccgagacggcgatgacaaagagcttcattccacattctttgttatctctacttcccaccctcttggcaactacagagcagtgtgggcagccccaagtgtggtccccagagagcgtttggctttcctgtctgtctatcctgagcgggtggagtctcaggttgtgtgcccctaaatcaagatttgcttccacagaagccattacttgcaattttttttttttttctgagaaagtctcgctgtgtcacccaggctggagtgcagtggcgcaatctcactgcatcctccgcctcccgggttcaagcgattctcccgcctcagcctcctgagtagctgggattacaggcacccgccgctgctaatttttgtatttttagtagagatgggggtttcaccatattggtcaggctggtctcgaactcctgacctcaggtgatcaacccaccttggcctccctaaatgccgggattacaggcatgagccaccgctcccagcctttgattttttaaggtggattttggttgttataaatggagaaaggtaagagttcaagttcaacccgtgtgtgaaagcaaaacaatggaaaacaggattggcttcttcaaaggctcctcttgtagaactgcctctttgaaatttcgaggtaatctactttggagactctgcctggagagggtcagttcctaagttaaaagcatcgcttaaccttggctcctgtggcattttacaaaggtttaaaggaattgattcctctgaaagggcctgaaaataaaaagtctttaacatacaaaaaaaaaaaaaaaaaaaaaaaaaaaaacaaaaaacaaaaaaaaaaaaaacaaaaaaaaaaaaacaaaaaaaacaaacaaaaaaagcgggggcgcgcgcccccacaaattatctccccgagggggccacccacacacagcgcggccccaccccgttttttgacacaaggggcgcgccccaaaaaagggagcacggataaaataaaacagagggcgagcaggcggggggcgagatagaacacacagacgcgcgcgtgagagagggacaacgcgcggcagagcagcgggcgatccatgggaagagagagacaacaccacgcggggggcgaggaagaaacacgtgggggcacaacaaccatacaagaaagcagagaaacgaaccccgccgagagacaaaacaaaaaaaaaccgaacgacgagcgacaaaggccgcgacaaaaacacacacacagcaaaaacgagagcgcgagaagaaaaaaaagtggacacaagcaaagaggacacaacacactaagaaacaacactcacacaccagaggggacaga

SEQ ID NO: 429265 - DNA, 3213 bp, Homo sapiens
gacctatcctcatctgtgcaaggaggagtggccaactctggagcccaggctgttgcttcctggtctggtggtgaatcctccatagtctggtgagtgtagtgcccaactctggagcccaggatgttgcttcccggtctggtggtgaatcctccatagtctggagatctcagccctgctgagctgatgatgctgactataggagatgttattaaacaactgattgaagcccacgagcaggggaaagacatcgatctaaataaggtgaaaaccaagacagctgccaaatatggcctttctgcccagccccgcctggtggatatcattgctgccgtccctcctcagtatcgcaaggtcttgatgcccaagttaaaggcgaaacccatcagaactgctagtgggattgctgtcgtggctgtgatgtgcaaaccccacagatgtccacacatcagttttacaggaaatatatgtgtatactgccctggtggacctgattctgattttgagtattccacccagtcttacactggctatgagccaacctccatgagagctatccgtgccagatatgaccctttcctacagacaagacaccgaatagaacagttaaaacaacttggtcatagtgtggataaagtggagtttattgtgatgggtggaacgtttatggcccttccagaagaatacagagattattttattcgaaatttacatgatgccttatcaggacatacttccaacaatatttacgaggcagtcaagtattctgagagaagcctcacaaagtgtattggaattactattgaaaccagaccagattactgcatgaagcgacatttaagtgacatgttgacctatggctgcacaaggctggagattggggtgcagagtgtttatgaagatgtggctagagacaccaacaggggccacactgtgaaggcagtgtgtgagtcatttcacctggccaaagattccggttttaaagtggtggcccatatgatgcctgacctgccaaacgtgggactagaaagagacattgaacagttcacagagttttttgagaaccctgcttttcgtcccgatgggctgaaactctatcctaccctggtgattcgtgggaccgggctttatgagctttggaaatcaggaagatataagagttactctcctagtgacctggttgaattggtggctcggatcctagccctcgtgcctccatggactcgagtgtaccgagtacagagggatattccaatgcctttagttagctcaggagtagagcatggtaacctgagagagctggcacttgcaagaatgaaagacctcggaatacagtgtcgagatgtgagaaccagagaagttggaatccaagaaattcatcacaaagtacggccataccaggttgaattggtaaggagagattatgttgcaaatggtggctgggaaacattcttgtcatacgaagacccagatcaagacattttgattggcctcctacgattacgcaagtgttcagaagaaactttccgtttcgaattgggtggaggtgtctccatagtacgagagctgcatgtgtatgggagtgtggtccctgtgagcagccgggatcctactaaatttcagcatcagggatttggcatgctgctgatggaggaagcagaaagaatagctagagaagaacatgggtctgggaaaatcgctgtgatatcaggggtcggcaccaggaattattatagaaagatcggctacagattacaaggcccgtacatggtgaagatgctgaaataatggccacaccagtccactcttctgcagtatcctccctggcagaacacggagaatcaggatttcttaaatactcaacagagaggctgagcagagcaaatggggggcttcaccctcatcccgcagctgcagagactggaaactgccttcaaggccacggctggtcatctgctgaccacaccccagatccgccctctcctgcgtgcaccccaaaaaatcacttgcgtttttgaggcttaaatcatctatccagtttctacattttgcatgaggcctgcaggtggcctattttgactcagacggtgaaaaaagcaaattaactcatttggacaccataactcatgcaataaaactgattgtcattcgaggagcaaacttaagagtagtttatttatataccctggggacagaaagtcaggttgaaacaggaaaaccaccagactctaatctcagccctttaacgacatacgcattggagcgcaagttaggaaaatgagcttttgttttcatggaaatcattctgattacagtgctgatgtttagaaataaatagcagtgtgactgggaaagaggaattgcagttgtgggggtgtgagcctggcagcagccagccagcagcctctcccaggcgggagtctaccatccgagacggcgatgacaaagagcttcattccacattctttgttatctctacttcccaccctcttggcaactacagagcagtgtgggcagccccaagtgtggtccccagagagcgtttggctttcctgtctgtctatcctgagcgggtggagtctcaggttgtgtgcccctaaatcaagatttgcttccacagaagccattacttgcaattttttttttttttctgagaaagtctcgctgtgtcacccaggctggagtgcagtggcgcaatctcactgcatcctccgcctcccgggttcaagcgattctcccgcctcagcctcctgagtagctgggattacaggcacccgccgctgctaatttttgtatttttagtagagatgggggtttcaccatattggtcaggctggtctcgaactcctgacctcaggtgatcaacccaccttggcctccctaaatgccgggattacaggcatgagccaccgctcccagcctttgattttttaaggtggattttggttgttataaatggagaaaggtaagagttcaagttcaacccgtgtgtgaaagcaaaacaatggaaaacaggattggcttcttcaaaggctcctcttgtagaactgcctctttgaaatttcgaggtaatctactttggagactctgcctggagagggtcagttcctaagttaaaagcatcgcttaaccttggctcctgtggcattttacaaaggtttaaaggaattgattcctctgaaagggcctgaaaataaaaagtctttaacatacaaa

SEQ ID NO: 429266 - DNA, 3076 bp, Homo sapiens
aactttacgacaggcgggattgttttgtggctgtcagctttccccgtggtctgagtttgtggctgcatttttatctctggtggctctgctacggcggcgcagaaatgaggcagaagcggaaagggtgaaaaccaagacagctgccaaatatggcctttctgcccagccccgcctggtggatatcattgctgccgtccctcctcagtatcgcaaggtcttgatgcccaagttaaaggcgaaacccatcagaactgctagtgggattgctgtcgtggctgtgatgtgcaaaccccacagatgtccacacatcagttttacaggaaatatatgtgtatactgccctggtggacctgattctgattttgagtattccacccagtcttacactggctatgagccaacctccatgagagctatccgtgccagatatgaccctttcctacagacaagacaccgaatagaacagttaaaacaacttggtcatagtgtggataaagtggagtttattgtgatgggtggaacgtttatggcccttccagaagaatacagagattattttattcgaaatttacatgatgccttatcaggacatacttccaacaatatttacgaggcagtcaagtattctgagagaagcctcacaaagtgtattggaattactattgaaaccagaccagattactgcatgaagcgacatttaagtgacatgttgacctatggctgcacaaggctggagattggggtgcagagtgtttatgaagatgtggctagagacaccaacaggggccacactgtgaaggcagtgtgtgagtcatttcacctggccaaagattccggttttaaagtggtggcccatatgatgcctgacctgccaaacgtgggactagaaagagacattgaacagttcacagagttttttgagaaccctgcttttcgtcccgatgggctgaaactctatcctaccctggtgattcgtgggaccgggctttatgagctttggaaatcaggaagatataagagttactctcctagtgacctggttgaattggtggctcggatcctagccctcgtgcctccatggactcgagtgtaccgagtacagagggatattccaatgcctttagttagctcaggagtagagcatggtaacctgagagagctggcacttgcaagaatgaaagacctcggaatacagtgtcgagatgtgagaaccagagaagttggaatccaagaaattcatcacaaagtacggccataccaggttgaattggtaaggagagattatgttgcaaatggtggctgggaaacattcttgtcatacgaagacccagatcaagacattttgattggcctcctacgattacgcaagtgttcagaagaaactttccgtttcgaattgggtggaggtgtctccatagtacgagagctgcatgtgtatgggagtgtggtccctgtgagcagccgggatcctactaaatttcagcatcagggatttggcatgctgctgatggaggaagcagaaagaatagctagagaagaacatgggtctgggaaaatcgctgtgatatcaggggtcggcaccaggaattattatagaaagatcggctacagattacaaggcccgtacatggtgaagatgctgaaataatggccacaccagtccactcttctgcagtatcctccctggcagaacacggagaatcaggatttcttaaatactcaacagagaggctgagcagagcaaatggggggcttcaccctcatcccgcagctgcagagactggaaactgccttcaaggccacggctggtcatctgctgaccacaccccagatccgccctctcctgcgtgcaccccaaaaaatcacttgcgtttttgaggcttaaatcatctatccagtttctacattttgcatgaggcctgcaggtggcctattttgactcagacggtgaaaaaagcaaattaactcatttggacaccataactcatgcaataaaactgattgtcattcgaggagcaaacttaagagtagtttatttatataccctggggacagaaagtcaggttgaaacaggaaaaccaccagactctaatctcagccctttaacgacatacgcattggagcgcaagttaggaaaatgagcttttgttttcatggaaatcattctgattacagtgctgatgtttagaaataaatagcagtgtgactgggaaagaggaattgcagttgtgggggtgtgagcctggcagcagccagccagcagcctctcccaggcgggagtctaccatccgagacggcgatgacaaagagcttcattccacattctttgttatctctacttcccaccctcttggcaactacagagcagtgtgggcagccccaagtgtggtccccagagagcgtttggctttcctgtctgtctatcctgagcgggtggagtctcaggttgtgtgcccctaaatcaagatttgcttccacagaagccattacttgcaattttttttttttttctgagaaagtctcgctgtgtcacccaggctggagtgcagtggcgcaatctcactgcatcctccgcctcccgggttcaagcgattctcccgcctcagcctcctgagtagctgggattacaggcacccgccgctgctaatttttgtatttttagtagagatgggggtttcaccatattggtcaggctggtctcgaactcctgacctcaggtgatcaacccaccttggcctccctaaatgccgggattacaggcatgagccaccgctcccagcctttgattttttaaggtggattttggttgttataaatggagaaaggtaagagttcaagttcaacccgtgtgtgaaagcaaaacaatggaaaacaggattggcttcttcaaaggctcctcttgtagaactgcctctttgaaatttcgaggtaatctactttggagactctgcctggagagggtcagttcctaagttaaaagcatcgcttaaccttggctcctgtggcattttacaaaggtttaaaggaattgattcctctgaaagggcctgaaaataaaaagtctttaacatacaaa

SEQ ID NO: 429267 - DNA, 3042 bp, Homo sapiens
gacctatcctcatctgtgcaaggaggagtggccaactctggagcccaggctgttgcttcctggtctggtggtgaatcctccatagtctgggtgaaaaccaagacagctgccaaatatggcctttctgcccagccccgcctggtggatatcattgctgccgtccctcctcagtatcgcaaggtcttgatgcccaagttaaaggcgaaacccatcagaactgctagtgggattgctgtcgtggctgtgatgtgcaaaccccacagatgtccacacatcagttttacaggaaatatatgtgtatactgccctggtggacctgattctgattttgagtattccacccagtcttacactggctatgagccaacctccatgagagctatccgtgccagatatgaccctttcctacagacaagacaccgaatagaacagttaaaacaacttggtcatagtgtggataaagtggagtttattgtgatgggtggaacgtttatggcccttccagaagaatacagagattattttattcgaaatttacatgatgccttatcaggacatacttccaacaatatttacgaggcagtcaagtattctgagagaagcctcacaaagtgtattggaattactattgaaaccagaccagattactgcatgaagcgacatttaagtgacatgttgacctatggctgcacaaggctggagattggggtgcagagtgtttatgaagatgtggctagagacaccaacaggggccacactgtgaaggcagtgtgtgagtcatttcacctggccaaagattccggttttaaagtggtggcccatatgatgcctgacctgccaaacgtgggactagaaagagacattgaacagttcacagagttttttgagaaccctgcttttcgtcccgatgggctgaaactctatcctaccctggtgattcgtgggaccgggctttatgagctttggaaatcaggaagatataagagttactctcctagtgacctggttgaattggtggctcggatcctagccctcgtgcctccatggactcgagtgtaccgagtacagagggatattccaatgcctttagttagctcaggagtagagcatggtaacctgagagagctggcacttgcaagaatgaaagacctcggaatacagtgtcgagatgtgagaaccagagaagttggaatccaagaaattcatcacaaagtacggccataccaggttgaattggtaaggagagattatgttgcaaatggtggctgggaaacattcttgtcatacgaagacccagatcaagacattttgattggcctcctacgattacgcaagtgttcagaagaaactttccgtttcgaattgggtggaggtgtctccatagtacgagagctgcatgtgtatgggagtgtggtccctgtgagcagccgggatcctactaaatttcagcatcagggatttggcatgctgctgatggaggaagcagaaagaatagctagagaagaacatgggtctgggaaaatcgctgtgatatcaggggtcggcaccaggaattattatagaaagatcggctacagattacaaggcccgtacatggtgaagatgctgaaataatggccacaccagtccactcttctgcagtatcctccctggcagaacacggagaatcaggatttcttaaatactcaacagagaggctgagcagagcaaatggggggcttcaccctcatcccgcagctgcagagactggaaactgccttcaaggccacggctggtcatctgctgaccacaccccagatccgccctctcctgcgtgcaccccaaaaaatcacttgcgtttttgaggcttaaatcatctatccagtttctacattttgcatgaggcctgcaggtggcctattttgactcagacggtgaaaaaagcaaattaactcatttggacaccataactcatgcaataaaactgattgtcattcgaggagcaaacttaagagtagtttatttatataccctggggacagaaagtcaggttgaaacaggaaaaccaccagactctaatctcagccctttaacgacatacgcattggagcgcaagttaggaaaatgagcttttgttttcatggaaatcattctgattacagtgctgatgtttagaaataaatagcagtgtgactgggaaagaggaattgcagttgtgggggtgtgagcctggcagcagccagccagcagcctctcccaggcgggagtctaccatccgagacggcgatgacaaagagcttcattccacattctttgttatctctacttcccaccctcttggcaactacagagcagtgtgggcagccccaagtgtggtccccagagagcgtttggctttcctgtctgtctatcctgagcgggtggagtctcaggttgtgtgcccctaaatcaagatttgcttccacagaagccattacttgcaattttttttttttttctgagaaagtctcgctgtgtcacccaggctggagtgcagtggcgcaatctcactgcatcctccgcctcccgggttcaagcgattctcccgcctcagcctcctgagtagctgggattacaggcacccgccgctgctaatttttgtatttttagtagagatgggggtttcaccatattggtcaggctggtctcgaactcctgacctcaggtgatcaacccaccttggcctccctaaatgccgggattacaggcatgagccaccgctcccagcctttgattttttaaggtggattttggttgttataaatggagaaaggtaagagttcaagttcaacccgtgtgtgaaagcaaaacaatggaaaacaggattggcttcttcaaaggctcctcttgtagaactgcctctttgaaatttcgaggtaatctactttggagactctgcctggagagggtcagttcctaagttaaaagcatcgcttaaccttggctcctgtggcattttacaaaggtttaaaggaattgattcctctgaaagggcctgaaaataaaaagtctttaacatacaaa

SEQ ID NO: 429268 - DNA, 2560 bp, Homo sapiens
agaaaagctgaagtgctaggtaatgctaggtaccaggcccagaagacaatttcgtagacttgcacagctgcaacggaagcaaaaggaacctacagagacctgagagtattctgagagaagcctcacaaagtgtattggaattactattgaaaccagaccagattactgcatgaagcgacatttaagtgacatgttgacctatggctgcacaaggctggagattggggtgcagagtgtttatgaagatgtggctagagacaccaacaggggccacactgtgaaggcagtgtgtgagtcatttcacctggccaaagattccggttttaaagtggtggcccatatgatgcctgacctgccaaacgtgggactagaaagagacattgaacagttcacagagttttttgagaaccctgcttttcgtcccgatgggctgaaactctatcctaccctggtgattcgtgggaccgggctttatgagctttggaaatcaggaagatataagagttactctcctagtgacctggttgaattggtggctcggatcctagccctcgtgcctccatggactcgagtgtaccgagtacagagggatattccaatgcctttagttagctcaggagtagagcatggtaacctgagagagctggcacttgcaagaatgaaagacctcggaatacagtgtcgagatgtgagaaccagagaagttggaatccaagaaattcatcacaaagtacggccataccaggttgaattggtaaggagagattatgttgcaaatggtggctgggaaacattcttgtcatacgaagacccagatcaagacattttgattggcctcctacgattacgcaagtgttcagaagaaactttccgtttcgaattgggtggaggtgtctccatagtacgagagctgcatgtgtatgggagtgtggtccctgtgagcagccgggatcctactaaatttcagcatcagggatttggcatgctgctgatggaggaagcagaaagaatagctagagaagaacatgggtctgggaaaatcgctgtgatatcaggggtcggcaccaggaattattatagaaagatcggctacagattacaaggcccgtacatggtgaagatgctgaaataatggccacaccagtccactcttctgcagtatcctccctggcagaacacggagaatcaggatttcttaaatactcaacagagaggctgagcagagcaaatggggggcttcaccctcatcccgcagctgcagagactggaaactgccttcaaggccacggctggtcatctgctgaccacaccccagatccgccctctcctgcgtgcaccccaaaaaatcacttgcgtttttgaggcttaaatcatctatccagtttctacattttgcatgaggcctgcaggtggcctattttgactcagacggtgaaaaaagcaaattaactcatttggacaccataactcatgcaataaaactgattgtcattcgaggagcaaacttaagagtagtttatttatataccctggggacagaaagtcaggttgaaacaggaaaaccaccagactctaatctcagccctttaacgacatacgcattggagcgcaagttaggaaaatgagcttttgttttcatggaaatcattctgattacagtgctgatgtttagaaataaatagcagtgtgactgggaaagaggaattgcagttgtgggggtgtgagcctggcagcagccagccagcagcctctcccaggcgggagtctaccatccgagacggcgatgacaaagagcttcattccacattctttgttatctctacttcccaccctcttggcaactacagagcagtgtgggcagccccaagtgtggtccccagagagcgtttggctttcctgtctgtctatcctgagcgggtggagtctcaggttgtgtgcccctaaatcaagatttgcttccacagaagccattacttgcaattttttttttttttctgagaaagtctcgctgtgtcacccaggctggagtgcagtggcgcaatctcactgcatcctccgcctcccgggttcaagcgattctcccgcctcagcctcctgagtagctgggattacaggcacccgccgctgctaatttttgtatttttagtagagatgggggtttcaccatattggtcaggctggtctcgaactcctgacctcaggtgatcaacccaccttggcctccctaaatgccgggattacaggcatgagccaccgctcccagcctttgattttttaaggtggattttggttgttataaatggagaaaggtaagagttcaagttcaacccgtgtgtgaaagcaaaacaatggaaaacaggattggcttcttcaaaggctcctcttgtagaactgcctctttgaaatttcgaggtaatctactttggagactctgcctggagagggtcagttcctaagttaaaagcatcgcttaaccttggctcctgtggcattttacaaaggtttaaaggaattgattcctctgaaagggcctgaaaataaaaagtctttaacatacaaa

SEQ ID NO: 429269 - DNA, 2638 bp, Homo sapiens
agcatccccatgtgcatagttaggaagtagcagagccaggatttgaactcaggcagcctggctccagagcctacactctttaccactatctcatactaggaggacagagagaaggcagttttttgagacagagtaatgtcttaaaacctgcaacaggttaattattttagatttgctctacaggtattctgagagaagcctcacaaagtgtattggaattactattgaaaccagaccagattactgcatgaagcgacatttaagtgacatgttgacctatggctgcacaaggctggagattggggtgcagagtgtttatgaagatgtggctagagacaccaacaggggccacactgtgaaggcagtgtgtgagtcatttcacctggccaaagattccggttttaaagtggtggcccatatgatgcctgacctgccaaacgtgggactagaaagagacattgaacagttcacagagttttttgagaaccctgcttttcgtcccgatgggctgaaactctatcctaccctggtgattcgtgggaccgggctttatgagctttggaaatcaggaagatataagagttactctcctagtgacctggttgaattggtggctcggatcctagccctcgtgcctccatggactcgagtgtaccgagtacagagggatattccaatgcctttagttagctcaggagtagagcatggtaacctgagagagctggcacttgcaagaatgaaagacctcggaatacagtgtcgagatgtgagaaccagagaagttggaatccaagaaattcatcacaaagtacggccataccaggttgaattggtaaggagagattatgttgcaaatggtggctgggaaacattcttgtcatacgaagacccagatcaagacattttgattggcctcctacgattacgcaagtgttcagaagaaactttccgtttcgaattgggtggaggtgtctccatagtacgagagctgcatgtgtatgggagtgtggtccctgtgagcagccgggatcctactaaatttcagcatcagggatttggcatgctgctgatggaggaagcagaaagaatagctagagaagaacatgggtctgggaaaatcgctgtgatatcaggggtcggcaccaggaattattatagaaagatcggctacagattacaaggcccgtacatggtgaagatgctgaaataatggccacaccagtccactcttctgcagtatcctccctggcagaacacggagaatcaggatttcttaaatactcaacagagaggctgagcagagcaaatggggggcttcaccctcatcccgcagctgcagagactggaaactgccttcaaggccacggctggtcatctgctgaccacaccccagatccgccctctcctgcgtgcaccccaaaaaatcacttgcgtttttgaggcttaaatcatctatccagtttctacattttgcatgaggcctgcaggtggcctattttgactcagacggtgaaaaaagcaaattaactcatttggacaccataactcatgcaataaaactgattgtcattcgaggagcaaacttaagagtagtttatttatataccctggggacagaaagtcaggttgaaacaggaaaaccaccagactctaatctcagccctttaacgacatacgcattggagcgcaagttaggaaaatgagcttttgttttcatggaaatcattctgattacagtgctgatgtttagaaataaatagcagtgtgactgggaaagaggaattgcagttgtgggggtgtgagcctggcagcagccagccagcagcctctcccaggcgggagtctaccatccgagacggcgatgacaaagagcttcattccacattctttgttatctctacttcccaccctcttggcaactacagagcagtgtgggcagccccaagtgtggtccccagagagcgtttggctttcctgtctgtctatcctgagcgggtggagtctcaggttgtgtgcccctaaatcaagatttgcttccacagaagccattacttgcaattttttttttttttctgagaaagtctcgctgtgtcacccaggctggagtgcagtggcgcaatctcactgcatcctccgcctcccgggttcaagcgattctcccgcctcagcctcctgagtagctgggattacaggcacccgccgctgctaatttttgtatttttagtagagatgggggtttcaccatattggtcaggctggtctcgaactcctgacctcaggtgatcaacccaccttggcctccctaaatgccgggattacaggcatgagccaccgctcccagcctttgattttttaaggtggattttggttgttataaatggagaaaggtaagagttcaagttcaacccgtgtgtgaaagcaaaacaatggaaaacaggattggcttcttcaaaggctcctcttgtagaactgcctctttgaaatttcgaggtaatctactttggagactctgcctggagagggtcagttcctaagttaaaagcatcgcttaaccttggctcctgtggcattttacaaaggtttaaaggaattgattcctctgaaagggcctgaaaataaaaagtctttaacatacaaa

SEQ ID NO: 429270 - DNA, 1742 bp, Homo sapiens
aactttacgacaggcgggattgttttgtggctgtcagctttccccgtggtctgagtttgtggctgcatttttatctctggtggctctgctacggcggcgcagaaatgaggcagaagcggaaaggagatctcagccctgctgagctgatgatgctgactataggagatgttattaaacaactgattgaagcccacgagcaggggaaagacatcgatctaaataaggtgaaaaccaagacagctgccaaatatggcctttctgcccagccccgcctggtggatatcattgctgccgtccctcctcagtatcgcaaggtcttgatgcccaagttaaaggcgaaacccatcagaactgctagtgggattgctgtcgtggctgtgatgtgcaaaccccacagatgtccacacatcagttttacaggaaatatatgtgtatactgccctggtggacctgattctgattttgagtattccacccagtcttacactggctatgagccaacctccatgagagctatccgtgccagatatgaccctttcctacagacaagacaccgaatagaacagttaaaacaacttggtcatagtgtggataaagtggagtttattgtgatgggtggaacgtttatggcccttccagaagaatacagagattattttattcgaaatttacatgatgccttatcaggacatacttccaacaatatttacgaggcagtcaagtattctgagagaagcctcacaaagtgtattggaattactattgaaaccagaccagattactgcatgaagcgacatttaagtgacatgttgacctatggctgcacaaggctggagattggggtgcagagtgtttatgaagatgtggctagagacaccaacaggggccacactgtgaaggcagtgtgtgagtcatttcacctggccaaagattccggttttaaagtggtggcccatatgatgcctgacctgccaaacgtgggactagaaagagacattgaacagttcacagagttttttgagaaccctgcttttcgtcccgatgggctgaaactctatcctaccctggtgattcgtgggaccgggctttatgagctttggaaatcaggaagatataagagttactctcctagtgacctggttgaattggtggctcggatcctagccctcgtgcctccatggactcgagtgtaccgagtacagagggatattccaatgcctttagttagctcaggagtagagcatggtaacctgagagagctggcacttgcaagaatgaaagacctcggaatacagtgtcgagatgtgagaaccagagaagttggaatccaagaaattcatcacaaagtacggccataccaggttgaattggtaaggagagattatgttgcaaatggtggctgggaaacattcttgtcatacgaagacccagatcaagacattttgattggcctcctacgattacgcaagtgttcagaagaaactttccgtttcgaattgggtggaggtgtctccatagtacgagagctgcatgtgtatgggagtgtggtccctgtgagcagccgggatcctactaaatttcagcatcagggatttggcatgctgctgatggaggaagcagaaagaatagctagagaagaacatgggtctgggaaaatcgctgtgatatcaggggtcggcacccaggaaattatttaaaattttttcaggggtaaaaataaaataggggggtcaaattttttc

SEQ ID NO: 429271 - DNA, 1724 bp, Homo sapiens
aactttacgacaggcgggattgttttgtggctgtcagctttccccgtggtctgagtttgtggctgcatttttatctctggtggctctgctacggcggcgcagaaatgaggcagaagcggaaaggagatctcagccctgctgagctgatgatgctgactataggagatgttattaaacaactgattgaagcccacgagcaggggaaagacatcgatctaaataaggtgaaaaccaagacagctgccaaatatggcctttctgcccagccccgcctggtggatatcattgctgccgtccctcctcagtatcgcaaggtcttgatgcccaagttaaaggcgaaacccatcagaactgctagtgggattgctgtcgtggctgtgatgtgcaaaccccacagatgtccacacatcagttttacaggaaatatatgtgtatactgccctggtggacctgattctgattttgagtattccacccagtcttacactggctatgagccaacctccatgagagctatccgtgccagatatgaccctttcctacagacaagacaccgaatagaacagttaaaacaacttggtcatagtgtggataaagtggagtttattgtgatgggtggaacgtttatggcccttccagaagaatacagagattattttattcgaaatttacatgatgccttatcaggacatacttccaacaatatttacgaggcagtcaagtattctgagagaagcctcacaaagtgtattggaattactattgaaaccagaccagattactgcatgaagcgacatttaagtgacatgttgacctatggctgcacaaggctggagattggggtgcagagtgtttatgaagatgtggctagagacaccaacaggggccacactgtgaaggcagtgtgtgagtcatttcacctggccaaagattccggttttaaagtggtggcccatatgatgcctgacctgccaaacgtgggactagaaagagacattgaacagttcacagagttttttgagaaccctgcttttcgtcccgatgggctgaaactctatcctaccctggtgattcgtgggaccgggctttatgagctttggaaatcaggaagatataagagttactctcctagtgacctggttgaattggtggctcggatcctagccctcgtgcctccatggactcgagtgtaccgagtacagagggatattccaatgcctttagttagctcaggagtagagcatggtaacctgagagagctggcacttgcaagaatgaaagacctcggaatacagtgtcgagatgtgagaaccagagaagttggaatccaagaaattcatcacaaagtacggccataccaggttgaattggtaaggagagattatgttgcaaatggtggctgggaaacattcttgtcatacgaagacccagatcaagacattttgattggcctcctacgattacgcaagtgttcagaagaaactttccgtttcgaattgggtggaggtgtctccatagtacgagagctgcatgtgtatgggagtgtggtccctgtgagcagccgggatcctactaaatttcagcatcagggatttggcatgctgctgatggaggaagcagaaagaatagctagagaagaacatgggtctgggaaaatcgctgtgatatcaggagtggatgtcctggggcagaggcagaggggaggccaccacagaagctgttca

SEQ ID NO: 429272 - DNA, 1714 bp, Homo sapiens
aactttacgacaggcgggattgttttgtggctgtcagctttccccgtggtctgagtttgtggctgcatttttatctctggtggctctgctacggcggcgcagaaatgaggcagaagcggaaaggagatctcagccctgctgagctgatgatgctgactataggagatgttattaaacaactgattgaagcccacgagcaggggaaagacatcgatctaaataaggtgaaaaccaagacagctgccaaatatggcctttctgcccagccccgcctggtggatatcattgctgccgtccctcctcagtatcgcaaggtcttgatgcccaagttaaaggcgaaacccatcagaactgctagtgggattgctgtcgtggctgtgatgtgcaaaccccacagatgtccacacatcagttttacaggaaatatatgtgtatactgccctggtggacctgattctgattttgagtattccacccagtcttacactggctatgagccaacctccatgagagctatccgtgccagatatgaccctttcctacagacaagacaccgaatagaacagttaaaacaacttggtcatagtgtggataaagtggagtttattgtgatgggtggaacgtttatggcccttccagaagaatacagagattattttattcgaaatttacatgatgccttatcaggacatacttccaacaatatttacgaggcagtcaagtattctgagagaagcctcacaaagtgtattggaattactattgaaaccagaccagattactgcatgaagcgacatttaagtgacatgttgacctatggctgcacaaggctggagattggggtgcagagtgtttatgaagatgtggctagagacaccaacaggggccacactgtgaaggcagtgtgtgagtcatttcacctggccaaagattccggttttaaagtggtggcccatatgatgcctgacctgccaaacgtgggactagaaagagacattgaacagttcacagagttttttgagaaccctgcttttcgtcccgatgggctgaaactctatcctaccctggtgattcgtgggaccgggctttatgagctttggaaatcaggaagatataagagttactctcctagtgacctggttgaattggtggctcggatcctagccctcgtgcctccatggactcgagtgtaccgagtacagagggatattccaatgcctttagttagctcaggagtagagcatggtaacctgagagagctggcacttgcaagaatgaaagacctcggaatacagtgtcgagatgtgagaaccagagaagttggaatccaagaaattcatcacaaagtacggccataccaggttgaattggtaaggagagattatgttgcaaatggtggctgggaaacattcttgtcatacgaagacccagatcaagacattttgattggcctcctacgattacgcaagtgttcagaagaaactttccgtttcgaattgggtggaggtgtctccatagtacgagagctgcatgtgtatgggagtgtggtccctgtgagcagccgggatcctactaaatttcagcatcagggatttgcatgctgctgatcgaggagcagaaaatcgttgtgaaagtgttgaaggcacaagcacagagtcagaaagctaaataaaaaaatgaaacttttttgagtaataaaaatgaaaagacgctg

SEQ ID NO: 429273 - DNA, 1583 bp, Homo sapiens
tggggtggggcgcagaacaatctatgtagtccaaagcaccgcgttcaactgcacgactctcttattaaccccgctacggggtcggcaccaggaattattatagaaagatcggctacagattacaaggcccgtacatggtgaagatgctgaaataatggccacaccagtccactcttctgcagtatcctccctggcagaacacggagaatcaggatttcttaaatactcaacagagaggctgagcagagcaaatggggggcttcaccctcatcccgcagctgcagagactggaaactgccttcaaggccacggctggtcatctgctgaccacaccccagatccgccctctcctgcgtgcaccccaaaaaatcacttgcgtttttgaggcttaaatcatctatccagtttctacattttgcatgaggcctgcaggtggcctattttgactcagacggtgaaaaaagcaaattaactcatttggacaccataactcatgcaataaaactgattgtcattcgaggagcaaacttaagagtagtttatttatataccctggggacagaaagtcaggttgaaacaggaaaaccaccagactctaatctcagccctttaacgacatacgcattggagcgcaagttaggaaaatgagcttttgttttcatggaaatcattctgattacagtgctgatgtttagaaataaatagcagtgtgactgggaaagaggaattgcagttgtgggggtgtgagcctggcagcagccagccagcagcctctcccaggcgggagtctaccatccgagacggcgatgacaaagagcttcattccacattctttgttatctctacttcccaccctcttggcaactacagagcagtgtgggcagccccaagtgtggtccccagagagcgtttggctttcctgtctgtctatcctgagcgggtggagtctcaggttgtgtgcccctaaatcaagatttgcttccacagaagccattacttgcaattttttttttttttctgagaaagtctcgctgtgtcacccaggctggagtgcagtggcgcaatctcactgcatcctccgcctcccgggttcaagcgattctcccgcctcagcctcctgagtagctgggattacaggcacccgccgctgctaatttttgtatttttagtagagatgggggtttcaccatattggtcaggctggtctcgaactcctgacctcaggtgatcaacccaccttggcctccctaaatgccgggattacaggcatgagccaccgctcccagcctttgattttttaaggtggattttggttgttataaatggagaaaggtaagagttcaagttcaacccgtgtgtgaaagcaaaacaatggaaaacaggattggcttcttcaaaggctcctcttgtagaactgcctctttgaaatttcgaggtaatctactttggagactctgcctggagagggtcagttcctaagttaaaagcatcgcttaaccttggctcctgtggcattttacaaaggtttaaaggaattgattcctctgaaagggcctgaaaataaaaagtctttaacatacaaa

SEQ ID NO: 429274 - DNA, 1579 bp, Homo sapiens
tgtagaataacataataagagagccgggggggaattataggcagacgtgactctctttataaccaccgcctcaggggtcggcaccaggaattattatagaaagatcggctacagattacaaggcccgtacatggtgaagatgctgaaataatggccacaccagtccactcttctgcagtatcctccctggcagaacacggagaatcaggatttcttaaatactcaacagagaggctgagcagagcaaatggggggcttcaccctcatcccgcagctgcagagactggaaactgccttcaaggccacggctggtcatctgctgaccacaccccagatccgccctctcctgcgtgcaccccaaaaaatcacttgcgtttttgaggcttaaatcatctatccagtttctacattttgcatgaggcctgcaggtggcctattttgactcagacggtgaaaaaagcaaattaactcatttggacaccataactcatgcaataaaactgattgtcattcgaggagcaaacttaagagtagtttatttatataccctggggacagaaagtcaggttgaaacaggaaaaccaccagactctaatctcagccctttaacgacatacgcattggagcgcaagttaggaaaatgagcttttgttttcatggaaatcattctgattacagtgctgatgtttagaaataaatagcagtgtgactgggaaagaggaattgcagttgtgggggtgtgagcctggcagcagccagccagcagcctctcccaggcgggagtctaccatccgagacggcgatgacaaagagcttcattccacattctttgttatctctacttcccaccctcttggcaactacagagcagtgtgggcagccccaagtgtggtccccagagagcgtttggctttcctgtctgtctatcctgagcgggtggagtctcaggttgtgtgcccctaaatcaagatttgcttccacagaagccattacttgcaattttttttttttttctgagaaagtctcgctgtgtcacccaggctggagtgcagtggcgcaatctcactgcatcctccgcctcccgggttcaagcgattctcccgcctcagcctcctgagtagctgggattacaggcacccgccgctgctaatttttgtatttttagtagagatgggggtttcaccatattggtcaggctggtctcgaactcctgacctcaggtgatcaacccaccttggcctccctaaatgccgggattacaggcatgagccaccgctcccagcctttgattttttaaggtggattttggttgttataaatggagaaaggtaagagttcaagttcaacccgtgtgtgaaagcaaaacaatggaaaacaggattggcttcttcaaaggctcctcttgtagaactgcctctttgaaatttcgaggtaatctactttggagactctgcctggagagggtcagttcctaagttaaaagcatcgcttaaccttggctcctgtggcattttacaaaggtttaaaggaattgattcctctgaaagggcctgaaaataaaaagtctttaacatacaaa

SEQ ID NO: 429275 - DNA, 796 bp, Homo sapiens
aactttacgacaggcgggattgttttgtggctgtcagctttccccgtggtctgagtttgtggctgcatttttatctctggtggctctgctacggcggcgcagaaatgaggcagaagcggaaaggagatctcagccctgctgagctgatgatgctgactataggagatgttattaaacaactgattgaagcccacgagcaggggaaagacatcgatctaaataaggtgaaaaccaagacagctgccaaatatggcctttctgcccagccccgcctggtggatatcattgctgccgtccctcctcagtatcgcaaggtcttgatgcccaagttaaaggcgaaacccatcagaactgctagtgggattgctgtcgtggctgtgatgtgcaaaccccacagatgtccacacatcagttttacaggaaatatatgtgtatactgccctggtggacctgattctgattttgagtattccacccagtcttacactggctatgagccaacctccatgagagctatccgtgccagatatgaccctttcctacagacaagacaccgaatagaacagaaagcagacttgaagtgcctcctgtgcctggaatcatccatcaattttagactgctgtcttgatttttctttccaatctattctttttttcttccattacatcaaatccttattatgttacataatcattcatgtatcattgttgaccataaatgccacctttttgtcctctaggcttaccaccaagtctgacataaaatacatgatcaataaatacttactgttttgca

SEQ ID NO: 429276 - DNA, 1670 bp, Homo sapiens
cccagcctctaccttgctctgctggctcttgctcttcaacctaggaacgtgcctgagcttttctcatcttaaacaaaacaacaataacagcaacacaagcaaaatctcctttgaccctgcatccctctgttgggttatcatcagcttatcattcccacccttcccatcaaaacatctcaaaagagtagtctacactcaacactctccatttcctcactaccctcttactcctcaacctgctgcaatttgacattcacccccagagttgctttgacctcctaattaccaaatcagtgggcccttgtcagtctctgtgtctgctgcattgatgctgtttaccaccccctcctcaaaaaatgcctgtgcttattactagttcctataaagtgctgaaacccaaatctgtctagccctggcccctcccccaagattcagcctcctgtactcgactacatgtcagacatctccccttggatggcccacaggcaccttactgtgaccaaaagagaattggtcgtctcagtccccatctcaactctaaagtgatcttcctcctctgttccctatctcacttggtggcggcaccatctaccctgtcctgttgactctcgaatacttcccaaatctgaggttttgtgttgccgtgtctacttcccttagtgtctccttccctctatcagactaagcttttcaagggcaaggactctacatcagctgtccgtgccctagcacaccacacaagtctaggcaccaaacaggcctcagtaaatgtcgttgaattgaaccgtgctctgctctctcattcccagcagtgctgtccttggtgggagctgacccagtgcctggggaatgaatgaagtgggagtctggatgccaagaccctcttagtccctgatccccctattgagtccaaaagtctttctttaaccctgatggcatttgggacacagaggtatttgtaaggttttaaaagtggctttgtagacaaagtcagtcaaggcaagacttccaggagttggaactgaacagccacattgccagatgtgtgctccagactagaagtgatgtggatgggtgggcaattgggaggagaaccaaaagggcctggatgagtcagagtttcaagaggaggcatttgaacaattcaagcaggagaaagaataaagcaagtttcaaagtccagaaggaacatggcatgtgtatataatgggagggagggagtgacaagagcagcatggagaggtttggataggtggccttcaaggtactttccaatcctaagtgcctgcagagtggaagctgctggtctcggagaagtctggaccacagagatcttctcccaacccaagcataccagagggatgcgacacatgccggcagtaacagcggctcacttgggtacgatttcttgtgcacagatcctgcctttcccagataagcagtgaatctagtcctaatcaccccgttacacagagtggagaacagagggggtttgcccaggtattatgctgcaagtcagagctggggccagaatccagatagcctgtccttagtcccatgctcttctgtaatactccactagattgtattattgcagaaagcatctgttaaacacagaacttggcttttgttttccccagagaaaaaataaaagatactattggaaatta

SEQ ID NO: 429277 - DNA, 2494 bp, Homo sapiens
ttggctgctggtgcggtggcggttcggagtgagggtagcacgctgagctgaaggctgtgcggagcggcgcggcacagagcctgttgttgagctcagtatgtcgtgggaatccggggccgggccaggtctaggttcccaggggatggatctcgtgtggagtgcgtggtacggaaagtgcgttaaagggaaagggtcgttgccactctcggcccacggcatcgtggtcgcctggctcagcagggccgagtgggaccaggtgacggtttatctgttctgtgacgaccataagttgcagcggtacgcgcttaaccgcatcacggtgtggaggagcaggtcaggcaacgaactccctctggcagtggcttctactgctgacctgatacgctgtaagctcttggatgtaactggtggcttgggcactgatgaacttagactgctctatggcatggcattggtcaggtttgtgaatcttatctcagagaggaagacaaagtttgccaaggtccccctcaagtgtctggctcaagaggtaaatattccggattggattgttgaccttcgccatgagttgacccacaagaaaatgccccatataaatgactgccgcagaggctgctactttgtcctggattggctccagaagacctattggtgccgccaactggagaacagcctgagagagacctgggagttggaggagttcagggaagggatagaggaagaggatcaagaggaagataagaacattgttgttgatgacatcacagaacagaaaccagagcctcaggatgatgggaaaagtacggagtcagatgtaaaggccgatggagacagcaaaggcagcgaagaggtggattctcattgcaaaaaggccctgagtcataaagagctatatgaaagagcccgagaactgctggtatcatacgaagaggagcagtttacggtgctggagaaatttaggtatttacctaaggccattaaggcgtggaataacccgtccccacgtgtagaatgtgtcctggcagagctcaagggcgttacatgcgagaacagggaggctgtgctggatgcttttctggatgatggcttccttgtccccacatttgaacagttggcagctttgcagatagaatatgaagatggtcagactgaggtccagagaggggaaggtactgacccaaagtcacacaaaaacgtggacttgaatgacgtcctggtgccaaagccgttctctcagttctggcagcccctgctcaggggcctgcactcccagaacttcacgcaggccctattggagaggatgctctctgaactgccagccttggggatcagcgggatccggcctacctacatcctcagatggaccgttgaactgatcgtggccaacaccaagactggacggaatgctcgccgattttctgcaggccagtgggaagcaagaaggggctggaggctgttcaactgctccgcctcccttgactggccccggatggttgagtcctgcttgggctcaccttgctgggccagcccccaactccttcggatcatcttcaaagccatggggcagggcctgccagacgaggagcaggagaagctgctgcgcatctgttccatttatacccagagtggagaaaacagcctggtgcaggagggctctgaggcctcccccattgggaagtctccatatacactagacagcctgtattggagcgtcaagccagccagctccagcttcgggtctgaagcaaaggcccagcaacaggaggagcagggcagtgttaatgatgtcaaggaagaggagaaggaggagaaagaggtcttgccagaccaggtagaggaggaggaagaaaatgatgaccaagaggaggaagaggaggatgaagatgatgaagatgatgaagaggaagacagaatggaggtggggcctttctctacagggcaagagtcccccactgccgagaatgctaggcttctggcccagaaaagaggagctttgcagggctctgcatggcaggttagctcagaagacgtgcgatgggacacatttcccctaggccgaatgccaggtcagaccgaggacccagcagagctcatgctggagaattatgacaccatgtatcttttggaccagcctgtgctagagcagcggctggaaccctcaacatgcaagactgacaccttgggcctgagctgtggtgtcggcagtggcaactgcagcaacagcagcagcagcaacttcgagggccttctctggagccaggggcagctgcatgggctcaaaactggcctgcagctcttctgatggccatccctggtgcaagtgttcatccagccgtgccagggcaacagcccaccccctagtacaactgatgctccctgagacaacctgggagacagcctggatcagccacatcaactcagttgtccaccacaggggaattttgaatgtcttttgtttttgttttgttttgaaaaataataaacaggcaactgt

SEQ ID NO: 429278 - DNA, 600 bp, Homo sapiens
aacccaaacagctctgctttaatctggtttatctactagggctctgcataaaacttcatttgaaaagttcttgcctccttccctcccttcctcaactgaggagagggccaagtcaaccctggggcccacacgaagtcgtttctcggatttgctccagtctctttgtaaagccaggcaggagagtgggcccatcccacagatacacacatgtcaagcactcttggcccctccagagcctaaagctgcctccttccctgactgacctcccactctctcctcagcaccttgggcctgagctgtggtgtcggcagtggcaactgcagcaacagcagcagcagcaacttcgagggccttctctggagccaggggcagctgcatgggctcaaaactggcctgcagctcttctgatggccatccctggtgcaagtgttcatccagccgtgccagggcaacagcccaccccctagtacaactgatgctccctgagacaacctgggagacagcctggatcagccacatcaactcagttgtccaccacaggggaattttgaatgtcttttgtttttgttttgttttgaaaaataataaacaggcaactgt

SEQ ID NO: 429279 - DNA, 747 bp, Homo sapiens
  misc_feature (19)..(20): n is a, c, g, or t
  misc_feature (22)..(22): n is a, c, g, or t
tacggctaggtacgaggcnngntgttataagaacattgttgttgatgacatcacagaacagaaaccagagcctcaggatgatgggaaaagtacggagtcagatgtaaaggccgatggagacagcaaaggcagcgaagaggtggattctcattgcaaaaaggccctgagtcataaagagctatatgaaagagcccgagaactgctggtatcatacgaagaggagcagtttacggtgctggagaaatttaggtatttacctaaggccattaaggcgtggaataacccgtccccacgtgtagaatgtgtcctggcagagctcaagggcgttacatgcgagaacagggaggctgtgctggatgcttttctggatgatggcttccttgtccccacatttgaacagttggcagctttgcagatagaatatgaagatggtcagactgaggtccagagaggggaaggtactgacccaaagtcacacaaaaacgtggacttgaatgacgtcctggtgccaaagccgttctctcagttctggcagcccctgctcaggggcctgcactcccagaacttcacgcaggccctattggagaggatgctctctgaactgccagccttggggatcagcgggatccggcctacctacatcctcagatggaccgttgaactgatcgtggccaacaccaagactggacggaatgtcgcgatttctgaggcagtgtgcgccagaggggtggggctgtcactgtccgc

SEQ ID NO: 429280 - DNA, 276 bp, Homo sapiens
acataaaaagctggtccagggttgacacattatagaatccaggggcagctgcatgggctcaaaactggcctgcagctcttctgatggccatccctggtgcaagtgttcatccagccgtgccagggcaacagcccaccccctagtacaactgatgctccctgagacaacctgggagacagcctggatcagccacatcaactcagttgtccaccacaggggaattttgaatgtcttttgtttttgttttgttttgaaaaataataaacaggcaactgt

SEQ ID NO: 429281 - DNA, 2848 bp, Homo sapiens
ttggctgctggtgcggtggcggttcggagtgagggtagcacgctgagctgaaggctgtgcggagcggcgcggcacagagcctgttgttgagctcagtatgtcgtgggaatccggggccgggccaggtctaggttcccaggggatggatctcgtgtggagtgcgtggtacggaaagtgcgttaaagggaaagggtcgttgccactctcggcccacggcatcgtggtcgcctggctcagcagggccgagtgggaccaggtgacggtttatctgttctgtgacgaccataagttgcagcggtacgcgcttaaccgcatcacggtgtggaggagcaggtcaggcaacgaactccctctggcagtggcttctactgctgacctgatacgctgtaagctcttggatgtaactggtggcttgggcactgatgaacttagactgctctatggcatggcattggtcaggtttgtgaatcttatctcagagaggaagacaaagtttgccaaggtccccctcaagtgtctggctcaagaggtaaatattccggattggattgttgaccttcgccatgagttgacccacaagaaaatgccccatataaatgactgccgcagaggctgctactttgtcctggattggctccagaagacctattggtgccgccaactggagaacagcctgagagagacctgggagttggaggagttcagggaagggatagaggaagaggatcaagaggaagataagaacattgttgttgatgacatcacagaacagaaaccagagcctcaggatgatgggaaaagtacggagtcagatgtaaaggccgatggagacagcaaaggcagcgaagaggtggattctcattgcaaaaaggccctgagtcataaagagctatatgaaagagcccgagaactgctggtatcatacgaagaggagcagtttacggtgctggagaaatttaggtatttacctaaggccattaaggcgtggaataacccgtccccacgtgtagaatgtgtcctggcagagctcaagggcgttacatgcgagaacagggaggctgtgctggatgcttttctggatgatggcttccttgtccccacatttgaacagttggcagctttgcagatagaatatgaagaaaacgtggacttgaatgacgtcctggtgccaaagccgttctctcagttctggcagcccctgctcaggggcctgcactcccagaacttcacgcaggccctattggagaggatgctctctgaactgccagccttggggatcagcgggatccggcctacctacatcctcagatggaccgttgaactgatcgtggccaacaccaagactggacggaatgctcgccgattttctgcaggccagtgggaagcaagaaggggctggaggctgttcaactgctccgcctcccttgactggccccggatggttgagtcctgcttgggctcaccttgctgggccagcccccaactccttcggatcatcttcaaagccatggggcagggcctgccagacgaggagcaggagaagctgctgcgcatctgttccatttatacccagagtggagaaaacagcctggtgcaggagggctctgaggcctcccccattgggaagtctccatatacactagacagcctgtattggagcgtcaagccagccagctccagcttcgggtctgaagcaaaggcccagcaacaggaggagcagggcagtgttaatgatgtcaaggaagaggagaaggaggagaaagaggtcttgccagaccaggtagaggaggaggaagaaaatgatgaccaagaggaggaagaggaggatgaagatgatgaagatgatgaagaggaagacagaatggaggtggggcctttctctacagggcaagagtcccccactgccgagaatgctaggcttctggcccagaaaagaggagctttgcagggctctgcatggcaggttagctcagaagacgtgcgatgggacacatttcccctaggccgaatgccaggtcagaccgaggacccagcagagctcatgctggagaattatgacaccatgtatcttttggaccagcctgtgctagagcagcggctggaaccctcaacatgcaagactgacaccttgggcctgagctgtggtgtcggcagtggcaactgcagcaacagcagcagcagcaacttcgagggccttctctggagccaggggcagctgcatgggctcaaaactggcctgcagctcttctgatggccatccctggtgcaagtgttcatccagccgtgccagggcaacagcccaccccctagtacaactgatgctccctgagacaacctgggagacagcctggatcagccacatcaactcagttgtccaccacaggggaattttgaatgtcttttgtttttgttttgttttgaaaaataataaacaggcaactgttaaaaaaaaaaaaaaaaaaaaaaaaaaaaaaaaaaaaaaaaaaaaaaaaaaaaaaaaaaaaaaaaaaaaaaaaaaaaaaaaaaaaaaaaaaaaaaaaaaaaaaaaataaaaaacaaagctaacaaacaaaacaaaacaaaggaagaggggggcgagcgacaagcgcacataactaaacaacgcgcggagagggcacgaacaacgagccagccccacctgcgtttttatgtgagaggcggccgccagcccgagcacggggccacacatgacggcaccaggcggcgggggcacgccgatcacacaacggaggacgagaaacagccggcgatgagtgtgctacggaagacacaccccctgtggcggggagcagacgggagcagccaccaccccacagggcggccgcgg

SEQ ID NO: 429282 - DNA, 2333 bp, Homo sapiens
ttggctgctggtgcggtggcggttcggagtgagggtagcacgctgagctgaaggctgtgcggagcggcgcggcacagagcctgttgttgagctcagtatgtcgtgggaatccggggccgggccaggtctaggttcccaggggatggatctcgtgtggagtgcgtggtacggaaagtgcgttaaagggaaagggtcgttgccactctcggcccacggcatcgtggtcgcctggctcagcagggccgagtgggaccaggtgacggtttatctgttctgtgacgaccataagttgcagcggtacgcgcttaaccgcatcacggtgtggaggagcaggtcaggcaacgaactccctctggcagtggcttctactgctgacctgatacgctgtaagctcttggatgtaactggtggcttgggcactgatgaacttagactgctctatggcatggcattggtcaggtttgtgaatcttatctcagagaggaagacaaagtttgccaaggtccccctcaagtgtctggctcaagaggtaaatattccggattggattgttgaccttcgccatgagttgacccacaagaaaatgccccatataaatgactgccgcagaggctgctactttgtcctggattggctccagaagacctattggtgccgccaactggagaacagcctgagagagacctgggagttggaggagttcagggaagggatagaggaagaggatcaagaggaagataagaacattgttgttgatgacatcacagaacagaaaccagagcctcaggatgatgggaaaagtacggagtcagatgtaaaggccgatggagacagcaaaggcagcgaagaggtggattctcattgcaaaaaggccctgagtcataaagagctatatgaaagagcccgagaactgctggtatcatacgaagaggagcagtttacgggaggctgtgctggatgcttttctggatgatggcttccttgtccccacatttgaacagttggcagctttgcagatagaatatgaagaaaacgtggacttgaatgacgtcctggtgccaaagccgttctctcagttctggcagcccctgctcaggggcctgcactcccagaacttcacgcaggccctattggagaggatgctctctgaactgccagccttggggatcagcgggatccggcctacctacatcctcagatggaccgttgaactgatcgtggccaacaccaagactggacggaatgctcgccgattttctgcaggccagtgggaagcaagaaggggctggaggctgttcaactgctccgcctcccttgactggccccggatggttgagtcctgcttgggctcaccttgctgggccagcccccaactccttcggatcatcttcaaagccatggggcagggcctgccagacgaggagcaggagaagctgctgcgcatctgttccatttatacccagagtggagaaaacagcctggtgcaggagggctctgaggcctcccccattgggaagtctccatatacactagacagcctgtattggagcgtcaagccagccagctccagcttcgggtctgaagcaaaggcccagcaacaggaggagcagggcagtgttaatgatgtcaaggaagaggagaaggaggagaaagaggtcttgccagaccaggtagaggaggaggaagaaaatgatgaccaagaggaggaagaggaggatgaagatgatgaagatgatgaagaggaagacagaatggaggtggggcctttctctacagggcaagagtcccccactgccgagaatgctaggcttctggcccagaaaagaggagctttgcagggctctgcatggcaggttagctcagaagacgtgcgatgggacacatttcccctaggccgaatgccaggtcagaccgaggacccagcagagctcatgctggagaattatgacaccatgtatcttttggaccagcctgtgctagagcagcggctggaaccctcaacatgcaagactgacaccttgggcctgagctgtggtgtcggcagtggcaactgcagcaacagcagcagcagcaacttcgagggccttctctggagccaggggcagctgcatgggctcaaaactggcctgcagctcttctgatggccatccctggtgcaagtgttcatccagccgtgccagggcaacagcccaccccctagtacaactgatgctccctgagacaacctgggagacagcctggatcagccacatcaactcagttgtccaccacaggggaattttgaatgtcttttgtttttgttttgttttgaaaaataataaacaggcaactgt

SEQ ID NO: 429283 - DNA, 2158 bp, Homo sapiens
  misc_feature (2133)..(2133): n is a, c, g, or t
ttggctgctggtgcggtggcggttcggagtgagggtagcacgctgagctgaaggctgtgcggagcggcgcggcacagagcctgttgttgagctcagtatgtcgtgggaatccggggccgggccaggtctaggttcccaggggatggatctcgtgtggagtgcgtggtacggaaagtgcgttaaagggaaagggtcgttgccactctcggcccacggcatcgtggtcgcctggctcagcagggccgagtgggaccaggtgacggtttatctgttctgtgacgaccataagttgcagcggtacgcgcttaaccgcatcacggtgtggaggagcaggtcaggcaacgaactccctctggcagtggcttctactgctgacctgatacgctgtaagctcttggatgtaactggtggcttgggcactgatgaacttagactgctctatggcatggcattggtcaggtttgtgaatcttatctcagagaggaagacaaagtttgccaaggtccccctcaagtgtctggctcaagaggtaaatattccggattggattgttgaccttcgccatgagttgacccacaagaaaatgccccatataaatgactgccgcagaggctgctactttgtcctggattggctccagaagacctattggtgccgccaactggagaacagcctgagagagacctgggagttggaggagttcagggaagggatagaggaagaggatcaagaggaagataagaacattgttgttgatgacatcacagaacagaaaccagagcctcaggatgatgggaaaagtacggagtcagatgtaaaggccgatggagacagcaaaggcagcgaagaggtggattctcattgcaaaaaggccctgagtcataaagagctatatgaaagagcccgagaactgctggtatcatacgaagaggagcagtttacggtgctggagaaatttaggtatttacctaaggccattaaggcgtggaataacccgtccccacgtgtagaatgtgtcctggcagagctcaagggcgttacatgcgagaacagggaggctgtgctggatgcttttctggatgatggcttccttgtccccacatttgaacagttggcagctttgcagatagaatatgaagaaaacgtggacttgaatgacgtcctggtgccaaagccgttctctcagttctggcagcccctgctcaggggcctgcactcccagaacttcacgcaggccctattggagaggatgctctctgaactgccagccttggggatcagcgggatccggcctacctacatcctcagatggaccgttgaactgatcgtggccaacaccaagactggacggaatgctcgccgattttctgcaggccagtgggaagcaagaaggggctggaggctgttcaactgctccgcctcccttgactggccccggatggttgagtcctgcttgggctcaccttgctgggccagcccccaactccttcggatcatcttcaaagccatggggcagggcctgccagacgaggagcaggagaagctgctgcgcatctgttccatttatacccagagtggagaaaacagcctggtgcaggagggctctgaggcctcccccattgggaagtctccatatacactagacagcctgtattggagcgtcaagccagccagctccagcttcgggtctgaagcaaaggcccagcaacaggaggagcagggcagtgttaatgatgtcaaggaagaggagaaggaggagaaagaggtcttgccagaccaggtagaggaggaggaagaaaatgatgaccaagaggaggaagaggaggatgaagatgatgaagatgatgaagaggaagacagaatggaggtggggcctttctctacagggcaagagtcccccactgccgagaatgctaggcttctggcccagaaaagaggagctttgcagggctctgcatggcaggttagctcagaagacgtgcgatgggacacatttcccctaggccgaatgccaggtcagaccgaggacccagcagagctcatgctggagaattatgacaccatgtatcttttggaccagcctgtgctagagcagcggctggaaccctcaacatgcaagactgaccatcttantctgggcccagcctgctggtccgca

SEQ ID NO: 429284 - DNA, 2794 bp, Homo sapiens
ttggctgctggtgcggtggcggttcggagtgagggtagcacgctgagctgaaggctgtgcggagcggcgcggcacagagcctgttgttgagctcagtatgtcgtgggaatccggggccgggccaggtctaggttcccaggggatggatctcgtgtggagtgcgtggtacggaaagtgcgttaaagggaaagggtcgttgccactctcggcccacggcatcgtggtcgcctggctcagcagggccgagtgggaccaggtgacggtttatctgttctgtgacgaccataagttgcagcggtacgcgcttaaccgcatcacggtgtggaggagcaggtcaggcaacgaactccctctggcagtggcttctactgctgacctgatacgctgtaagctcttggatgtaactggtggcttgggcactgatgaacttagactgctctatggcatggcattggtcaggtttgtgaatcttatctcagagaggaagacaaagtttgccaaggtccccctcaagtgtctggctcaagaggtaaatattccggattggattgttgaccttcgccatgagttgacccacaagaaaatgccccatataaatgactgccgcagaggctgctactttgtcctggattggctccagaagacctattggtgccgccaactggagaacagcctgagagagacctgggagttggaggagttcagggaagggatagaggaagaggatcaagaggaagataagaacattgttgttgatgacatcacagaacagaaaccagagcctcaggatgatgggaaaagtacggagtcagatgtaaaggccgatggagacagcaaaggcagcgaagaggtggattctcattgcaaaaaggccctgagtcataaagagctatatgaaagagcccgagaactgctggtatcatacgaagaggagcagtttacggtgctggagaaatttaggtatttacctaaggccattaaggcgtggaataacccgtccccacgtgtagaatgtgtcctggcagagctcaagggcgttacatgcgagaacagggaggctgtgctggatgcttttctggatgatggcttccttgtccccacatttgaacagttggcagctttgcagatagaatatgaagaaaacgtggacttgaatgacgtcctggtgccaaagccgttctctcagttctggcagcccctgctcaggggcctgcactcccagaacttcacgcaggccctattggagaggatgctctctgaactgccagccttggggatcagcgggatccggcctacctacatcctcagatggaccgttgaactgatcgtggccaacaccaagactggacggaatgctcgccgattttctgcaggccagtgggaagcaagaaggggctggaggctgttcaactgctccgcctcccttgactggccccggatggttgagtcctgcttgggctcaccttgctgggccagcccccaactccttcggatcatcttcaaagccatggggcagggcctgccagacgaggagcaggagaagctgctgcgcatctgttccatttatacccagagtggagaaaacagcctggtgcaggagggctctgaggcctcccccattgggaagtctccatatacactagacagcctgtattggagcgtcaagccagccagctccagcttcgggtctgaagcaaaggcccagcaacaggaggagcagggcagtgttaatgatgtcaaggaagaggagaaggaggagaaagaggtcttgccagaccaggtagaggaggaggaagaaaatgatgaccaagaggaggaagaggaggatgaagatgatgaagatgatgaagaggaagacagaatggaggtggggcctttctctacagggcaagagtcccccactgccgagaatgctaggcttctggcccagaaaagaggagctttgcagggctctgcatggcaggttagctcagaagacgtgcgatgggacacatttcccctaggccgaatgccaggtcaggaccagcctgtgctagagcagcggctggaaccctcaacatgcaagactgacaccttgggcctgagctgtggtgtcggcagtggcaactgcagcaacagcagcagcagcaacttcgagggccttctctggagccaggggcagctgcatgggctcaaaactggcctgcagctcttctgatggccatccctggtgcaagtgttcatccagccgtgccagggcaacagcccaccccctagtacaactgatgctccctgagacaacctgggagacagcctggatcagccacatcaactcagttgtccaccacaggggaattttgaatgtcttttgtttttgttttgttttgaaaaataataaacaggcaactgttaaaaaaaaaaaaaaaaaaaaaaaaaaaaaaaaaaaaaaaaaaaaaaaaaaaaaaaaaaaaaaaaaaaaaaaaaaaaaaaaaaaaaaaaaaaaaaaaaaaaaaaaataaaaaacaaagctaacaaacaaaacaaaacaaaggaagaggggggcgagcgacaagcgcacataactaaacaacgcgcggagagggcacgaacaacgagccagccccacctgcgtttttatgtgagaggcggccgccagcccgagcacggggccacacatgacggcaccaggcggcgggggcacgccgatcacacaacggaggacgagaaacagccggcgatgagtgtgctacggaagacacaccccctgtggcggggagcagacgggagcagccaccaccccacagggcggccgcgg

SEQ ID NO: 429285 - DNA, 1840 bp, Homo sapiens
ggagaatggggccagaacaatatacagggcgaacaggaaagggcaaaccgtagggacaggcgagaacagcctgagagagacctgggagttggaggagttcagggaagggatagaggaagaggatcaagaggaagataagaacattgttgttgatgacatcacagaacagaaaccagagcctcaggatgatgggaaaagtacggagtcagatgtaaaggccgatggagacagcaaaggcagcgaagaggtggattctcattgcaaaaaggccctgagtcataaagagctatatgaaagagcccgagaactgctggtatcatacgaagaggagcagtttacggtgctggagaaatttaggtatttacctaaggccattaaggcgtggaataacccgtccccacgtgtagaatgtgtcctggcagagctcaagggcgttacatgcgagaacagggaggctgtgctggatgcttttctggatgatggcttccttgtccccacatttgaacagttggcagctttgcagatagaatatgaagaaaacgtggacttgaatgacgtcctggtgccaaagccgttctctcagttctggcagcccctgctcaggggcctgcactcccagaacttcacgcaggccctattggagaggatgctctctgaactgccagccttggggatcagcgggatccggcctacctacatcctcagatggaccgttgaactgatcgtggccaacaccaagactggacggaatgctcgccgattttctgcaggccagtgggaagcaagaaggggctggaggctgttcaactgctccgcctcccttgactggccccggatggttgagtcctgcttgggctcaccttgctgggccagcccccaactccttcggatcatcttcaaagccatggggcagggcctgccagacgaggagcaggagaagctgctgcgcatctgttccatttatacccagagtggagaaaacagcctggtgcaggagggctctgaggcctcccccattgggaagtctccatatacactagacagcctgtattggagcgtcaagccagccagctccagcttcgggtctgaagcaaaggcccagcaacaggaggagcagggcagtgttaatgatgtcaaggaagaggagaaggaggagaaagaggtcttgccagaccaggtagaggaggaggaagaaaatgatgaccaagaggaggaagaggaggatgaagatgatgaagatgatgaagaggaagacagaatggaggtggggcctttctctacagggcaagagtcccccactgccgagaatgctaggcttctggcccagaaaagaggagctttgcagggctctgcatggcaggttagctcagaagacgtgcgatgggacacatttcccctaggccgaatgccaggtcagaccgaggacccagcagagctcatgctggagaattatgacaccatgtatcttttggaccagcctgtgctagagcagcggctggaaccctcaacatgcaagactgacaccttgggcctgagctgtggtgtcggcagtggcaactgcagcaacagcagcagcagcaacttcgagggccttctctggagccaggggcagctgcatgggctcaaaactggcctgcagctcttctgatggccatccctggtgcaagtgttcatccagccgtgccagggcaacagcccaccccctagtacaactgatgctccctgagacaacctgggagacagcctggatcagccacatcaactcagttgtccaccacaggggaattttgaatgtcttttgtttttgttttgttttgaaaaataataaacaggcaactgt

SEQ ID NO: 429286 - DNA, 2352 bp, Homo sapiens
ttggctgctggtgcggtggcggttcggagtgagggtagcacgctgagctgaaggctgtgcggagcggcgcggcacagagcctgttgttgagctcagtatgtcgtgggaatccggggccgggccaggtctaggttcccaggggatggatctcgtgtggagtgcgtggtacggaaagtgcgttaaagggaaagggtcgttgccactctcggcccacggcatcgtggtcgcctggctcagcagggccgagtgggaccaggtgacggtttatctgttctgtgacgaccataagttgcagcggtacgcgcttaaccgcatcacggtgtggaggagcaggtcaggcaacgaactccctctggcagtggcttctactgctgacctgatacgctgtaagctcttggatgtaactggtggcttgggcactgatgaacttagactgctctatggcatggcattggtcaggtttgtgaatcttatctcagagaggaagacaaagtttgccaaggtccccctcaagtgtctggctcaagaggtaaatattccggattggattgttgaccttcgccatgagttgacccacaagaaaatgccccatataaatgactgccgcagaggctgctactttgtcctggattggctccagaagacctattggtgccgccaactggagaacagcctgagagagacctgggagttggaggagttcagggaagggatagaggaagaggatcaagaggaagataagaacattgttgttgatgacatcacagaacagaaaccagagcctcaggatgatgggaaaagtacggagtcagatgtaaaggccgatggagacagcaaaggcagcgaagaggtggattctcattgcaaaaaggccctgagtcataaagagctatatgaaagagcccgagaactgctggtatcatacgaagaggagcagtttacggtgctggagaaatttaggtatttacctaaggccattaaggcgtggaataacccgtccccacgtgtagaatgtgtcctggcagagctcaagggcgttacatgcgagaacagggaggctgtgctggatgcttttctggatgatggcttccttgtccccacatttgaacagttggcagctttgcagatagaatatgaagaaaacgtggacttgaatgacgtcctggtgccaaagccgttctctcagttctggcagcccctgctcaggggcctgcactcccagaacttcacgcaggccctattggagaggatgctctctgaactgccagccttggggatcagcgggatccggcctacctacatcctcagatggaccgttgaactgatcgtggccaacaccaagactggacggaatgctcgccgattttctgcaggccagtgggaagcaagaaggggctggaggctgttcaactgctccgcctcccttgactggccccggatggttgagtcctgcttgggctcaccttgctgggccagcccccaactccttcggattgctgtccttggtgggagctgacccagtgcctggggaatgaatgaagtgggagtctggatgccaagaccctcttagtccctgatccccctattgagtccaaaagtctttctttaaccctgatggcatttgggacacagaggtatttgtaaggttttaaaagtggctttgtagacaaagtcagtcaaggcaagacttccaggagttggaactgaacagccacattgccagatgtgtgctccagactagaagtgatgtggatgggtgggcaattgggaggagaaccaaaagggcctggatgagtcagagtttcaagaggaggcatttgaacaattcaagcaggagaaagaataaagcaagtttcaaagtccagaaggaacatggcatgtgtatataatgggagggagggagtgacaagagcagcatggagaggtttggataggtggccttcaaggtactttccaatcctaagtgcctgcagagtggaagctgctggtctcggagaagtctggaccacagagatcttctcccaacccaagcataccagagggatgcgacacatgccggcagtaacagcggctcacttgggtacgatttcttgtgcacagatcctgcctttcccagataagcagtgaatctagtcctaatcaccccgttacacagagtggagaacagagggggtttgcccaggtattatgctgcaagtcagagctggggccagaatccagatagcctgtccttagtcccatgctcttctgtaatactccactagattgtattattgcagaaagcatctgttaaacacagaacttggcttttgttttccccagagaaaaaataaaagatactattggaaatta

SEQ ID NO: 429287 - DNA, 1783 bp, Homo sapiens
  misc_feature (19)..(20): n is a, c, g, or t
  misc_feature (22)..(22): n is a, c, g, or t
tacggctaggtacgaggcnngntgttataagaacattgttgttgatgacatcacagaacagaaaccagagcctcaggatgatgggaaaagtacggagtcagatgtaaaggccgatggagacagcaaaggcagcgaagaggtggattctcattgcaaaaaggccctgagtcataaagagctatatgaaagagcccgagaactgctggtatcatacgaagaggagcagtttacggtgctggagaaatttaggtatttacctaaggccattaaggcgtggaataacccgtccccacgtgtagaatgtgtcctggcagagctcaagggcgttacatgcgagaacagggaggctgtgctggatgcttttctggatgatggcttccttgtccccacatttgaacagttggcagctttgcagatagaatatgaagatggtcagactgaggtccagagaggggaaggtactgacccaaagtcacacaaaaacgtggacttgaatgacgtcctggtgccaaagccgttctctcagttctggcagcccctgctcaggggcctgcactcccagaacttcacgcaggccctattggagaggatgctctctgaactgccagccttggggatcagcgggatccggcctacctacatcctcagatggaccgttgaactgatcgtggccaacaccaagactggacggaatgctcgccgattttctgcaggccagtgggaagcaagaaggggctggaggctgttcaactgctccgcctcccttgactggccccggatggttgagtcctgcttgggctcaccttgctgggccagcccccaactccttcggatcatcttcaaagccatggggcagggcctgccagacgaggagcaggagaagctgctgcgcatctgttccatttatacccagagtggagaaaacagcctggtgcaggagggctctgaggcctcccccattgggaagtctccatatacactagacagcctgtattggagcgtcaagccagccagctccagcttcgggtctgaagcaaaggcccagcaacaggaggagcagggcagtgttaatgatgtcaaggaagaggagaaggaggagaaagaggtcttgccagaccaggtagaggaggaggaagaaaatgatgaccaagaggaggaagaggaggatgaagatgatgaagatgatgaagaggaagacagaatggaggtggggcctttctctacagggcaagagtcccccactgccgagaatgctaggcttctggcccagaaaagaggagctttgcagggctctgcatggcaggttagctcagaagacgtgcgatgggacacatttcccctaggccgaatgccaggtcagaccgaggacccagcagagctcatgctggagaattatgacaccatgtatcttttggaccagcctgtgctagagcagcggctggaaccctcaacatgcaagactgacaccttgggcctgagctgtggtgtcggcagtggcaactgcagcaacagcagcagcagcaacttcgagggccttctctggagccaggggcagctgcatgggctcaaaactggcctgcagctcttctgatggccatccctggtgcaagtgttcatccagccgtgccagggcaacagcccaccccctagtacaactgatgctccctgagacaacctgggagacagcctggatcagccacatcaactcagttgtccaccacaggggaattttgaatgtcttttgtttttgttttgttttgaaaaataataaacaggcaactgt

SEQ ID NO: 429288 - DNA, 1440 bp, Homo sapiens
ggagactagccctagccctagggcctaaggcagcccaggcaggagcctctgccactgtcctcagctctctgctaagaagcaccaggcaaacacctcccgtgttaaaggtttaggtttgcccaagagggccccacggcagcagtggacaaatctcccttttccttttcttctcagagccaactaaactgggctggggcaaagtgccctgaattctttgagcagttgggaggtataggtggggagtctggggggatggggagggacagagccaaactttctgaggtgaaatgttgggtggggggctcactgcttccttctccttagatcctctcttctctctcaggacggaatgctcgccgattttctgcaggccagtgggaagcaagaaggggctggaggctgttcaactgctccgcctcccttgactggccccggatggttgagtcctgcttgggctcaccttgctgggccagcccccaactccttcggatcatcttcaaagccatggggcagggcctgccagacgaggagcaggagaagctgctgcgcatctgttccatttatacccagagtggagaaaacagcctggtgcaggagggctctgaggcctcccccattgggaagtctccatatacactagacagcctgtattggagcgtcaagccagccagctccagcttcgggtctgaagcaaaggcccagcaacaggaggagcagggcagtgttaatgatgtcaaggaagaggagaaggaggagaaagaggtcttgccagaccaggtagaggaggaggaagaaaatgatgaccaagaggaggaagaggaggatgaagatgatgaagatgatgaagaggaagacagaatggaggtggggcctttctctacagggcaagagtcccccactgccgagaatgctaggcttctggcccagaaaagaggagctttgcagggctctgcatggcaggttagctcagaagacgtgcgatgggacacatttcccctaggccgaatgccaggtcagaccgaggacccagcagagctcatgctggagaattatgacaccatgtatcttttggaccagcctgtgctagagcagcggctggaaccctcaacatgcaagactgacaccttgggcctgagctgtggtgtcggcagtggcaactgcagcaacagcagcagcagcaacttcgagggccttctctggagccaggggcagctgcatgggctcaaaactggcctgcagctcttctgatggccatccctggtgcaagtgttcatccagccgtgccagggcaacagcccaccccctagtacaactgatgctccctgagacaacctgggagacagcctggatcagccacatcaactcagttgtccaccacaggggaattttgaatgtcttttgtttttgttttgttttgaaaaataataaacaggcaactgt

SEQ ID NO: 429289 - DNA, 1138 bp, Homo sapiens
ttggctgctggtgcggtggcggttcggagtgagggtagcacgctgagctgaaggctgtgcggagcggcgcggcacagagcctgttgttgagctcagtatgtcgtgggaatccggggccgggccaggtctaggttcccaggggatggatctcgtgtggagtgcgtggtacggaaagtgcgttaaagggaaagggtcgttgccactctcggcccacggcatcgtggtcgcctggctcagcagggccgagtgggaccaggtgacggtttatctgttctgtgacgaccataagttgcagcggtacgcgcttaaccgcatcacggtgtggaggagcaggtcaggcaacgaactccctctggcagtggcttctactgctgacctgatacgctgtaagctcttggatgtaactggtggcttgggcactgatgaacttagactgctctatggcatggcattggtcaggtttgtgaatcttatctcagagaggaagacaaagtttgccaaggtccccctcaagtgtctggctcaagaggtaaatattccggattggattgttgaccttcgccatgagttgacccacaagaaaatgccccatataaatgactgccgcagaggctgctactttgtcctggattggctccagaagacctattggtgccgccaactggagaacagcctgagagagacctgggagttggaggagttcagggaagggatagaggaagaggatcaagaggaagataagaacattgttgttgatgacatcacagaacagaaaccagagcctcaggatgatgggaaaagtacggagtcagatgtaaaggccgatggagacagcaaaggcagcgaagaggtggattctcattgcaaaaaggccctgagtcataaagagctatatgaaagagcccgagaactgctggtatcatacgaagaggagcagtttacggtgctggagaaatttaggtatttacctaaggccattaaggcgtggaataacccaccccctagtacaactgatgctccctgagacaacctgggagacagcctggatcagccacatcaactcagttgtccaccacaggggaattttgaatgtcttttgtttttgttttgttttgaaaaataataaacaggcaactgt

SEQ ID NO: 429290 - DNA, 1060 bp, Homo sapiens
ttggctgctggtgcggtggcggttcggagtgagggtagcacgctgagctgaaggctgtgcggagcggcgcggcacagagcctgttgttgagctcagtatgtcgtgggaatccggggccgggccaggtctaggttcccaggggatggatctcgtgtggagtgcgtggtacggaaagtgcgttaaagggaaagggtcgttgccactctcggcccacggcatcgtggtcgcctggctcagcagggccgagtgggaccaggtgacggtttatctgttctgtgacgaccataagttgcagcggtacgcgcttaaccgcatcacggtgtggaggagcaggtcaggcaacgaactccctctggcagtggcttctactgctgacctgatacgctgtaagctcttggatgtaactggtggcttgggcactgatgaacttagactgctctatggcatggcattggtcaggtttgtgaatcttatctcagagaggaagacaaagtttgccaaggtccccctcaagtgtctggctcaagaggtaaatattccggattggattgttgaccttcgccatgagttgacccacaagaaaatgccccatataaatgactgccgcagaggctgctactttgtcctggattggctccagaagacctattggtgccgccaactggagaacagcctgagagagacctgggagttggaggagttcagggaagggatagaggaagaggatcaagaggaagataagaacattgttgttgatgacatcacagaacagaaaccagagcctcaggatgatgggaaaagtacggagtcagatgtaaaggccgatggagacagcaaaggcagcgaagaggtggattctcattgcaaaaaggccctgagtcataaagagctatatgaaagagcccgagaactgctggtatcatacgaagaggagcagtttacggtaagaaagtgccctggacttggtgtgctctcatctgccccagccatttcttccctcttgccagctacctgagagaagtcttgagaaggaatttgaaagaaaagtgacaaagcgtga

SEQ ID NO: 429291 - DNA, 573 bp, Homo sapiens
gggcaggaggtggtcaggataattaatctctggctcccttccagctttaataattattttccaatttctgtactcacaccctcccctgtaatcaggtaaatattccggattggattgttgaccttcgccatgagttgacccacaagaaaatgccccatataaatgactgccgcagaggtgagtcctcagaggttatacctatcacagttaagcccaggggcctgggcttggtggcgctgagggtagagggataggcaggagggtctccacctggagtcaaggctgggactagggtgaaagaagtgaggcctcgccttgggcacaacatttaaagtggggagaagtcaaaagttccataatcaagataaataacatattaatgtggaaaaattcatgataaacataatatcaaaactttaagtaaaacgggattagtattactgatttctccttttgtttcagcttccaacatggcttggcatattttgataccttgactacagaggtttttttgcctgcccttaagttgttttttgtttgtttgtttgttttgagacgagtctcaccctgttg

SEQ ID NO: 429292 - DNA, 2443 bp, Homo sapiens
ttggctgctggtgcggtggcggttcggagtgagggtagcacgctgagctgaaggctgtgcggagcggcgcggcacagagcctgttgttgagctcagtatgtcgtgggaatccggggccgggccaggtctaggttcccaggggatggatctcgtgtggagtgcgtggtacggaaagtgcgttaaagggaaagggtcgttgccactctcggcccacggcatcgtggtcgcctggctcagcagggccgagtgggaccaggtgacggtttatctgttctgtgacgaccataagttgcagcggtacgcgcttaaccgcatcacggtgtggaggagcaggtcaggcaacgaactccctctggcagtggcttctactgctgacctgatacgctgtaagctcttggatgtaactggtggcttgggcactgatgaacttagactgctctatggcatggcattggtcaggtttgtgaatcttatctcagagaggaagacaaagtttgccaaggtccccctcaagtgtctggctcaagaggtaaatattccggattggattgttgaccttcgccatgagttgacccacaagaaaatgccccatataaatgactgccgcagaggctgctactttgtcctggattggctccagaagacctattggtgccgccaactggagaacagcctgagagagacctgggagttggaggagttcagggaagggatagaggaagaggatcaagaggaagataagaacattgttgttgatgacatcacagaacagaaaccagagcctcaggatgatgggaaaagtacggagtcagatgtaaaggccgatggagacagcaaaggcagcgaagaggtggattctcattgcaaaaaggccctgagtcataaagagctatatgaaagagcccgagaactgctggtatcatacgaagaggagcagtttacggtgctggagaaatttaggtatttacctaaggccattaaggcgtggaataacccgtccccacgtgtagaatgtgtcctggcagagctcaagggcgttacatgcgagaacagggaggctgtgctggatgcttttctggatgatggcttccttgtccccacatttgaacagttggcagctttgcagatagaatatgaagaaaacgtggacttgaatgacgtcctggtgccaaagccgttctctcagttctggcagcccctgctcaggggcctgcactcccagaacttcacgcaggccctattggagaggatgctctctgaactgccagccttggggatcagcgggatccggcctacctacatcctcagatggaccgttgaactgatcgtggccaacaccaagactggacggaatgctcgccgattttctgcaggccagtgggaagcaagaaggggctggaggctgttcaactgctccgcctcccttgactggccccggatggttgagtcctgcttgggctcaccttgctgggccagcccccaactccttcggatcatcttcaaagccatggggcagggcctgccagacgaggagcaggagaagctgctgcgcatctgttccatttatacccagagtggagaaaacagcctggtgcaggagggctctgaggcctcccccattgggaagtctccatatacactagacagcctgtattggagcgtcaagccagccagctccagcttcgggtctgaagcaaaggcccagcaacaggaggagcagggcagtgttaatgatgtcaaggaagaggagaaggaggagaaagaggtcttgccagaccaggtagaggaggaggaagaaaatgatgaccaagaggaggaagaggaggatgaagatgatgaagatgatgaagaggaagacagaatggaggtggggcctttctctacagggcaagagtcccccactgccgagaatgctaggcttctggcccagaaaagaggagctttgcagggctctgcatggcaggttagctcagaagacgtgcgatgggacacatttcccctaggccgaatgccaggtcagaccgaggacccagcagagctcatgctggagaattatgacaccatgtatcttttggaccagcctgtgctagagcagcggctggaaccctcaacatgcaagactgacaccttgggcctgagctgtggtgtcggcagtggcaactgcagcaacagcagcagcagcaacttcgagggccttctctggagccaggggcagctgcatgggctcaaaactggcctgcagctcttctgatggccatccctggtgcaagtgttcatccagccgtgccagggcaacagcccaccccctagtacaactgatgctccctgagacaacctgggagacagcctggatcagccacatcaactcagttgtccaccacaggggaattttgaatgtcttttgtttttgttttgttttgaaaaataataaacaggcaactgt

SEQ ID NO: 429293 - DNA, 2389 bp, Homo sapiens
ttggctgctggtgcggtggcggttcggagtgagggtagcacgctgagctgaaggctgtgcggagcggcgcggcacagagcctgttgttgagctcagtatgtcgtgggaatccggggccgggccaggtctaggttcccaggggatggatctcgtgtggagtgcgtggtacggaaagtgcgttaaagggaaagggtcgttgccactctcggcccacggcatcgtggtcgcctggctcagcagggccgagtgggaccaggtgacggtttatctgttctgtgacgaccataagttgcagcggtacgcgcttaaccgcatcacggtgtggaggagcaggtcaggcaacgaactccctctggcagtggcttctactgctgacctgatacgctgtaagctcttggatgtaactggtggcttgggcactgatgaacttagactgctctatggcatggcattggtcaggtttgtgaatcttatctcagagaggaagacaaagtttgccaaggtccccctcaagtgtctggctcaagaggtaaatattccggattggattgttgaccttcgccatgagttgacccacaagaaaatgccccatataaatgactgccgcagaggctgctactttgtcctggattggctccagaagacctattggtgccgccaactggagaacagcctgagagagacctgggagttggaggagttcagggaagggatagaggaagaggatcaagaggaagataagaacattgttgttgatgacatcacagaacagaaaccagagcctcaggatgatgggaaaagtacggagtcagatgtaaaggccgatggagacagcaaaggcagcgaagaggtggattctcattgcaaaaaggccctgagtcataaagagctatatgaaagagcccgagaactgctggtatcatacgaagaggagcagtttacggtgctggagaaatttaggtatttacctaaggccattaaggcgtggaataacccgtccccacgtgtagaatgtgtcctggcagagctcaagggcgttacatgcgagaacagggaggctgtgctggatgcttttctggatgatggcttccttgtccccacatttgaacagttggcagctttgcagatagaatatgaagaaaacgtggacttgaatgacgtcctggtgccaaagccgttctctcagttctggcagcccctgctcaggggcctgcactcccagaacttcacgcaggccctattggagaggatgctctctgaactgccagccttggggatcagcgggatccggcctacctacatcctcagatggaccgttgaactgatcgtggccaacaccaagactggacggaatgctcgccgattttctgcaggccagtgggaagcaagaaggggctggaggctgttcaactgctccgcctcccttgactggccccggatggttgagtcctgcttgggctcaccttgctgggccagcccccaactccttcggatcatcttcaaagccatggggcagggcctgccagacgaggagcaggagaagctgctgcgcatctgttccatttatacccagagtggagaaaacagcctggtgcaggagggctctgaggcctcccccattgggaagtctccatatacactagacagcctgtattggagcgtcaagccagccagctccagcttcgggtctgaagcaaaggcccagcaacaggaggagcagggcagtgttaatgatgtcaaggaagaggagaaggaggagaaagaggtcttgccagaccaggtagaggaggaggaagaaaatgatgaccaagaggaggaagaggaggatgaagatgatgaagatgatgaagaggaagacagaatggaggtggggcctttctctacagggcaagagtcccccactgccgagaatgctaggcttctggcccagaaaagaggagctttgcagggctctgcatggcaggttagctcagaagacgtgcgatgggacacatttcccctaggccgaatgccaggtcaggaccagcctgtgctagagcagcggctggaaccctcaacatgcaagactgacaccttgggcctgagctgtggtgtcggcagtggcaactgcagcaacagcagcagcagcaacttcgagggccttctctggagccaggggcagctgcatgggctcaaaactggcctgcagctcttctgatggccatccctggtgcaagtgttcatccagccgtgccagggcaacagcccaccccctagtacaactgatgctccctgagacaacctgggagacagcctggatcagccacatcaactcagttgtccaccacaggggaattttgaatgtcttttgtttttgttttgttttgaaaaataataaacaggcaactgt

SEQ ID NO: 429294 - DNA, 2258 bp, Homo sapiens
  misc_feature (2252)..(2252): n is a, c, g, or t
ttggctgctggtgcggtggcggttcggagtgagggtagcacgctgagctgaaggctgtgcggagcggcgcggcacagagcctgttgttgagctcagtatgtcgtgggaatccggggccgggccaggtctaggttcccaggggatggatctcgtgtggagtgcgtggtacggaaagtgcgttaaagggaaagggtcgttgccactctcggcccacggcatcgtggtcgcctggctcagcagggccgagtgggaccaggtgacggtttatctgttctgtgacgaccataagttgcagcggtacgcgcttaaccgcatcacggtgtggaggagcaggtcaggcaacgaactccctctggcagtggcttctactgctgacctgatacgctgtaagctcttggatgtaactggtggcttgggcactgatgaacttagactgctctatggcatggcattggtcaggtttgtgaatcttatctcagagaggaagacaaagtttgccaaggtccccctcaagtgtctggctcaagaggtaaatattccggattggattgttgaccttcgccatgagttgacccacaagaaaatgccccatataaatgactgccgcagaggctgctactttgtcctggattggctccagaagacctattggtgccgccaactggagaacagcctgagagagacctgggagttggaggagttcagggaagggatagaggaagaggatcaagaggaagataagaacattgttgttgatgacatcacagaacagaaaccagagcctcaggatgatgggaaaagtacggagtcagatgtaaaggccgatggagacagcaaaggcagcgaagaggtggattctcattgcaaaaaggccctgagtcataaagagctatatgaaagagcccgagaactgctggtatcatacgaagaggagcagtttacggtgctggagaaatttaggtatttacctaaggccattaaggcgtggaataacccgtccccacgtgtagaatgtgtcctggcagagctcaagggcgttacatgcgagaacagggaggctgtgctggatgcttttctggatgatggcttccttgtccccacatttgaacagttggcagctttgcagatagaatatgaagaaaacgtggacttgaatgacgtcctggtgccaaagccgttctctcagttctggcagcccctgctcaggggcctgcactcccagaacttcacgcaggccctattggagaggatgctctctgaactgccagccttggggatcagcgggatccggcctacctacatcctcagatggaccgttgaactgatcgtggccaacaccaagactggacggaatgctcgccgattttctgcaggccagtgggaagcaagaaggggctggaggctgttcaactgctccgcctcccttgactggccccggatggttgagtcctgcttgggctcaccttgctgggccagcccccaactccttcggatcatcttcaaagccatggggcagggcctgccagacgaggagcaggagaagctgctgcgcatctgttccatttatacccagagtggagaaaacagcctggtgcaggagggctctgaggcctcccccattgggaagtctccatatacactagacagcctgtattggagcgtcaagccagccagctccagcttcgggtctgaagcaaaggcccagcaacaggaggagcagggcagtgttaatgatgtcaaggaagaggagaaggaggagaaagaggtcttgccagaccaggtagaggaggaggaagaaaatgatgaccaagaggaggaagaggaggatgaagatgatgaagatgatgaagaggaagacagaatggaggtggggcctttctctacagggcaagagtcccccactgccgagaatgctaggcttctggcccagaaaagaggagctttgcagggctctgcatggcaggttagctcagaagacgtgcgatgggacacatttcccctaggccgaatgccaggtcagaccgaggacccagcagagctcatgctggagaattatgacaccatgtatcttttggaccagcctgtgctagagcagcggctggaaccctcaacatgcaagactgacaccttgggcctgaagggtgttctcagcaatcgacaatgtcagacgcagccccagtccccaagcttgcaggccttcatgctcgagactcctggaggatgccccatccgttgcggaaggcccgcccgtncctctc

SEQ ID NO: 429295 - DNA, 2338 bp, Homo sapiens
ggtccggcgtgaagtacatccagcattacgtagaggaagaggcgtcaaggattgacgaggactagactagcatcggatatgggcaagctaatgtggcccgcgtgtgtcgaggtgtacgtacggaggttccattgaacctccgcgatgggagtgaggcgactccaagcggtatgactggtcgccgggggcagctagctagcatcaaggtacaccgctttatgagacgaggatcaagaccgatcacctgtctctgggagtggacatctcgacctagtcaacgagagtgactgggaaggactgatcccatgccagatggcggtcatgggcatgactgtacgggacggatctgagctggactacggcgtgattcgtgtcacggaagacaaagtttgccaaggtccccctcaagtgtctggctcaagaggtaaatattccggattggattgttgaccttcgccatgagttgacccacaagaaaatgccccatataaatgactgccgcagaggctgctactttgtcctggattggctccagaagacctattggtgccgccaactggagaacagcctgagagagacctgggagttggaggagttcagggaagggatagaggaagaggatcaagaggaagataagaacattgttgttgatgacatcacagaacagaaaccagagcctcaggatgatgggaaaagtacggagtcagatgtaaaggccgatggagacagcaaaggcagcgaagaggtggattctcattgcaaaaaggccctgagtcataaagagctatatgaaagagcccgagaactgctggtatcatacgaagaggagcagtttacggtgctggagaaatttaggtatttacctaaggccattaaggcgtggaataacccgtccccacgtgtagaatgtgtcctggcagagctcaagggcgttacatgcgagaacagggaggctgtgctggatgcttttctggatgatggcttccttgtccccacatttgaacagttggcagctttgcagatagaatatgaagaaaacgtggacttgaatgacgtcctggtgccaaagccgttctctcagttctggcagcccctgctcaggggcctgcactcccagaacttcacgcaggccctattggagaggatgctctctgaactgccagccttggggatcagcgggatccggcctacctacatcctcagatggaccgttgaactgatcgtggccaacaccaagactggacggaatgctcgccgattttctgcaggccagtgggaagcaagaaggggctggaggctgttcaactgctccgcctcccttgactggccccggatggttgagtcctgcttgggctcaccttgctgggccagcccccaactccttcggatcatcttcaaagccatggggcagggcctgccagacgaggagcaggagaagctgctgcgcatctgttccatttatacccagagtggagaaaacagcctggtgcaggagggctctgaggcctcccccattgggaagtctccatatacactagacagcctgtattggagcgtcaagccagccagctccagcttcgggtctgaagcaaaggcccagcaacaggaggagcagggcagtgttaatgatgtcaaggaagaggagaaggaggagaaagaggtcttgccagaccaggtagaggaggaggaagaaaatgatgaccaagaggaggaagaggaggatgaagatgatgaagatgatgaagaggaagacagaatggaggtggggcctttctctacagggcaagagtcccccactgccgagaatgctaggcttctggcccagaaaagaggagctttgcagggctctgcatggcaggttagctcagaagacgtgcgatgggacacatttcccctaggccgaatgccaggtcagaccgaggacccagcagagctcatgctggagaattatgacaccatgtatcttttggaccagcctgtgctagagcagcggctggaaccctcaacatgcaagactgacaccttgggcctgagctgtggtgtcggcagtggcaactgcagcaacagcagcagcagcaacttcgagggccttctctggagccaggggcagctgcatgggctcaaaactggcctgcagctcttctgatggccatccctggtgcaagtgttcatccagccgtgccagggcaacagcccaccccctagtacaactgatgctccctgagacaacctgggagacagcctggatcagccacatcaactcagttgtccaccacaggggaattttgaatgtcttttgtttttgttttgttttgaaaaataataaacaggcaactgt

SEQ ID NO: 429296 - DNA, 2642 bp, Homo sapiens
ttggctgctggtgcggtggcggttcggagtgagggtagcacgctgagctgaaggctgtgcggagcggcgcggcacagagcctgttgttgagctcagtatgtcgtgggaatccggggccgggccaggtctaggttcccaggggatggatctcgtgtggagtgcgtggtacggaaagtgcgttaaagggaaagggtcgttgccactctcggcccacggcatcgtggtcgcctggctcagcagggccgagtgggaccaggtgacggtttatctgttctgtgacgaccataagttgcagcggtacgcgcttaaccgcatcacggtgtggaggagcaggtcaggcaacgaactccctctggcagtggcttctactgctgacctgatacgctgtaagctcttggatgtaactggtggcttgggcactgatgaacttagactgctctatggcatggcattggtcaggtttgtgaatcttatctcagagaggaagacaaagtttgccaaggtccccctcaagtgtctggctcaagaggtaaatattccggattggattgttgaccttcgccatgagttgacccacaagaaaatgccccatataaatgactgccgcagaggctgctactttgtcctggattggctccagaagacctattggtgccgccaactggagaacagcctgagagagacctgggagttggaggagttcagggaagggatagaggaagaggatcaagaggaagataagaacattgttgttgatgacatcacagaacagaaaccagagcctcaggatgatgggaaaagtacggagtcagatgtaaaggccgatggagacagcaaaggcagcgaagaggtggattctcattgcaaaaaggccctgagtcataaagagctatatgaaagagcccgagaactgctggtatcatacgaagaggagcagtttacggtgctggagaaatttaggtatttacctaaggccattaaggcgtggaataacccgtccccacgtgtagaatgtgtcctggcagagctcaagggcgttacatgcgagaacagggaggctgtgctggatgcttttctggatgatggcttccttgtccccacatttgaacagttggcagctttgcagatagaatatgaagaaaacgtggacttgaatgacgtcctggtgccaaagccgttctctcagttctggcagcccctgctcaggggcctgcactcccagaacttcacgcaggccctattggagaggatgctctctgaactgccagccttggggatcagcgggatccggcctacctacatcctcagatggaccgttgaactgatcgtggccaacaccaagactggacggaatgctcgccgattttctgcaggccagtgggaagcaagaaggggctggaggctgttcaactgctccgcctcccttgactggccccggatggttgagtcctgcttgggctcaccttgctgggccagcccccaactccttcggattgctgtccttggtgggagctgacccagtgcctggggaatgaatgaagtgggagtctggatgccaagaccctcttagtccctgatccccctattgagtccaaaagtctttctttaaccctgatggcatttgggacacagaggtatttgtaaggttttaaaagtggctttgtagacaaagtcagtcaaggcaagacttccaggagttggaactgaacagccacattgccagatgtgtgctccagactagaagtgatgtggatgggtgggcaattgggaggagaaccaaaagggcctggatgagtcagagtttcaagaggaggcatttgaacaattcaagcaggagaaagaataaagcaagtttcaaagtccagaaggaacatggcatgtgtatataatgggagggagggagtgacaagagcagcatggagaggtttggataggtggccttcaaggtactttccaatcctaagtgcctgcagagtggaagctgctggtctcggagaagtctggaccacagagatcttctcccaacccaagcataccagagggatgcgacacatgccggcagtaacagcggctcacttgggtacgatttcttgtgcacagatcctgcctttcccagataagcagtgaatctagtcctaatcaccccgttacacagagtggagaacagagggggtttgcccaggtattatgctgcaagtcagagctggggccagaatccagatagcctgtccttagtcccatgctcttctgtaatactccactagattgtattattgcagaaagcatctgttaaacacagaacttggcttttgttttccccagagaaaaaataaaagatactattggaaattaagtgtcaggcatggtgctgtgtttttttgtagaggttaacttcatttactttgacacagcagtcttgggaggtggaagtattatatattataccctatttgacagataagacattgaggctctaaggagtgatgggacttatctaatagctacacatttgttgatggtgggacagggatcttggcccaggtggtgtgagcccaaagtctaccttcatcccatcagcctgaatctgtgaccttctcagtcctgagctatgaccagacatactcgaggaagggggtgtattt

SEQ ID NO: 429297 - DNA, 1448 bp, Homo sapiens
agtaggagagggtcttctgccagcatcactttgctaaactagtgtcctcttgttccagggaggctgtgctggatgcttttctggatgatggcttccttgtccccacatttgaacagttggcagctttgcagatagaatatgaagaaaacgtggacttgaatgacgtcctggtgccaaagccgttctctcagttctggcagcccctgctcaggggcctgcactcccagaacttcacgcaggccctattggagaggatgctctctgaactgccagccttggggatcagcgggatccggcctacctacatcctcagatggaccgttgaactgatcgtggccaacaccaagactggacggaatgctcgccgattttctgcaggccagtgggaagcaagaaggggctggaggctgttcaactgctccgcctcccttgactggccccggatggttgagtcctgcttgggctcaccttgctgggccagcccccaactccttcggatcatcttcaaagccatggggcagggcctgccagacgaggagcaggagaagctgctgcgcatctgttccatttatacccagagtggagaaaacagcctggtgcaggagggctctgaggcctcccccattgggaagtctccatatacactagacagcctgtattggagcgtcaagccagccagctccagcttcgggtctgaagcaaaggcccagcaacaggaggagcagggcagtgttaatgatgtcaaggaagaggagaaggaggagaaagaggtcttgccagaccaggtagaggaggaggaagaaaatgatgaccaagaggaggaagaggaggatgaagatgatgaagatgatgaagaggaagacagaatggaggtggggcctttctctacagggcaagagtcccccactgccgagaatgctaggcttctggcccagaaaagaggagctttgcagggctctgcatggcaggttagctcagaagacgtgcgatgggacacatttcccctaggccgaatgccaggtcagaccgaggacccagcagagctcatgctggagaattatgacaccatgtatcttttggaccagcctgtgctagagcagcggctggaaccctcaacatgcaagactgacaccttgggcctgagctgtggtgtcggcagtggcaactgcagcaacagcagcagcagcaacttcgagggccttctctggagccaggggcagctgcatgggctcaaaactggcctgcagctcttctgatggccatccctggtgcaagtgttcatccagccgtgccagggcaacagcccaccccctagtacaactgatgctccctgagacaacctgggagacagcctggatcagccacatcaactcagttgtccaccacaggggaattttgaatgtcttttgtttttgttttgttttgaaaaataataaacaggcaactgt

SEQ ID NO: 429298 - DNA, 1275 bp, Homo sapiens
gctcttatgctcagcaccaacaggtccgccaaatccggaagaagatgatggaaatcatgacccgagaggtgcagacaaatgacttgaaagaagtggtcaataaattgattccagacagcattggaaaagacatagaaaaggcttgccaatctatttatcctctccatgatgtcttcgttagaaaagtaaaaatgctgaagaagcccaagtttgaattgggaaagctcatggagcttcatggtgaaggcagtagttctggactggccccggatggttgagtcctgcttgggctcaccttgctgggccagcccccaactccttcggatcatcttcaaagccatggggcagggcctgccagacgaggagcaggagaagctgctgcgcatctgttccatttatacccagagtggagaaaacagcctggtgcaggagggctctgaggcctcccccattgggaagtctccatatacactagacagcctgtattggagcgtcaagccagccagctccagcttcgggtctgaagcaaaggcccagcaacaggaggagcagggcagtgttaatgatgtcaaggaagaggagaaggaggagaaagaggtcttgccagaccaggtagaggaggaggaagaaaatgatgaccaagaggaggaagaggaggatgaagatgatgaagatgatgaagaggaagacagaatggaggtggggcctttctctacagggcaagagtcccccactgccgagaatgctaggcttctggcccagaaaagaggagctttgcagggctctgcatggcaggttagctcagaagacgtgcgatgggacacatttcccctaggccgaatgccaggtcagaccgaggacccagcagagctcatgctggagaattatgacaccatgtatcttttggaccagcctgtgctagagcagcggctggaaccctcaacatgcaagactgacaccttgggcctgagctgtggtgtcggcagtggcaactgcagcaacagcagcagcagcaacttcgagggccttctctggagccaggggcagctgcatgggctcaaaactggcctgcagctcttctgatggccatccctggtgcaagtgttcatccagccgtgccagggcaacagcccaccccctagtacaactgatgctccctgagacaacctgggagacagcctggatcagccacatcaactcagttgtccaccacaggggaattttgaatgtcttttgtttttgttttgttttgaaaaataataaacaggcaactgt

SEQ ID NO: 429299 - DNA, 878 bp, Homo sapiens
ttggctgctggtgcggtggcggttcggagtgagggtagcacgctgagctgaaggctgtgcggagcggcgcggcacagagcctgttgttgagctcagtatgtcgtgggaatccggggccgggccaggtctaggttcccaggggatggatctcgtgtggagtgcgtggtacggaaagtgcgttaaagggaaagggtcgttgccactctcggcccacggcatcgtggtcgcctggctcagcagggccgagtgggaccaggtgacggtttatctgttctgtgacgaccataagttgcagcggtacgcgcttaaccgcatcacggtgtggaggagcaggtcaggcaacgaactccctctggcagtggcttctactgctgacctgatacgctgtaagctcttggatgtaactggtggcttgggcactgatgaacttagactgctctatggcatggcattggtcaggtttgtgaatcttatctcagagaggaagacaaagtttgccaaggtccccctcaagtgtctggctcaagaggtaaatattccggattggattgttgaccttcgccatgagttgacccacaagaaaatgccccatataaatgactgccgcagaggctgctactttgtcctggattggctccagaagacctattggtgccgccaactggagaacagcctgagagagacctgggagttggaggagttcagggaagggatagaggaagaggatcaagaggaagataagaacattgttgttgatgacatcacagaacagaaaccagagcctggatcagccacatcaactcagttgtccaccacaggggaattttgaatgtcttttgtttttgttttgttttgaaaaataataaacaggcaactgt

SEQ ID NO: 429300 - DNA, 2774 bp, Homo sapiens
atgcagcagatccgcccgcccttcatccgcgggcctccgcaccatgcctccaaccccaacagccccctgtccaaccccatgcttcccggcatcgggcccccgcccggtggccccagaaacctgggccccacttccagccccatgcaccggcccatgctatcgccccacatccaccccccgagcacccccaccatgcccgggaaccccccaggcctgctgcccccgccgcctccgggcgccccactgccgagtcttcccttcccgccagtgagcatgatgccaaatggcccgatgccggtgccccagatgatgaatttcgggctgccgtcgcttgccccgctggtgccgcccccgaccctgctcgtgccgtaccccgtgatcgtgcccctaccggtgcccatccccatccccatccctatccctcacgtcagcgactccaagccccccaagaagctgctgtcgcctgaggaaccggcggtgagcgagctagagtcggtcaaggagaataactgtgcttccaactgccacctggacggggaggcggccaaaaagctgatgggcgaggaggccctggcggggggcgacaagtcagacccgaaccttaataaccccgcggacgaggaccatgcctatgctctgcggatgctgcccaagaccggctgcgtgatccagcctgtgccaaaacccgcggagaaggctgccatggcaccgtgcatcatctcctcgcccatgctcagcgccgggcctgaggacctggagccgccgctcaaaaggaggtgcctccgaattagaaatcagaataagtaaaaggaacgttcactcacagggtacgctcatggagagagggcgcagagcaaaccatgtcacgccatccaatgacaccagctggtcagctcaccaccccctctggctaaaactcaagcaaataaagccgcttcctgtcattaagcatctcagaggaagcagccctccctcgatggcctctagcccagagaagcccgcgcatcttggacccaccaagcaggcccagccttcctgctgccaccatctctgcttctccccagaggaacttagagatttcacccctggcttttaaaaaaaacgaaataccgacaagccacaaggaccaatgtaggtattctccccgccccatcttcaaggctcagcgactgaggctggaagatgatatggattggaacacaaaaaatctttttttaatctttttaaaaactgctgtggttttgctgctacactaagaattgtgatttgcattgtacggttttggacctatattgttcacgttttgatggcggagaggggtggtcctggaggcccaatgcttcagagtcatctctgtcctgcccgggatgcacttttaaatgaagagttagaatattttattggctaatatacttttcttgttatttttacaaaggccacctttatcctttttgatgccatattttcagtgttacacttttatggcttttaattttcgatttgacagatgtaagaagcagcatgaatagtttatactgtggtttttcagagactgaatgccaagagaactcggtaaatgtttattcttctcagctttctctttaaattcccctaaatagcgccccatttgggaacagagcaagagtgttgaactgaagaccaaaatgccctcaaggtgtaaaataatccgagggggaatatttgctgggcgtcaggaaagactcagatgaaatttcaaccctgatggttttcggtgatccaggaagtcagtgagacaatctctctatatgcagagccctttcatgttaattagaatggtatggacaaaccaatgaaaacaagagggaaagtgagaaagatcacccatgattctgtttcactgtttgctttctcctgtcatggttaagagaaatgtgcaattcgatcctcaatcagtgggtggaggataacagggtagattcacttgtgtgcacttgtacagttgtagctgcgagtccagaagtcctctagagcatgtgtactggcactgagttggtgagacagttgtggagtatcccattctgatgagtacagaaaaaaaaagaaaaagaaaagaagagaaaaaattaagaaaaaaatcaaaaaaggaagaaaactaaaaaaaaaaaaaatcaaatcaccttgtgattcagtgtatctgtttactaactcaaataaagcaattgttccctctggaggggtccaggtgcccccgccccacaaggccgcggagcctcagcaggaggggtggcgagttgcgggtgggcagggccaggacggtgtggcgccagccttgaagcaccacggcccaaggatgcggtgtacatactgtatttctagattctcctttgtacagagtcacttcacaagtcaagctactgttttacaggtgctccttatttattagagctgtgagagcttgggggacacacctggcgagcaagctcgctttttaaaaatgaaatttgggggcaggggaaggggaggcgggagggaggggaagctcgcaagcccggggagagatttataaaagtaaacaaaagaaaaccttccagcaacaaattaaaaaataataacaaatcaaccccagcaccaaacccacccaggcaggaagaagccgcccctcctctggggccatatttttctgctgggtcacaacattctcctctccctgactggtgtcagattcatcaaacaaaaaataaatctcgaagaaaaaaaatgcacttacatgtgcttatttggcttttctcatt

SEQ ID NO: 429301 - DNA, 2733 bp, Homo sapiens
atgcagcagatccgcccgcccttcatccgcgggcctccgcaccatgcctccaaccccaacagccccctgtccaaccccatgcttcccggcatcgggcccccgcccggtggccccagaaacctgggccccacttccagccccatgcaccggcccatgctatcgccccacatccaccccccgagcacccccaccatgcccgggaaccccccaggcctgctgcccccgccgcctccgggcgccccactgccgagtcttcccttcccgccagtgagcatgatgccaaatggcccgatgccggtgccccagatgatgaatttcgggctgccgtcgcttgccccgctggtgccgcccccgaccctgctcgtgccgtaccccgtgatcgtgcccctaccggtgcccatccccatccccatccctatccctcacgtcagcgactccaagccccccaagaagctgctgtcgcctgaggaaccggcggtgagcgagctagagtcggtcaaggagaataactgtgcttccaactgccacctggacggggaggcggccaaaaagctgatgggcgaggaggccctggcggggggcgacaagtcagacccgaaccttaataaccccgcggacgaggaccatgcctatgctctgcggatgctgcccaagaccggctgcgtgatccagcctgtgccaaaacccgcggagaaggctgccatggcaccgtgcatcatctcctcgcccatgctcagcgccgggcctgaggacctggagccgccgctcaaaaggaggtgcctccgaattagaaatcagaataagtaaaaggaacgttcactcacagggtacgctcatggagagagggcgcagagcaaaccatgtcacgccatccaatgacaccagctggtcagctcaccaccccctctggctaaaactcaagcaaataaagccgcttcctgtcattaagcatctcagaggaagcagccctccctcgatggcctctagcccagagaagcccgcgcatcttggacccaccaagcaggcccagccttcctgctgccaccatctctgcttctccccagaggaacttagagatttcacccctggcttttaaaaaaaacgaaataccgacaagccacaaggaccaatgtaggtattctccccgccccatcttcaaggctcagcgactgaggctggaagatgatatggattggaacacaaaaaatctttttttaatctttttaaaaactgctgtggttttgctgctacactaagaattgtgatttgcattgtacggttttggacctatattgttcacgttttgatggcggagaggggtggtcctggaggcccaatgcttcagagtcatctctgtcctgcccgggatgcacttttaaatgaagagttagaatattttattggctaatatacttttcttgttatttttacaaaggccacctttatcctttttgatgccatattttcagtgttacacttttatggcttttaattttcgatttgacagatgtaagaagcagcatgaatagtttatactgtggtttttcagagactgaatgccaagagaactcggtaaatgtttattcttctcagctttctctttaaattcccctaaatagcgccccatttgggaacagagcaagagtgttgaactgaagaccaaaatgccctcaaggtgtaaaataatccgagggggaatatttgctgggcgtcaggaaagactcagatgaaatttcaaccctgatggttttcggtgatccaggaagtcagtgagacaatctctctatatgcagagccctttcatgttaattagaatggtatggacaaaccaatgaaaacaagagggaaagtgagaaagatcacccatgattctgtttcactgtttgctttctcctgtcatggttaagagaaatgtgcaattcgatcctcaatcagtgggtggaggataacagggtagattcacttgtgtgcacttgtacagttgtagctgcgagtccagaagtcctctagagcatgtgtactggcactgagttggtgagacagttgtggagtatcccattctgatgagtacagaaaaaaaaagaaaaagaaaagaagagaaaaaattaagaaaaaaatcaaaaaaggaagaaaactaaaaaaaaaaaaaatcaaatcaccttgtgattcagtgtatctgtttactaactcaaataaagcaattgttccctctggaggggtccaggtgcccccgccccacaaggccgcggagcctcagcaggaggggtggcgagttgcgggtgggcagggccaggacggtgtggcgccagccttgaagcaccacggcccaaggatgcggtgtacatactgtatttctagattctcctttgtacagagtcacttcacaagtcaagctactgttttacaggtgctccttatttattagagctgtgagagcttgggggacacacctggcgagcaagctcgctttttaaaaatgaaatttgggggcaggggaaggggaggcgggagggaggggaagctcgcaagcccggggagagatttataaaagtaaacaaaagaaaaccttccagcaacaaattaaaaaataataacaaatcaaccccagcaccaaacccacccaggcaggaagaagccgcccctcctctggggccatatttttctgctgggtcacaacattctcctctccctgactggtgtcagattcatcaaacaaaaaataaatctcgaaga

SEQ ID NO: 429302 - DNA, 2857 bp, Homo sapiens
gcggacactccctgtccccccgggactccaagcagggctcgtccaagtccgcggactcgccccccggctgctcgggccaggccctgagcctggcgcccacgcccgccgagcatggccggagcgaggtggtggacctgacgcggcgcgccggcagccccccgggccccccgggcgcgggcggccagctcggcttcccaggcgtgctgcagggcccgcaggacggcgtcatcgacctgaccgtgggccaccgagcccggctgcacaacgtgatccaccgcgcgctgcacgcgcacgtcaaggcggagcgcgagccgggcgccgcggagcgcaggacctgcggcggctgcagggacggccactgcagcccgcccgccgccggcgacccaggcccgggcgccccggcgggccccgaggcggccgcggcctgcaacgtcatcgtgaacggcacgcgcggcgccgccgccgagggcgctaagagcgcggagccgcctcccgagcagccgccgccgccgccgccgcccgcgccccccaagaagctgctgtcgcctgaggaaccggcggtgagcgagctagagtcggtcaaggagaataactgtgcttccaactgccacctggacggggaggcggccaaaaagctgatgggcgaggaggccctggcggggggcgacaagtcagacccgaaccttaataaccccgcggacgaggaccatgcctatgctctgcggatgctgcccaagaccggctgcgtgatccagcctgtgccaaaacccgcggagaaggctgccatggcaccgtgcatcatctcctcgcccatgctcagcgccgggcctgaggacctggagccgccgctcaaaaggaggtgcctccgaattagaaatcagaataagtaaaaggaacgttcactcacagggtacgctcatggagagagggcgcagagcaaaccatgtcacgccatccaatgacaccagctggtcagctcaccaccccctctggctaaaactcaagcaaataaagccgcttcctgtcattaagcatctcagaggaagcagccctccctcgatggcctctagcccagagaagcccgcgcatcttggacccaccaagcaggcccagccttcctgctgccaccatctctgcttctccccagaggaacttagagatttcacccctggcttttaaaaaaaacgaaataccgacaagccacaaggaccaatgtaggtattctccccgccccatcttcaaggctcagcgactgaggctggaagatgatatggattggaacacaaaaaatctttttttaatctttttaaaaactgctgtggttttgctgctacactaagaattgtgatttgcattgtacggttttggacctatattgttcacgttttgatggcggagaggggtggtcctggaggcccaatgcttcagagtcatctctgtcctgcccgggatgcacttttaaatgaagagttagaatattttattggctaatatacttttcttgttatttttacaaaggccacctttatcctttttgatgccatattttcagtgttacacttttatggcttttaattttcgatttgacagatgtaagaagcagcatgaatagtttatactgtggtttttcagagactgaatgccaagagaactcggtaaatgtttattcttctcagctttctctttaaattcccctaaatagcgccccatttgggaacagagcaagagtgttgaactgaagaccaaaatgccctcaaggtgtaaaataatccgagggggaatatttgctgggcgtcaggaaagactcagatgaaatttcaaccctgatggttttcggtgatccaggaagtcagtgagacaatctctctatatgcagagccctttcatgttaattagaatggtatggacaaaccaatgaaaacaagagggaaagtgagaaagatcacccatgattctgtttcactgtttgctttctcctgtcatggttaagagaaatgtgcaattcgatcctcaatcagtgggtggaggataacagggtagattcacttgtgtgcacttgtacagttgtagctgcgagtccagaagtcctctagagcatgtgtactggcactgagttggtgagacagttgtggagtatcccattctgatgagtacagaaaaaaaaagaaaaagaaaagaagagaaaaaattaagaaaaaaatcaaaaaaggaagaaaactaaaaaaaaaaaaaatcaaatcaccttgtgattcagtgtatctgtttactaactcaaataaagcaattgttccctctggaggggtccaggtgcccccgccccacaaggccgcggagcctcagcaggaggggtggcgagttgcgggtgggcagggccaggacggtgtggcgccagccttgaagcaccacggcccaaggatgcggtgtacatactgtatttctagattctcctttgtacagagtcacttcacaagtcaagctactgttttacaggtgctccttatttattagagctgtgagagcttgggggacacacctggcgagcaagctcgctttttaaaaatgaaatttgggggcaggggaaggggaggcgggagggaggggaagctcgcaagcccggggagagatttataaaagtaaacaaaagaaaaccttccagcaacaaattaaaaaataataacaaatcaaccccagcaccaaacccacccaggcaggaagaagccgcccctcctctggggccatatttttctgctgggtcacaacattctcctctccctgactggtgtcagattcatcaaacaaaaaataaatctcgaagaaaaaaaatgcacttacatgtgcttatttggcttttctcatt

SEQ ID NO: 429303 - DNA, 2866 bp, Homo sapiens
gactctccgcactatccttacccgtgacagccactgacgtcctccgccgctagaagagaccccgcttctcggcgcctgccctccccctcgcggctcggtccggccccgccagcaccgctacctccgccagcctcgccaccatcagcaccacctccaccgccgccgccgccgccaccaccaccgccggcggcggcagcagccatttcatctccacagaaaccagacacaaaaacatggcagaaatggagaaagaagggagacctcccgaaaataaacggagcaggaagccggctcacccagtgaaaagggagatcaatgaggagatgaagaactttgcagaaaacaccatgaatgaactccttggctggtatggctatgataaggttgaattaaaagatggtgaggatattgaattcaggagctaccctacagatggggagagccggcagcacatttctgttctcaaagaaaattctttgccaaaaccaaaattacccgaggacagtgttatttcaccatacaatataagcacaggctattcagggcttgccactggaaatggactcagtgactcacctgcagggtcaaaggatcatggcagtgtgcccattattgtacctttaattccaccacctttcataaagccaccagcagaagatgatgtgtcaaatgtacaaataatgtgtgcctggtgccagaaagtgggaatcaagcgctattccctgagtatgggaagtgaggtgaaaagcttctgcagcgagaagtgctttgcggcctgccgacgagcctacttcaagagaaataaggctagagatgaagatggacatgctgaaaattttccccagcagcactatgctaaggaaactccaaggcttgccttcaagaataactgcgaactacttgaacgttcactcacagggtacgctcatggagagagggcgcagagcaaaccatgtcacgccatccaatgacaccagctggtcagctcaccaccccctctggctaaaactcaagcaaataaagccgcttcctgtcattaagcatctcagaggaagcagccctccctcgatggcctctagcccagagaagcccgcgcatcttggacccaccaagcaggcccagccttcctgctgccaccatctctgcttctccccagaggaacttagagatttcacccctggcttttaaaaaaaacgaaataccgacaagccacaaggaccaatgtaggtattctccccgccccatcttcaaggctcagcgactgaggctggaagatgatatggattggaacacaaaaaatctttttttaatctttttaaaaactgctgtggttttgctgctacactaagaattgtgatttgcattgtacggttttggacctatattgttcacgttttgatggcggagaggggtggtcctggaggcccaatgcttcagagtcatctctgtcctgcccgggatgcacttttaaatgaagagttagaatattttattggctaatatacttttcttgttatttttacaaaggccacctttatcctttttgatgccatattttcagtgttacacttttatggcttttaattttcgatttgacagatgtaagaagcagcatgaatagtttatactgtggtttttcagagactgaatgccaagagaactcggtaaatgtttattcttctcagctttctctttaaattcccctaaatagcgccccatttgggaacagagcaagagtgttgaactgaagaccaaaatgccctcaaggtgtaaaataatccgagggggaatatttgctgggcgtcaggaaagactcagatgaaatttcaaccctgatggttttcggtgatccaggaagtcagtgagacaatctctctatatgcagagccctttcatgttaattagaatggtatggacaaaccaatgaaaacaagagggaaagtgagaaagatcacccatgattctgtttcactgtttgctttctcctgtcatggttaagagaaatgtgcaattcgatcctcaatcagtgggtggaggataacagggtagattcacttgtgtgcacttgtacagttgtagctgcgagtccagaagtcctctagagcatgtgtactggcactgagttggtgagacagttgtggagtatcccattctgatgagtacagaaaaaaaaagaaaaagaaaagaagagaaaaaattaagaaaaaaatcaaaaaaggaagaaaactaaaaaaaaaaaaaatcaaatcaccttgtgattcagtgtatctgtttactaactcaaataaagcaattgttccctctggaggggtccaggtgcccccgccccacaaggccgcggagcctcagcaggaggggtggcgagttgcgggtgggcagggccaggacggtgtggcgccagccttgaagcaccacggcccaaggatgcggtgtacatactgtatttctagattctcctttgtacagagtcacttcacaagtcaagctactgttttacaggtgctccttatttattagagctgtgagagcttgggggacacacctggcgagcaagctcgctttttaaaaatgaaatttgggggcaggggaaggggaggcgggagggaggggaagctcgcaagcccggggagagatttataaaagtaaacaaaagaaaaccttccagcaacaaattaaaaaataataacaaatcaaccccagcaccaaacccacccaggcaggaagaagccgcccctcctctggggccatatttttctgctgggtcacaacattctcctctccctgactggtgtcagattcatcaaacaaaaaataaatctcgaagaaaaaaaatgcacttacatgtgcttatttggcttttctcatt

SEQ ID NO: 429304 - DNA, 1574 bp, Homo sapiens
cacggccagggaggcagcagacttttgtcacagctggaagtacacattgggcttcttggtcactgtcaccagggtgactgtaacctgttttatggtggcagtgatgtatatggttcccttgccaaggtcactagctatcccctgggagcagtgattcctgcagttagtctgcattttaaatgaagagttagaatattttattggctaatatacttttcttgttatttttacaaaggccacctttatcctttttgatgccatattttcagtgttacacttttatggcttttaattttcgatttgacagatgtaagaagcagcatgaatagtttatactgtggtttttcagagactgaatgccaagagaactcggtaaatgtttattcttctcagctttctctttaaattcccctaaatagcgccccatttgggaacagagcaagagtgttgaactgaagaccaaaatgccctcaaggtgtaaaataatccgagggggaatatttgctgggcgtcaggaaagactcagatgaaatttcaaccctgatggttttcggtgatccaggaagtcagtgagacaatctctctatatgcagagccctttcatgttaattagaatggtatggacaaaccaatgaaaacaagagggaaagtgagaaagatcacccatgattctgtttcactgtttgctttctcctgtcatggttaagagaaatgtgcaattcgatcctcaatcagtgggtggaggataacagggtagattcacttgtgtgcacttgtacagttgtagctgcgagtccagaagtcctctagagcatgtgtactggcactgagttggtgagacagttgtggagtatcccattctgatgagtacagaaaaaaaaagaaaaagaaaagaagagaaaaaattaagaaaaaaatcaaaaaaggaagaaaactaaaaaaaaaaaaaatcaaatcaccttgtgattcagtgtatctgtttactaactcaaataaagcaattgttccctctggaggggtccaggtgcccccgccccacaaggccgcggagcctcagcaggaggggtggcgagttgcgggtgggcagggccaggacggtgtggcgccagccttgaagcaccacggcccaaggatgcggtgtacatactgtatttctagattctcctttgtacagagtcacttcacaagtcaagctactgttttacaggtgctccttatttattagagctgtgagagcttgggggacacacctggcgagcaagctcgctttttaaaaatgaaatttgggggcaggggaaggggaggcgggagggaggggaagctcgcaagcccggggagagatttataaaagtaaacaaaagaaaaccttccagcaacaaattaaaaaataataacaaatcaaccccagcaccaaacccacccaggcaggaagaagccgcccctcctctggggccatatttttctgctgggtcacaacattctcctctccctgactggtgtcagattcatcaaacaaaaaataaatctcgaagaaaaaaaatgcacttacatgtgcttatttggcttttctcatt

SEQ ID NO: 429305 - DNA, 1401 bp, Homo sapiens
ccgtcattgtcttgttcctgatcttagaggaaaagcattcaactttttaccgttgagtatgatttagctgtgagtttgtcatatttggtctttcagtgttacacttttatggcttttaattttcgatttgacagatgtaagaagcagcatgaatagtttatactgtggtttttcagagactgaatgccaagagaactcggtaaatgtttattcttctcagctttctctttaaattcccctaaatagcgccccatttgggaacagagcaagagtgttgaactgaagaccaaaatgccctcaaggtgtaaaataatccgagggggaatatttgctgggcgtcaggaaagactcagatgaaatttcaaccctgatggttttcggtgatccaggaagtcagtgagacaatctctctatatgcagagccctttcatgttaattagaatggtatggacaaaccaatgaaaacaagagggaaagtgagaaagatcacccatgattctgtttcactgtttgctttctcctgtcatggttaagagaaatgtgcaattcgatcctcaatcagtgggtggaggataacagggtagattcacttgtgtgcacttgtacagttgtagctgcgagtccagaagtcctctagagcatgtgtactggcactgagttggtgagacagttgtggagtatcccattctgatgagtacagaaaaaaaaagaaaaagaaaagaagagaaaaaattaagaaaaaaatcaaaaaaggaagaaaactaaaaaaaaaaaaaatcaaatcaccttgtgattcagtgtatctgtttactaactcaaataaagcaattgttccctctggaggggtccaggtgcccccgccccacaaggccgcggagcctcagcaggaggggtggcgagttgcgggtgggcagggccaggacggtgtggcgccagccttgaagcaccacggcccaaggatgcggtgtacatactgtatttctagattctcctttgtacagagtcacttcacaagtcaagctactgttttacaggtgctccttatttattagagctgtgagagcttgggggacacacctggcgagcaagctcgctttttaaaaatgaaatttgggggcaggggaaggggaggcgggagggaggggaagctcgcaagcccggggagagatttataaaagtaaacaaaagaaaaccttccagcaacaaattaaaaaataataacaaatcaaccccagcaccaaacccacccaggcaggaagaagccgcccctcctctggggccatatttttctgctgggtcacaacattctcctctccctgactggtgtcagattcatcaaacaaaaaataaatctcgaagaaaaaaaatgcacttacatgtgcttatttggcttttctcatt

SEQ ID NO: 429306 - DNA, 1266 bp, Homo sapiens
gactctccgcactatccttacccgtgacagccactgacgtcctccgccgctagaagagaccccgcttctcggcgcctgccctccccctcgcggctcggtccggccccgccagcaccgctacctccgccagcctcgccaccatcagcaccacctccaccgccgccgccgccgccaccaccaccgccggcggcggcagcagccatttcatctccacagaaaccagacacaaaaacatggcagaaatggagaaagaagggagacctcccgaaaataaacggagcaggaagccggctcacccagtgaaaagggagatcaatgaggagatgaagaactttgcagaaaacaccatgaatgaactccttggctggtatggctatgataaggttgaattaaaagatggtgaggatattgaattcaggagctaccctacagatggggagagccggcagcacatttctgttctcaaagaaaattctttgccaaaaccaaaattacccgaggacagtgttatttcaccatacaatataagcacaggctattcagggcttgccactggaaatggactcagtgactcacctgcagggtcaaaggatcatggcagtgtgcccattattgtacctttaattccaccacctttcataaagccaccagcagaagatgatgtgtcaaatgtacaaataatgtgtgcctggtgccagaaagtgggaatcaagcgctattccctgagtatgggaagtgaggtgaaaagcttctgcagcgagaagtgctttgcggcctgccgacgagcctacttcaagagaaataaggttatccttgtctgtgtcattcagcttttcccattctaccaaggaggatgagcagaagatgactctgcataatttatggataatttctcctgtttttctgcctgtattctcccatgttatattgccattcattgtatctagagtgtaaaatttaaacattttagacttagaatgttgatccacaagattaatcctgacatgcttctgagactgatgtgaaaaaaattacaaagttaaatttctacaaaatttatgattataagatgtaggctgtatgatttttagtcttttcatttgatcttccttgcaaacttggttctgagtacttactgatacacttagatgtccaagaaatcaacttcagtatgagagaacataaaaatactttgggaaatgaggttgtgttctactattttccataaggatcctagttcttttttttccccccccgaagaaacag

SEQ ID NO: 429307 - DNA, 1299 bp, Homo sapiens
gactctccgcactatccttacccgtgacagccactgacgtcctccgccgctagaagagaccccgcttctcggcgcctgccctccccctcgcggctcggtccggccccgccagcaccgctacctccgccagcctcgccaccatcagcaccacctccaccgccgccgccgccgccaccaccaccgccggcggcggcagcagccatttcatctccacagaaaccagacacaaaaacatggcagaaatggagaaagaagggagacctcccgaaaataaacggagcaggaagccggctcacccagtgaaaagggagatcaatgaggagatgaagaactttgcagaaaacaccatgaatgaactccttggctggtatggctatgataaggttgaattaaaagatggtgaggatattgaattcaggagctaccctacagatggggagagccggcagcacatttctgttctcaaagaaaattctttgccaaaaccaaaattacccgaggacagtgttatttcaccatacaatataagcacaggctattcagggcttgccactggaaatggactcagtgactcacctgcagggtcaaaggatcatggcagtgtgcccattattgtacctttaattccaccacctttcataaagccaccagcagaagatgatgtgtcaaatgtacaaataatgtgtgcctggtgccagaaagtgggaatcaagcgctattccctgagtatgggaagtgaggtgaaaagcttctgcagcgagaagtgctttgcggcctgccgacgagcctacttcaagagaaataaggctagagatgaagatggacatgctgaaaattttccccagcagcactatgctaaggaaactccaaggcttgccttcaagaataactgcgaactacttgtatgtgactggtgtaagcacataagacacacaaaagaatacctggattttggggacggggaaagaaggcttcagttctgcagtgcaaaatgtctcaatcaatacaaaatggacattttctacaaagagacccaggccaatcttccagctgggctgtgcagcacattacaccctcccatggaaaataaagcagaaggcaccggggtgcagctgctcactccagactcttggaatatcccgctaacagatgctcggaggaaggccccctccccggtggctacagctggccaaagccagggccctggcccgtcggcgtccaccaccgtctctccatctgacactgccaactgctctgtcactaaaatccccacgccagtgcccaagtccatccccatca

SEQ ID NO: 429308 - DNA, 511 bp, Homo sapiens
aattacccgaggacagtgttatttcaccatacaatataagcacaggctattcagggcttgccactggaaatggactcagtgactcacctgcagggtcaaaggatcatggcagtgtgcccattattgtacctttaattccaccacctttcataaagccaccagcaggtaagtcactactggtgttttcagtgataacaattcatagaaagttgttttaaccatcttaggaataattattaaatgctcaagttaactttggtagaggctgttttagggaccttataggtaagaaatgttaatacaggcatcacttagagtattactgttacattaggaaaatttccctacctactactacttaggctataaactttcaactgacagtaaaccttttctaccactgactacaaaacaaagttattttccttctctgaaatcacctgtttaaatgagaaaaaaaagataaaatggtttttaaaaataaaatatagacaatgactgtttagcaaga

SEQ ID NO: 429309 - DNA, 1017 bp, Homo sapiens
gtgtgggtaggggagtcctggggtcaaacctggggggagtatctgggcggggccaggtggctgggctggcttgatctcaggcagagctgggcgcttagcatcagtgaggaagttgttaaaaaacgcgacttcctttttcacttcctcaattttctctgcatgcttgttgaagatatgttgcgcacaaactcaggacccttgaatttcttgccactgagaggacacagccacttatccttgcccagttcctgcgtgtggaggtgacgaacttctccacttcctgctctgggtctttgcgccccatcttctgggcctcttcctctgagagtgactcctctgctgcagcccgtgccgccgccgcctcctgggaagagaggaagcgggagaggagcccacgtcgcctgtcacccaatatctccagccgcgcagtcccgaagagtgtaagatgttcgcctgcgccaagctcgcctgcaccccctctctgatccgagctggatccagagttgcatacagaccaatttctgcatcagtgttatctcgaccagaggctagtaggactggagagggctctacggtatttaatggggcccagaatggtgtgtctcagctaatccaaagggagtttcagaccagtgcaatcagcagagacattgatactgctgccaaatttattggtgcaggtgctgcaacagtaggagtggctggttctggtgctggtattggaacagtctttggcagccttatcattggttatgccagaaacccttcgctgaagcagcagctgttctcatatgctatcctgggatttgccttgtctgaagctatgggtctcttttgtttgatggttgctttcttgattttgtttgccatgtaacaaattactgcttgacatgttggcattcatattaattacggatgtaattctgtgtatcttactgtgactccgaaaactgtagtattggtgtcatgggaatgtacgttatttccaaagtcatttcattaaagatgaaaacttta

SEQ ID NO: 429310 - DNA, 823 bp, Homo sapiens
aattccggaattccccggcctggccagggcggagcggcgcccagtagggacccattcattgtgccggcgcctcactgggcacggggcccaagctgacggcgtgcacgggagcctgcggagcctgggtgggaagaacaggcccctggagggcacttgaccttaagcctcttttcctccgagaggaagcgggagaggagcccacgtcgcctgtcacccaatatctccagccgcgcagtcccgaagagtgtaagatgttcgcctgcgccaagctcgcctgcaccccctctctgatccgagctggatccagagttgcatacagaccaatttctgcatcagtgttatctcgaccagaggctagtaggactggagagggctctacggtatttaatggggcccagaatggtgtgtctcagctaatccaaagggagtttcagaccagtgcaatcagcagagacattgatactgctgccaaatttattggtgcaggtgctgcaacagtaggagtggctggttctggtgctggtattggaacagtctttggcagccttatcattggttatgccagaaacccttcgctgaagcagcagctgttctcatatgctatcctgggatttgccttgtctgaagctatgggtctcttttgtttgatggttgctttcttgattttgtttgccatgtaacaaattactgcttgacatgttggcattcatattaattacggatgtaattctgtgtatcttactgtgactccgaaaactgtagtattggtgtcatgggaatgtacgttatttccaaagtcatttcattaaagatgaaaacttta

SEQ ID NO: 429311 - DNA, 754 bp, Homo sapiens
tacccgcccggggcaatcagcagagacattgatactactgccattttccatgagagtcccactccttcgacctctgctgcagcccgtgccgccgccgcctcctgggaagagaggaagcgggagaggagcccacgtcgcctgtcacccaatatctccagccgcgcagtcccgaagagtgtaagatgttcgcctgcgccaagctcgcctgcaccccctctctgatccgagctggatccagagttgcatacagaccaatttctgcatcagtgttatctcgaccagaggctagtaggactggagagggctctacggtatttaatggggcccagaatggtgtgtctcagctaatccaaagggagtttcagaccagtgcaatcagcagagacattgatactgctgccaaatttattggtgcaggtgctgcaacagtaggagtggctggttctggtgctggtattggaacagtctttggcagccttatcattggttatgccagaaacccttcgctgaagcagcagctgttctcatatgctatcctgggatttgccttgtctgaagctatgggtctcttttgtttgatggttgctttcttgattttgtttgccatgtaacaaattactgcttgacatgttggcattcatattaattacggatgtaattctgtgtatcttactgtgactccgaaaactgtagtattggtgtcatgggaatgtacgttatttccaaagtcatttcattaaagatgaaaacttta

SEQ ID NO: 429312 - DNA, 2644 bp, Homo sapiens
tcttcatccgggtgctgcggcgcgaataagagccggaccgcgcttgcgcattgagtcccactccttcgacctctgctgcagcccgtgccgccgccgcctcctgggaagagaggaagcgggagaggagcccacgtcgcctgtcacccaatatctccagccgcgcagtcccgaagagtgtaagatgttcgcctgcgccaagctcgcctgcaccccctctctgatccgagctggatccagagttgcatacagaccaatttctgcatcagtgttatctcgaccagaggctagtaggactggagagggctctacggtatttaatggggcccagaatggtgtgtctcagctaatccaaagggagtttcagaccagtgcaatcagcagagacattgatactgctgccaaatttattggtgcaggtgctgcaacagtaggagtggctggttctggtgctggtattggaacagtctttggcagccttatcattggttatgccagaaacccttcgctgaagcagcagctgttctcatatgctatcctgggatttgccttgtctgaagctatgggtctcttttgtttgatggttgctttcttgattttgtttgccatgtaacaaattactgcttgacatgttggcattcatattaattacggatgtaattctgtgtatcttactgtgactccgaaaactgtagtattggtgtcatgggaatgtacgttatttccaaagtcatttcattaaagatgaaaactttaatttcttctgtgatttgtacttacactaagtttagattatcacaaagaagaacgtgcattcaggcagatgctgtcccattcagaggaagctacagcagttgctccactgatgaaaaatattccaatgtaatttttatgggaattcttttatatagtgttctgcatattgtaattcatagggcttttgtttattcatataaaggataaatatttgggtgttttgagcttctataaaatatgattaattaaaggtagttaatactcaagatggtcttgagtttttaaggtctaacatcagttagaatacttcaaatcagaatcaccttccaagactgacttgacaggtggttctaaaaataaatcacgtcagctttttaggaaatgaagccttaagctagggggtaatgtgacttttgtttttcagtaagtctcacattaagcaattgtgtgcctctaatgaatcttccatgtcttttcagaacagaaactagcagctagtttcttacttgaacaagactattaaaaaccaaatatcaaaaaactgaattggctagatttttacagccaaaaattgctgtaaggcagtgtgtatcactgttgctaacatgtttatagtgggagtcttggggatgatagctggttcaacagtattttgctgctaatactttatgttgcttcttggtcaaacttttcccattcaaaggaagaagatggtgctactatagacagtttttcccctagcaaatatattgtaccataatatctatcatccaagtttcagggttttttgaaagttgataattaggaaagtgacattttacttttcttagtgccctttgcctgtttgatttccattgagaaagagcagtcaccaaagttcctcaagtgtcggaagaccaccaccatcagaatcagtgcttgtttaaaaaataaaaatccctaggttccagacctactgaattggactctttggacatgagactcagcaatctacatctttaaaaaggcttcccaggtggtttttgtgcatactgtttgagagtcactaagttatatatatatcctaccttctgtaaagtgaaatgaggccccaaaaagctaaagaggtagagctgctacctcgtttttagttgattcatcatctagtctatatcacccaaaagaattggaaataggtattcaaacaaaaacctgtatacaagtattcatagaagcactacttacaatagccgaaaggtagaaacaaccaaatgtctatcagctgatgaatggataagtaaaatacatccatataatggaatattcagccatgaaaaggaatgaggcactgatacataatgaatagatgtgagtgaaccctaagaaagcatgctaagtggaagaagccagccacatgattccatttatatgaaatatccaaaataggcaaatccatggtgacaaagccaattagtagttatcaggaactagggagggggtgaaaagggagtgactgcgtaatgcgtatggggattccttttaggatgatgaaaattggatgaattacagctggtctgatggtagtgggttatcagaacttattaacattagtgtcattaaagttggtatatagcccctcactgctaaatctggctcaaaaattaaaagattattaaaatttgatgaattagtggtgatggttgcacaacattgtaaatataataaatgtcactgaattgtacactttaaggtggttaaaatggcaaattttacatgtcttactgaaactactgtactatttaatacaaagtacatagtataaaattttaaaagtgataggaaaatgcttagattaatattcacctattccaagtatattttaaataaaaacagtcttggtaaagaaaaaatc

SEQ ID NO: 429313 - DNA, 779 bp, Homo sapiens
aattccggaattccccggcctggccagggcggagcggcgcccagtagggacccattcattgtgccggcgcctcactgggcacggggcccaagctgacggcgtgcacgggagcctgcggagcctgggtgggaagaacaggcccctggagggcacttgaccttaagcctcttttcctccgagaggaagcgggagaggagcccacgtcgcctgtcacccaatatctccagccgcgcagtcccgaagagtatccgagctggatccagagttgcatacagaccaatttctgcatcagtgttatctcgaccagaggctagtaggactggagagggctctacggtatttaatggggcccagaatggtgtgtctcagctaatccaaagggagtttcagaccagtgcaatcagcagagacattgatactgctgccaaatttattggtgcaggtgctgcaacagtaggagtggctggttctggtgctggtattggaacagtctttggcagccttatcattggttatgccagaaacccttcgctgaagcagcagctgttctcatatgctatcctgggatttgccttgtctgaagctatgggtctcttttgtttgatggttgctttcttgattttgtttgccatgtaacaaattactgcttgacatgttggcattcatattaattacggatgtaattctgtgtatcttactgtgactccgaaaactgtagtattggtgtcatgggaatgtacgttatttccaaagtcatttcattaaagatgaaaacttta

SEQ ID NO: 429314 - DNA, 3299 bp, Homo sapiens
tcttcatccgggtgctgcggcgcgaataagagccggaccgcgcttgcgcattgagtcccactccttcgacctctgctgcagcccgtgccgccgccgcctcctgggaagagaggaagcgggagaggagcccacgtcgcctgtcacccaatatctccagccgcgcagtcccgaagagtgtaagatgttcgcctgcgccaagctcgcctgcaccccctctctgatccgagctggatccagagttgcatacagaccaatttctgcatcagtgttatctcgaccagaggctagtaggactggagagggctctacggtatttaatggggcccagaatggtgtgtctcagctaatccaaagggagtttcagaccagtgcaatcagcagagacattgatactgctgccaaatttattggtgcaggtgctgcaacagtaggagtggctggttctggtgctggtattggaacagtctttggcagccttatcattggttatgccaggtaatcatttctatccctaaataagttaagagcatgcttgcagtagttggaaacttagctactgaaataatagctactttgcattaagtgcttactctgtgtcttgcattatatttaaagggctttgtatgcattatctcacttaattctcataacaccatttgggatgttatgagaataacatctatgaaggactagagacacagaggccacattacttgcccaggtcatagctagtaaatgtcagaaaatgaattttaactaagtctgacttcagagtctgcattcctaattgttaagctattttgggaataaaattattagagcacattccttaaaaggatcaatttattttatttaagacctaaactgtcagatcttaaaaggtatagatcatattttcagatggataagaatgtcagaacccatcaaaatgaatgaaaactaaccatttatattgacagacagctccctacctttacaccatattatcaggattgaaggagaatagtgtaagagagatctaggcaaatactcttccagcagacttttcagtttacaaaaatccccacactagtaatctgattctttaacatttaccaaacatgttgaaattaatatttcaaagtaacagtcatatgtggtctcttttagaaaacccttcgctgaagcagcagctgttctcatatgctatcctgggatttgccttgtctgaagctatgggtctcttttgtttgatggttgctttcttgattttgtttgccatgtaacaaattactgcttgacatgttggcattcatattaattacggatgtaattctgtgtatcttactgtgactccgaaaactgtagtattggtgtcatgggaatgtacgttatttccaaagtcatttcattaaagatgaaaactttaatttcttctgtgatttgtacttacactaagtttagattatcacaaagaagaacgtgcattcaggcagatgctgtcccattcagaggaagctacagcagttgctccactgatgaaaaatattccaatgtaatttttatgggaattcttttatatagtgttctgcatattgtaattcatagggcttttgtttattcatataaaggataaatatttgggtgttttgagcttctataaaatatgattaattaaaggtagttaatactcaagatggtcttgagtttttaaggtctaacatcagttagaatacttcaaatcagaatcaccttccaagactgacttgacaggtggttctaaaaataaatcacgtcagctttttaggaaatgaagccttaagctagggggtaatgtgacttttgtttttcagtaagtctcacattaagcaattgtgtgcctctaatgaatcttccatgtcttttcagaacagaaactagcagctagtttcttacttgaacaagactattaaaaaccaaatatcaaaaaactgaattggctagatttttacagccaaaaattgctgtaaggcagtgtgtatcactgttgctaacatgtttatagtgggagtcttggggatgatagctggttcaacagtattttgctgctaatactttatgttgcttcttggtcaaacttttcccattcaaaggaagaagatggtgctactatagacagtttttcccctagcaaatatattgtaccataatatctatcatccaagtttcagggttttttgaaagttgataattaggaaagtgacattttacttttcttagtgccctttgcctgtttgatttccattgagaaagagcagtcaccaaagttcctcaagtgtcggaagaccaccaccatcagaatcagtgcttgtttaaaaaataaaaatccctaggttccagacctactgaattggactctttggacatgagactcagcaatctacatctttaaaaaggcttcccaggtggtttttgtgcatactgtttgagagtcactaagttatatatatatcctaccttctgtaaagtgaaatgaggccccaaaaagctaaagaggtagagctgctacctcgtttttagttgattcatcatctagtctatatcacccaaaagaattggaaataggtattcaaacaaaaacctgtatacaagtattcatagaagcactacttacaatagccgaaaggtagaaacaaccaaatgtctatcagctgatgaatggataagtaaaatacatccatataatggaatattcagccatgaaaaggaatgaggcactgatacataatgaatagatgtgagtgaaccctaagaaagcatgctaagtggaagaagccagccacatgattccatttatatgaaatatccaaaataggcaaatccatggtgacaaagccaattagtagttatcaggaactagggagggggtgaaaagggagtgactgcgtaatgcgtatggggattccttttaggatgatgaaaattggatgaattacagctggtctgatggtagtgggttatcagaacttattaacattagtgtcattaaagttggtatatagcccctcactgctaaatctggctcaaaaattaaaagattattaaaatttgatgaattagtggtgatggttgcacaacattgtaaatataataaatgtcactgaattgtacactttaaggtggttaaaatggcaaattttacatgtcttactgaaactactgtactatttaatacaaagtacatagtataaaattttaaaagtgataggaaaatgcttagattaatattcacctattccaagtatattttaaataaaaacagtcttggtaaagaaaaaatc

SEQ ID NO: 429315 - DNA, 634 bp, Homo sapiens
tacccgcccggggcaatcagcagagacattgatactactgccattttccatgagagtcccactccttcgacctctgctgcagcccgtgccgccgccgcctcctgggaagagaggaagcgggagaggagcccacgtcgcctgtcacccaatatctccagccgcgcagtcccgaagagtgtaagatgttcgcctgcgccaagctcgcctgcaccccctctctgatccgagctggatccagagttgcatacagaccaatttctgcatcagtgttatctcgaccagaggctagtaggactggagagggctctacggtatttaatggggcccagaatggtgtgtctcagctaatccaaagggagtttcagaccagtgcaataaacccttcgctgaagcagcagctgttctcatatgctatcctgggatttgccttgtctgaagctatgggtctcttttgtttgatggttgctttcttgattttgtttgccatgtaacaaattactgcttgacatgttggcattcatattaattacggatgtaattctgtgtatcttactgtgactccgaaaactgtagtattggtgtcatgggaatgtacgttatttccaaagtcatttcattaaagatgaaaacttta

SEQ ID NO: 429316 - DNA, 780 bp, Homo sapiens
gagaaatttctctatccaaaacttggccaagtatttatattcaagtctattgatttaagttgcctatatttaaaattataatagctacagttattgaaaaatgtactctattggactggatgcggtggctcacacctgtgttcctagcactgtgggaggccaaggagggaggattgcttgaccccaggagttcaagatcagcctgggccacatagtaagatcctgtttctacaaaacatttaaaaattagcccagcctggtggtcacctgtagtgttagctactcaggaggctgaggtggggagctggcttgagcccaggagttcaaggctatagtgagctatgatcacaccacactgtactgcactccagcctgggtgacagaccaggtgagaccttgtctcttttaagaaaaaacaaaacaaaaaaccctactttatttaaaagcatatttatatatgttgtttcttaattttcaacacccttttaagatgtagatattgttatccctgttacacaagagtgagattattctaagctcttgatttgtctctttacactcagctacaaaataaaaaagtagttatcattttgacaatatggtatttaattaaaatagctacctgtggttactgatacgacctttacctttattttctgttttccagggctctacggtatttaatggggcccagaatggtgtgtctcagctaatccaaagggagtttcagaccagtgcaatcagcagagacattgatactgctgccaaatttattggtgc

SEQ ID NO: 429317 - DNA, 753 bp, Homo sapiens
tcttcatccgggtgctgcggcgcgaataagagccggaccgcgcttgcgcattgagtcccactccttcgacctctgctgcagcccgtgccgccgccgcctcctgggaagagaggaagcgggagaggagcccacgtcgcctgtcacccaatatctccagccgcgcagtcccgaagagtgtaagatgttcgcctgcgccaagctcgcctgcaccccctctctgatccgagctggatccagagttgcatacagaccaatttctgcatcagtgttatctcgaccagaggctagtaggactggagagggctctacggtatttaatggggcccagaatggtgtgtctcagctaatccaaagggagtttcagaccagtgcaatcagcagagacattgatactgctgccaaatttattggtgcaggtgctgcaacagtaggagtggctggttctggtgctggtattggaacagtctttggcagccttatcattggttatgccagaaacccttcgctgaagcagcagctgttctcatatgctatcctgggatttgccttgtctgaagctatgggtctcttttgtttgatggttgctttcttgattttgtttgccatgtaacaaattactgcttgacatgttggcattcatattaattacggatgtaattctgtgtatcttactgtgactccgaaaactgtagtattggtgtcatgggaatgtacgttatttccaaagtcatttcattaaagatgaaaacttta

SEQ ID NO: 429318 - DNA, 1099 bp, Homo sapiens
gtgtgggtaggggagtcctggggtcaaacctggggggagtatctgggcggggccaggtggctgggctggcttgatctcaggcagagctgggcgcttagcatcagtgaggaagttgttaaaaaacgcgacttcctttttcacttcctcaattttctctgcatgcttgttgaagatatgttgcgcacaaactcaggacccttgaatttcttgccactgagaggacacagccacttatccttgcccagttcctgcgtgtggaggtgacgaacttctccacttcctgctctgggtctttgcgccccatcttctgggcctcttcctctgagagtgactcctctgctgcagcccgtgccgccgccgcctcctgggaagagaggaagcgggagaggagcccacgtcgcctgtcacccaatatctccagccgcgcagtcccgaagagtgtaagatgttcgcctgcgccaagctcgcctgcaccccctctctgatccgagctggatccagagttgcatacagaccaatttctgcatcagtgttatctcgaccagaggctagtaggactggagagggctctacggtatttaatggggcccagaatggtgtgtctcagctaatccaaagggagtttcagaccagtgcaatcagcagagacattgatactgctgccaaatttattggtgcaggtgctgcaacagtaggagtggctggttctggtgctggtattggaacagtctttggcagccttatcattggttatgccagaaacccttcgctgaagcagcagctgttctcatatgctatcctgggatttgccttgtctgaagctatgggtctcttttgtttgatggttgctttcttgattttgtttgccatgtaacaaattactgcttgacatgttggcattcatattaattacggatgtaattctgtgtatcttactgtgactccgaaaactgtagtattggtgtcatgggaatgtacgttatttccaaagtcatttcattaaagatgaaaactttaaaaacaccaatacagcacatacacagcgccccacatcccccaggcccacctgacaccaaaaaggggggggcccccaatcccc

SEQ ID NO: 429319 - DNA, 1931 bp, Homo sapiens
gtgtgggtaggggagtcctggggtcaaacctggggggagtatctgggcggggccaggtggctgggctggcttgatctcaggcagagctgggcgcttagcatcagtgaggaagttgttaaaaaacgcgacttcctttttcacttcctcaattttctctgcatgcttgttgaagatatgttgcgcacaaactcaggacccttgaatttcttgccactgagaggacacagccacttatccttgcccagttcctgcgtgtggaggtgacgaacttctccacttcctgctctgggtctttgcgccccatcttctgggcctcttcctctgagagtgactcctctgctgcagcccgtgccgccgccgcctcctgggaagagaggaagcgggagaggagcccacgtcgcctgtcacccaatatctccagccgcgcagtcccgaagagtgtaagatgttcgcctgcgccaagctcgcctgcaccccctctctgatccgagctggatccagagttgcatacagaccaatttctgcatcagtgttatctcgaccagaggctagtaggactggagagggctctacggtatttaatggggcccagaatggtgtgtctcagctaatccaaagggagtttcagaccagtgcaatcagcagagacattgatactgctgccaaatttattggtgcaggtgctgcaacagtaggagtggctggttctggtgctggtattggaacagtctttggcagccttatcattggttatgccagaaacccttcgctgaagcagcagctgttctcatatgctatcctgggatttgccttgtctgaagctatgggtctcttttgtttgatggttgctttcttgattttgtttgccatgtaacaaattactgcttgacatgttggcattcatattaattacggatgtaattctgtgtatcttactgtgactccgaaaactgtagtattggtgtcatgggaatgtacgttatttccaaagtcatttcattaaagatgaaaactttaaaaaaaaaaaaaaaaaaaaaaaaaaaaaaaaaaaaaaaaaaaaaaaaaaaaaaaaaaaaaaaaaaaaaaaaaaaaaacaaacaaaaaaaagaaaaacaaaaaaaaaacgaaaaaacaacgaacaacaacccccgacgaccacacgaacacacacgaagaagcaaacaacgagacgaacgacaacgcagcggatacaccgaaggaagaacaaggaaggcggacggtgcccacccagagccgggagcgggccagcgccggcaccagccgcccccgcccgcgcgacgcccggccagcgacgtccgcccgcacacatacggacgacgcgccgacgccccccatgacctcgaaccagctagcgtcgacagcgcgacggctgccgcgccagaggcactgcatcgaagaggccgaccaacaccgacgccaccgcaagacacggcaggcgcagctaccgagccgcagcaaacaaccacaacaaaaagaaccgtactgcgaccagtcggccgacggcgcgagaccaacccgacgcgaaatcgacggaacgtcatcccaacccagcgagaccacgtcgaggctcgacagatcaagcacaggccacgggacatgcacaccgcacacacaagcagcaggacggaagagagagaccacgccgaaagcccacggcgagcacgagcaaaccgcaaacaacgcaagacgcgccaacgagcagacggcggatcagaacgcacccgccgacacaaagcgccgcagacagaacgaagaaagcaccagaacgcagaaaacggcaggcgcagcccgaccccgcagactccagcgcccagaacggcgcacgacgagcagccccacgcgaccaaggcaccagagctcgcacgccgcagatggacgcgagccgaggagaagacaacgacgtgcacgcg

SEQ ID NO: 429320 - DNA, 1408 bp, Homo sapiens
tcttcatccgggtgctgcggcgcgaataagagccggaccgcgcttgcgcattgagtcccactccttcgacctctgctgcagcccgtgccgccgccgcctcctgggaagagaggaagcgggagaggagcccacgtcgcctgtcacccaatatctccagccgcgcagtcccgaagagtgtaagatgttcgcctgcgccaagctcgcctgcaccccctctctgatccgagctggatccagagttgcatacagaccaatttctgcatcagtgttatctcgaccagaggctagtaggactggagagggctctacggtatttaatggggcccagaatggtgtgtctcagctaatccaaagggagtttcagaccagtgcaatcagcagagacattgatactgctgccaaatttattggtgcaggtgctgcaacagtaggagtggctggttctggtgctggtattggaacagtctttggcagccttatcattggttatgccaggtaatcatttctatccctaaataagttaagagcatgcttgcagtagttggaaacttagctactgaaataatagctactttgcattaagtgcttactctgtgtcttgcattatatttaaagggctttgtatgcattatctcacttaattctcataacaccatttgggatgttatgagaataacatctatgaaggactagagacacagaggccacattacttgcccaggtcatagctagtaaatgtcagaaaatgaattttaactaagtctgacttcagagtctgcattcctaattgttaagctattttgggaataaaattattagagcacattccttaaaaggatcaatttattttatttaagacctaaactgtcagatcttaaaaggtatagatcatattttcagatggataagaatgtcagaacccatcaaaatgaatgaaaactaaccatttatattgacagacagctccctacctttacaccatattatcaggattgaaggagaatagtgtaagagagatctaggcaaatactcttccagcagacttttcagtttacaaaaatccccacactagtaatctgattctttaacatttaccaaacatgttgaaattaatatttcaaagtaacagtcatatgtggtctcttttagaaaacccttcgctgaagcagcagctgttctcatatgctatcctgggatttgccttgtctgaagctatgggtctcttttgtttgatggttgctttcttgattttgtttgccatgtaacaaattactgcttgacatgttggcattcatattaattacggatgtaattctgtgtatcttactgtgactccgaaaactgtagtattggtgtcatgggaatgtacgttatttccaaagtcatttcattaaagatgaaaacttta

SEQ ID NO: 429321 - DNA, 705 bp, Homo sapiens
cggagcggagctgtgaggcgccagtgcggagcgggcgggcgggcgggcggcgcgaggcggagcgcgggcggccggcgaaactccaagggcggaccgcggcagggagcgatcggcctcgggctgcgggagccggagaccgcggcggcggcggctgctgcagctgcaggaggagcccagggaacaccgcccctgcctgtgctctgcctcgggccatcgctcctccccagggcccagtgcggactcgcctccgtgaagtgtcacaccatgtctgaccggaaggcagtgatcaagaacgcagacatgtctgaggacatgcaacaggatgccgttgactgcgccacgcaggccatggagaagtacaatatagagaaggacattgctgcctatatcaagaaggaatttgacaagaaatataaccctacctggcattgtatcgtgggccgaaattttggcagctacgtcacacacgagacaaagcacttcatctatttttacttgggtcaagttgcaatcctcctcttcaagtcaggctaggtggccatggtgaaggtgtcagtggcggcggcagcgatggcaagcaggcggcgttgctgggactgttttgcactggagccagcatcaggatgtcctctccaatggctgtgctactgcatggactgtatactcgatttcatgtgtatgtcgcagtaaacaaaaccaaacctc

SEQ ID NO: 429322 - DNA, 413 bp, Homo sapiens
accaaacgtgtcggtgctggagttgcagggagagactcccattctgatttctccttctccagctaccctaattacctttcttctctacctttgttcttttttaggaatttgacaagaaatataaccctacctggcattgtatcgtgggccgaaattttggcagctacgtcacacacgagacaaagcacttcatctatttttacttgggtcaagttgcaatcctcctcttcaagtcaggctaggtggccatggtgaaggtgtcagtggcggcggcagcgatggcaagcaggcggcgttgctgggactgttttgcactggagccagcatcaggatgtcctctccaatggctgtgctactgcatggactgtatactcgatttcatgtgtatgtcgcagtaaacaaaaccaaacctc

SEQ ID NO: 429323 - DNA, 957 bp, Homo sapiens
ttggggtagaagggagggagggggcaggacagtgtggaatctctagggtgtatgggtaggtagggggcacagttagttctaagtgggcttttatgctaaaagcctctggggatatctgttttgaaaataaagataggtgtcccctccttgctgtcatctagcccagacactctgcttgctctctggctgtctgctccctgggaaggctttaggaggaccacccaggacaggatgaccatgctgccatctgctctggagctgggtctcagtgcagagggacagtgactgtggatggttgcagtctctggtgggaggtgaggatagaagtgataaagagctaagaggagcttctgggagccttggaggaggtcagtcttgcagtggtgaagccaggacataggagatggagcagggctgtgagaggaggagattctgaggaggatgcaggggaaatcttgtctgttaatgaaataggagtggggtggggtttggggtggggtggtcattgccgtttgagctgctgattttcatgagtcgccttcaaaactctcgtgtagggttgacaatgtgggggggtgggggatccagcttattcttttattttcaagtccattcttggggctggtggggaggcaggagaatacccctccctaagcccttagtgtgtgccgagcttgctttgtgatgttggcaggggaggggagacctgggtggtgactgagttccctttatcaaacccttcaatgggcacaaaattgagtgcttgattttaggttttatttttttatgaatgtccaaatctgtgtttccccctgccctcccagactgtgtggccagttgaaagtgtctggtttgtgttcatctctccctcatttctggagcagggcctgagaccctgccacatctcctatgctctgcatccacgcctcttttggacattaaaggttgattgatgca

SEQ ID NO: 429324 - DNA, 1014 bp, Homo sapiens
gtgtccatcccccttcgcgtgtccatcccccttcgtgtgtccatcccccttcgtgtgtccatcccccttcgtgtgtccatcccccttcgtgtggaatctctagggtgtatgggtaggtagggggcacagttagttctaagtgggcttttatgctaaaagcctctggggatatctgttttgaaaataaagataggtgtcccctccttgctgtcatctagcccagacactctgcttgctctctggctgtctgctccctgggaaggctttaggaggaccacccaggacaggatgaccatgctgccatctgctctggagctgggtctcagtgcagagggacagtgactgtggatggttgcagtctctggtgggaggtgaggatagaagtgataaagagctaagaggagcttctgggagccttggaggaggtcagtcttgcagtggtgaagccaggacataggagatggagcagggctgtgagaggaggagattctgaggaggatgcaggggaaatcttgtctgttaatgaaataggagtggggtggggtttggggtggggtggtcattgccgtttgagctgctgattttcatgagtcgccttcaaaactctcgtgtagggttgacaatgtgggggggtgggggatccagcttattcttttattttcaagtccattcttggggctggtggggaggcaggagaatacccctccctaagcccttagtgtgtgccgagcttgctttgtgatgttggcaggggaggggagacctgggtggtgactgagttccctttatcaaacccttcaatgggcacaaaattgagtgcttgattttaggttttatttttttatgaatgtccaaatctgtgtttccccctgccctcccagactgtgtggccagttgaaagtgtctggtttgtgttcatctctccctcatttctggagcagggcctgagaccctgccacatctcctatgctctgcatccacgcctcttttggacattaaaggttgattgatgca

SEQ ID NO: 429325 - DNA, 2138 bp, Homo sapiens
  misc_feature (1271)..(1271): n is a, c, g, or t
cggagcggagctgtgaggcgccagtgcggagcgggcgggcgggcgggcggcgcgaggcggagcgcgggcggccggcgaaactccaagggcggaccgcggcagggagcgatcggcctcgggctgcgggagccggagaccgcggcggcggcggctgctgcagctgcaggaggagcccagggaacaccgcccctgcctgtgctctgcctcgggccatcgctcctccccagggcccagtgcggactcgcctccgtgaagtgtcacaccatgtctgaccggaaggcagtgatcaagaacgcagacatgtctgaggacatgcaacaggatgccgttgactgcgccacgcaggccatggagaagtacaatatagagaaggacattgctgcctatatcaagaaggaatttgacaagaaatataaccctacctggcattgtatcgtgggccgaaattttggcagctacgtcacacacgagacaaagcacttcatctatttttacttgggtcaagttgcaatcctcctcttcaagtcaggctaggtggccatggtgaaggtgtcagtggcggcggcagcgatggcaagcaggcggcgttgctgggactgttttgcactggagccagcatcaggatgtcctctccaatggctgtgctactgcatggactgtatactcgatttcatgtgtatgtcgcagtaaacaaaaccaaacctctttctgtttagttgcctgggggaagaaggctgctttatgtttatttttcaagactttaaaaatattttttggttgtattgcactaggaaatctctcccacctctcccttttctctttctttccctatacaaaataaaaggcccaccatagagactaggcggccgaaagactaggagggctgaggaaaagaaataggtctctggaggtggaactaaaactgtgcagctgcctcttcctggcggtggatgctgctttgggagggccagggaggctgcagggggacagtgttgggattgtcaaggaaaaaggggtaggaaggaaggtggagggattgatctagtaccagggagaatattccactgaactgtgattctatggcttggggcggagggtggggtggggatgccttctttaggggccctgagatgtgtttgtctgtggtttggggtgggtggtcattgcgtttgagctgtgattttcatgagtcgcttcaaaatctcgtgtagggttgacaatgtgggggggtgggggatccagcttattcttttattttcaagtccattctnggggctggtggggaggcaggagaatacccctccctaagcccttagtgtgtcccctccttgctgtcatctagcccagacactctgcttgctctctggctgtctgctccctgggaaggctttaggaggaccacccaggacaggatgaccatgctgccatctgctctggagctgggtctcagtgcagagggacagtgactgtggatggttgcagtctctggtgggaggtgaggatagaagtgataaagagctaagaggagcttctgggagccttggaggaggtcagtcttgcagtggtgaagccaggacataggagatggagcagggctgtgagaggaggagattctgaggaggatgcaggggaaatcttgtctgttaatgaaataggagtggggtggggtttggggtggggtggtcattgccgtttgagctgctgattttcatgagtcgccttcaaaactctcgtgtagggttgacaatgtgggggggtgggggatccagcttattcttttattttcaagtccattcttggggctggtggggaggcaggagaatacccctccctaagcccttagtgtgtgccgagcttgctttgtgatgttggcaggggaggggagacctgggtggtgactgagttccctttatcaaacccttcaatgggcacaaaattgagtgcttgattttaggttttatttttttatgaatgtccaaatctgtgtttccccctgccctcccagactgtgtggccagttgaaagtgtctggtttgtgttcatctctccctcatttctggagcagggcctgagaccctgccacatctcctatgctctgcatccacgcctcttttggacattaaaggttgattgatgca

SEQ ID NO: 429326 - DNA, 2130 bp, Homo sapiens
  misc_feature (1263)..(1263): n is a, c, g, or t
gaaaatctcattttacttatgataaaaactgatgagttattatgtcctattggccctgtatttcccagggtgggaacaatgtctctgccaaagcttaggggctccctctcctaatgcttcacatccgtgttttctgttgccctcaccttctatactcccctcttgcactgagaccccacacccagcagctaatgttcactgcccagagcaaggagttgtcagccttacctctctgctccttctgtagtgtcacaccatgtctgaccggaaggcagtgatcaagaacgcagacatgtctgaggacatgcaacaggatgccgttgactgcgccacgcaggccatggagaagtacaatatagagaaggacattgctgcctatatcaagaaggaatttgacaagaaatataaccctacctggcattgtatcgtgggccgaaattttggcagctacgtcacacacgagacaaagcacttcatctatttttacttgggtcaagttgcaatcctcctcttcaagtcaggctaggtggccatggtgaaggtgtcagtggcggcggcagcgatggcaagcaggcggcgttgctgggactgttttgcactggagccagcatcaggatgtcctctccaatggctgtgctactgcatggactgtatactcgatttcatgtgtatgtcgcagtaaacaaaaccaaacctctttctgtttagttgcctgggggaagaaggctgctttatgtttatttttcaagactttaaaaatattttttggttgtattgcactaggaaatctctcccacctctcccttttctctttctttccctatacaaaataaaaggcccaccatagagactaggcggccgaaagactaggagggctgaggaaaagaaataggtctctggaggtggaactaaaactgtgcagctgcctcttcctggcggtggatgctgctttgggagggccagggaggctgcagggggacagtgttgggattgtcaaggaaaaaggggtaggaaggaaggtggagggattgatctagtaccagggagaatattccactgaactgtgattctatggcttggggcggagggtggggtggggatgccttctttaggggccctgagatgtgtttgtctgtggtttggggtgggtggtcattgcgtttgagctgtgattttcatgagtcgcttcaaaatctcgtgtagggttgacaatgtgggggggtgggggatccagcttattcttttattttcaagtccattctnggggctggtggggaggcaggagaatacccctccctaagcccttagtgtgtcccctccttgctgtcatctagcccagacactctgcttgctctctggctgtctgctccctgggaaggctttaggaggaccacccaggacaggatgaccatgctgccatctgctctggagctgggtctcagtgcagagggacagtgactgtggatggttgcagtctctggtgggaggtgaggatagaagtgataaagagctaagaggagcttctgggagccttggaggaggtcagtcttgcagtggtgaagccaggacataggagatggagcagggctgtgagaggaggagattctgaggaggatgcaggggaaatcttgtctgttaatgaaataggagtggggtggggtttggggtggggtggtcattgccgtttgagctgctgattttcatgagtcgccttcaaaactctcgtgtagggttgacaatgtgggggggtgggggatccagcttattcttttattttcaagtccattcttggggctggtggggaggcaggagaatacccctccctaagcccttagtgtgtgccgagcttgctttgtgatgttggcaggggaggggagacctgggtggtgactgagttccctttatcaaacccttcaatgggcacaaaattgagtgcttgattttaggttttatttttttatgaatgtccaaatctgtgtttccccctgccctcccagactgtgtggccagttgaaagtgtctggtttgtgttcatctctccctcatttctggagcagggcctgagaccctgccacatctcctatgctctgcatccacgcctcttttggacattaaaggttgattgatgca

SEQ ID NO: 429327 - DNA, 1628 bp, Homo sapiens
cggagcggagctgtgaggcgccagtgcggagcgggcgggcgggcgggcggcgcgaggcggagcgcgggcggccggcgaaactccaagggcggaccgcggcagggagcgatcggcctcgggctgcgggagccggagaccgcggcggcggcggctgctgcagctgcaggaggagcccagggaacaccgcccctgcctgtgctctgcctcgggccatcgctcctccccagggcccagtgcggactcgcctccgtgaagtgtcacaccatgtctgaccggaaggcagtgatcaagaacgcagacatgtctgaggacatgcaacaggatgccgttgactgcgccacgcaggccatggagaagtacaatatagagaaggacattgctgcctatatcaagaaggaatttgacaagaaatataaccctacctggcattgtatcgtgggccgaaattttggcagctacgtcacacacgagacaaagcacttcatctatttttacttgggtcaagttgcaatcctcctcttcaagtcaggctaggtggccatggtgaaggtgtcagtggcggcggcagcgatggcaagcaggcggcgttgctgggactgttttgcactggagccagcatcaggatgtcctctccaatggctgtgctactgcatggactgtatactcgatttcatgtgtatgtcgcagtaaacaaaaccaaacctctttctgtttagttgcctgggggaagaaggctgctttatgtttatttttcaagactttaaaaatattttttggttgtattgcactaggaaatctctcccacctctcccttttctctttctttccctatacaaaataaaaggcccaccatagagactaggcggccgaaagactaggagggctgaggaaaagaaataggtctctggaggtggaactaaaactgtgcagctgcctcttcctggcggtggatgctgctttgggagggccagggaggctgcagggggacagtgttgggattgtcaaggaaaaaggggtaggaaggaaggtggagggattgatctagtaccagggagaatattccactgaactgtgattctatggcttggggcggagggtggggtggggatgccttctttaggggccctgagatgtgtttgtctgtggtttggggtggggtttggggtggggtggtcattgccgtttgagctgctgattttcatgagtcgccttcaaaactctcgtgtagggttgacaatgtgggggggtgggggatccagcttattcttttattttcaagtccattcttggggctggtggggaggcaggagaatacccctccctaagcccttagtgtgtgccgagcttgctttgtgatgttggcaggggaggggagacctgggtggtgactgagttccctttatcaaacccttcaatgggcacaaaattgagtgcttgattttaggttttatttttttatgaatgtccaaatctgtgtttccccctgccctcccagactgtgtggccagttgaaagtgtctggtttgtgttcatctctccctcatttctggagcagggcctgagaccctgccacatctcctatgctctgcatccacgcctcttttggacattaaaggttgattgatgca

SEQ ID NO: 429328 - DNA, 1846 bp, Homo sapiens
  misc_feature (979)..(979): n is a, c, g, or t
accaaacgtgtcggtgctggagttgcagggagagactcccattctgatttctccttctccagctaccctaattacctttcttctctacctttgttcttttttaggaatttgacaagaaatataaccctacctggcattgtatcgtgggccgaaattttggcagctacgtcacacacgagacaaagcacttcatctatttttacttgggtcaagttgcaatcctcctcttcaagtcaggctaggtggccatggtgaaggtgtcagtggcggcggcagcgatggcaagcaggcggcgttgctgggactgttttgcactggagccagcatcaggatgtcctctccaatggctgtgctactgcatggactgtatactcgatttcatgtgtatgtcgcagtaaacaaaaccaaacctctttctgtttagttgcctgggggaagaaggctgctttatgtttatttttcaagactttaaaaatattttttggttgtattgcactaggaaatctctcccacctctcccttttctctttctttccctatacaaaataaaaggcccaccatagagactaggcggccgaaagactaggagggctgaggaaaagaaataggtctctggaggtggaactaaaactgtgcagctgcctcttcctggcggtggatgctgctttgggagggccagggaggctgcagggggacagtgttgggattgtcaaggaaaaaggggtaggaaggaaggtggagggattgatctagtaccagggagaatattccactgaactgtgattctatggcttggggcggagggtggggtggggatgccttctttaggggccctgagatgtgtttgtctgtggtttggggtgggtggtcattgcgtttgagctgtgattttcatgagtcgcttcaaaatctcgtgtagggttgacaatgtgggggggtgggggatccagcttattcttttattttcaagtccattctnggggctggtggggaggcaggagaatacccctccctaagcccttagtgtgtcccctccttgctgtcatctagcccagacactctgcttgctctctggctgtctgctccctgggaaggctttaggaggaccacccaggacaggatgaccatgctgccatctgctctggagctgggtctcagtgcagagggacagtgactgtggatggttgcagtctctggtgggaggtgaggatagaagtgataaagagctaagaggagcttctgggagccttggaggaggtcagtcttgcagtggtgaagccaggacataggagatggagcagggctgtgagaggaggagattctgaggaggatgcaggggaaatcttgtctgttaatgaaataggagtggggtggggtttggggtggggtggtcattgccgtttgagctgctgattttcatgagtcgccttcaaaactctcgtgtagggttgacaatgtgggggggtgggggatccagcttattcttttattttcaagtccattcttggggctggtggggaggcaggagaatacccctccctaagcccttagtgtgtgccgagcttgctttgtgatgttggcaggggaggggagacctgggtggtgactgagttccctttatcaaacccttcaatgggcacaaaattgagtgcttgattttaggttttatttttttatgaatgtccaaatctgtgtttccccctgccctcccagactgtgtggccagttgaaagtgtctggtttgtgttcatctctccctcatttctggagcagggcctgagaccctgccacatctcctatgctctgcatccacgcctcttttggacattaaaggttgattgatgca

SEQ ID NO: 429329 - DNA, 1382 bp, Homo sapiens
  misc_feature (25)..(25): n is a, c, g, or t
  misc_feature (515)..(515): n is a, c, g, or t
aactaggctagtacgaggctgggtntgtgcactaggaaatctctcccacctctcccttttctctttctttccctatacaaaataaaaggcccaccatagagactaggcggccgaaagactaggagggctgaggaaaagaaataggtctctggaggtggaactaaaactgtgcagctgcctcttcctggcggtggatgctgctttgggagggccagggaggctgcagggggacagtgttgggattgtcaaggaaaaaggggtaggaaggaaggtggagggattgatctagtaccagggagaatattccactgaactgtgattctatggcttggggcggagggtggggtggggatgccttctttaggggccctgagatgtgtttgtctgtggtttggggtgggtggtcattgcgtttgagctgtgattttcatgagtcgcttcaaaatctcgtgtagggttgacaatgtgggggggtgggggatccagcttattcttttattttcaagtccattctnggggctggtggggaggcaggagaatacccctccctaagcccttagtgtgtcccctccttgctgtcatctagcccagacactctgcttgctctctggctgtctgctccctgggaaggctttaggaggaccacccaggacaggatgaccatgctgccatctgctctggagctgggtctcagtgcagagggacagtgactgtggatggttgcagtctctggtgggaggtgaggatagaagtgataaagagctaagaggagcttctgggagccttggaggaggtcagtcttgcagtggtgaagccaggacataggagatggagcagggctgtgagaggaggagattctgaggaggatgcaggggaaatcttgtctgttaatgaaataggagtggggtggggtttggggtggggtggtcattgccgtttgagctgctgattttcatgagtcgccttcaaaactctcgtgtagggttgacaatgtgggggggtgggggatccagcttattcttttattttcaagtccattcttggggctggtggggaggcaggagaatacccctccctaagcccttagtgtgtgccgagcttgctttgtgatgttggcaggggaggggagacctgggtggtgactgagttccctttatcaaacccttcaatgggcacaaaattgagtgcttgattttaggttttatttttttatgaatgtccaaatctgtgtttccccctgccctcccagactgtgtggccagttgaaagtgtctggtttgtgttcatctctccctcatttctggagcagggcctgagaccctgccacatctcctatgctctgcatccacgcctcttttggacattaaaggttgattgatgca

SEQ ID NO: 429330 - DNA, 1411 bp, Homo sapiens
  misc_feature (32)..(32): n is a, c, g, or t
  misc_feature (544)..(544): n is a, c, g, or t
gctcgctctagaggatccactccccgtacgcncaaaaaaatattttttggttgtattgcactaggaaatctctcccacctctcccttttctctttctttccctatacaaaataaaaggcccaccatagagactaggcggccgaaagactaggagggctgaggaaaagaaataggtctctggaggtggaactaaaactgtgcagctgcctcttcctggcggtggatgctgctttgggagggccagggaggctgcagggggacagtgttgggattgtcaaggaaaaaggggtaggaaggaaggtggagggattgatctagtaccagggagaatattccactgaactgtgattctatggcttggggcggagggtggggtggggatgccttctttaggggccctgagatgtgtttgtctgtggtttggggtgggtggtcattgcgtttgagctgtgattttcatgagtcgcttcaaaatctcgtgtagggttgacaatgtgggggggtgggggatccagcttattcttttattttcaagtccattctnggggctggtggggaggcaggagaatacccctccctaagcccttagtgtgtcccctccttgctgtcatctagcccagacactctgcttgctctctggctgtctgctccctgggaaggctttaggaggaccacccaggacaggatgaccatgctgccatctgctctggagctgggtctcagtgcagagggacagtgactgtggatggttgcagtctctggtgggaggtgaggatagaagtgataaagagctaagaggagcttctgggagccttggaggaggtcagtcttgcagtggtgaagccaggacataggagatggagcagggctgtgagaggaggagattctgaggaggatgcaggggaaatcttgtctgttaatgaaataggagtggggtggggtttggggtggggtggtcattgccgtttgagctgctgattttcatgagtcgccttcaaaactctcgtgtagggttgacaatgtgggggggtgggggatccagcttattcttttattttcaagtccattcttggggctggtggggaggcaggagaatacccctccctaagcccttagtgtgtgccgagcttgctttgtgatgttggcaggggaggggagacctgggtggtgactgagttccctttatcaaacccttcaatgggcacaaaattgagtgcttgattttaggttttatttttttatgaatgtccaaatctgtgtttccccctgccctcccagactgtgtggccagttgaaagtgtctggtttgtgttcatctctccctcatttctggagcagggcctgagaccctgccacatctcctatgctctgcatccacgcctcttttggacattaaaggttgattgatgca

SEQ ID NO: 429331 - DNA, 839 bp, Homo sapiens
tcttctgctatggtcgacttctgctctggtcgaccttctgctctgggtcgaccttctagctctgggtcgaggttctgctctgggtcgaccttctgctctgggtcgaccttctagctctgggtcgaccatctgctctggagctgggtctcagtgcagagggacagtgactgtggatggttgcagtctctggtgggaggtgaggatagaagtgataaagagctaagaggagcttctgggagccttggaggaggtcagtcttgcagtggtgaagccaggacataggagatggagcagggctgtgagaggaggagattctgaggaggatgcaggggaaatcttgtctgttaatgaaataggagtggggtggggtttggggtggggtggtcattgccgtttgagctgctgattttcatgagtcgccttcaaaactctcgtgtagggttgacaatgtgggggggtgggggatccagcttattcttttattttcaagtccattcttggggctggtggggaggcaggagaatacccctccctaagcccttagtgtgtgccgagcttgctttgtgatgttggcaggggaggggagacctgggtggtgactgagttccctttatcaaacccttcaatgggcacaaaattgagtgcttgattttaggttttatttttttatgaatgtccaaatctgtgtttccccctgccctcccagactgtgtggccagttgaaagtgtctggtttgtgttcatctctccctcatttctggagcagggcctgagaccctgccacatctcctatgctctgcatccacgcctcttttggacattaaaggttgattgatgca

SEQ ID NO: 429332 - DNA, 1205 bp, Homo sapiens
ttggggtagaagggagggagggggcaggacagtgtggaatctctagggtgtatgggtaggtagggggcacagttagttctaagtgggcttttatgctaaaagcctctggggatatctgttttgaaaataaagataggtgtcccctccttgctgtcatctagcccagacactctgcttgctctctggctgtctgctccctgggaaggctttaggaggaccacccaggacaggatgaccatgctgccatctgctctggagctgggtctcagtgcagagggacagtgactgtggatggttgcagtctctggtgggaggtgaggatagaagtgataaagagctaagaggagcttctgggagccttggaggaggtcagtcttgcagtggtgaagccaggacataggagatggagcagggctgtgagaggaggagattctgaggaggatgcaggggaaatcttgtctgttaatgaaataggagtggggtggggtttggggtggggtggtcattgccgtttgagctgctgattttcatgagtcgccttcaaaactctcgtgtagggttgacaatgtgggggggtgggggatccagcttattcttttattttcaagtccattcttggggctggtggggaggcaggagaatacccctccctaagcccttagtgtgtgccgagcttgctttgtgatgttggcaggggaggggagacctgggtggtgactgagttccctttatcaaacccttcaatgggcacaaaattgagtgcttgattttaggttttatttttttatgaatgtccaaatctgtgtttccccctgccctcccagactgtgtggccagttgaaagtgtctggtttgtgttcatctctccctcatttctggagcagggcctgagaccctgccacatctcctatgctctgcatccacgcctcttttggacattaaaggttgattgatgcaaaaaaaaaaaaaaaaaaaaaaaaaaaaaaaaaaaatccgggggattattattgggggggcggggaaaaaagagagcgaagcgggaaacgagggcccgtgggcacaacgagagttcccggcgaaccccagatttttggtgtcacccagggggaaaaaatcggcgcggaaccccatataaagggggaggcggaatataaactgggaaaagacccggggtaacacgggcttacagaaacccgcggcacaac

SEQ ID NO: 429333 - DNA, 1938 bp, Homo sapiens
  misc_feature (1271)..(1271): n is a, c, g, or t
cggagcggagctgtgaggcgccagtgcggagcgggcgggcgggcgggcggcgcgaggcggagcgcgggcggccggcgaaactccaagggcggaccgcggcagggagcgatcggcctcgggctgcgggagccggagaccgcggcggcggcggctgctgcagctgcaggaggagcccagggaacaccgcccctgcctgtgctctgcctcgggccatcgctcctccccagggcccagtgcggactcgcctccgtgaagtgtcacaccatgtctgaccggaaggcagtgatcaagaacgcagacatgtctgaggacatgcaacaggatgccgttgactgcgccacgcaggccatggagaagtacaatatagagaaggacattgctgcctatatcaagaaggaatttgacaagaaatataaccctacctggcattgtatcgtgggccgaaattttggcagctacgtcacacacgagacaaagcacttcatctatttttacttgggtcaagttgcaatcctcctcttcaagtcaggctaggtggccatggtgaaggtgtcagtggcggcggcagcgatggcaagcaggcggcgttgctgggactgttttgcactggagccagcatcaggatgtcctctccaatggctgtgctactgcatggactgtatactcgatttcatgtgtatgtcgcagtaaacaaaaccaaacctctttctgtttagttgcctgggggaagaaggctgctttatgtttatttttcaagactttaaaaatattttttggttgtattgcactaggaaatctctcccacctctcccttttctctttctttccctatacaaaataaaaggcccaccatagagactaggcggccgaaagactaggagggctgaggaaaagaaataggtctctggaggtggaactaaaactgtgcagctgcctcttcctggcggtggatgctgctttgggagggccagggaggctgcagggggacagtgttgggattgtcaaggaaaaaggggtaggaaggaaggtggagggattgatctagtaccagggagaatattccactgaactgtgattctatggcttggggcggagggtggggtggggatgccttctttaggggccctgagatgtgtttgtctgtggtttggggtgggtggtcattgcgtttgagctgtgattttcatgagtcgcttcaaaatctcgtgtagggttgacaatgtgggggggtgggggatccagcttattcttttattttcaagtccattctnggggctggtggggaggcaggagaatacccctccctaagcccttagtgtgtcccctccttgctgtcatctagcccagacactctgcttgctctctggctgtctgctccctgggaaggctttaggaggaccacccaggacaggatgaccatgctgccatctgctctggagctgggtctcagtgcagagggacagtgactgtggatggttgcagtctctggtgggaggtgaggatagaagtgataaagagctaagaggagcttctgggagccttggaggaggtcagtcttgcagtggtgaagccaggacataggagatggagcagggctgtgagaggaggagattctgaggaggatgcaggggaaatcttgtctgttaatgaaataggagtggggtggggtttggggtggggtggtcattgccgtttgagctgctgattttcatgagtcgccttcaatgggcacaaaattgagtgcttgattttaggttttatttttttatgaatgtccaaatctgtgtttccccctgccctcccagactgtgtggccagttgaaagtgtctggtttgtgttcatctctccctcatttctggagcagggcctgagaccctgccacatctcctatgctctgcatccacgcctcttttggacattaaaggttgattgatgca

SEQ ID NO: 429334 - DNA, 1509 bp, Homo sapiens
cggagcggagctgtgaggcgccagtgcggagcgggcgggcgggcgggcggcgcgaggcggagcgcgggcggccggcgaaactccaagggcggaccgcggcagggagcgatcggcctcgggctgcgggagccggagaccgcggcggcggcggctgctgcagctgcaggaggagcccagggaacaccgcccctgcctgtgctctgcctcgggccatcgctcctccccagggcccagtgcggactcgcctccgtgaagtgtcacaccatgtctgaccggaaggcagtgatcaagaacgcagacatgtctgaggacatgcaacaggatgccgttgactgcgccacgcaggccatggagaagtacaatatagagaaggacattgctgcctatatcaagaaggaatttgacaagaaatataaccctacctggcattgtatcgtgggccgaaattttggcagctacgtcacacacgagacaaagcacttcatctatttttacttgggtcaagttgcaatcctcctcttcaagtcaggctaggtggccatggtgaaggtgtcagtggcggcggcagcgatggcaagcaggcggcgttgctgggactgttttgcactggagccagcatcaggatgtcctctccaatggctgtgctactgcatggactgtatactcgatttcatgtgtatgtcgcagtaaacaaaaccaaacctctttctgtttagttgcctgggggaagaaggctgctttatgtttatttttcaagactttaaaaatattttttggttgtattgcactaggaaatctctcccacctctcccttttctctttctttccctatacaaaataaaaggcccaccatagagactaggcggccgaaagactaggagggctgaggaaaagaaataggtctctggaggtggaactaaaactgtgcagctgcctcttcctggcggtggatgctgctttgggagggccagggaggctgcagggggacagtgttgggattgtcaaggaaaaaggggtaggaaggaaggtggagggattgatctagtaccagggagaatattccactgaactgtgattctatggcttggggcggagggtggggtggggatgccttctttaggggccctgagatgtgtttgtctgtggtttggggtggggagcagatttgtcttgctgtctttgtcagaatttctaagtaagggctgtgtctttgtggattaccttcttttgttcttcctgccagagatcatgacaggaggatgctggggtaggattagcttgaatcttttttttctttacatttttctcctgtctgctccctgcttagccctcagtttcctcattcctctggagttctcttagagcagcccctgttgttagttggctggcaagggaatttctggtgactgtagttccttagttaggtcttagcaatcaaaccaaattgatgtctcccttgactcttctgtgtatatgtgtgaatatgtgtgtatatgtgtgtgtatgtgt

SEQ ID NO: 429335 - DNA, 4441 bp, Homo sapiens
tgccggccgggcgcgatcttgctggtttgcggccggtcttggatgaagcggcggccgtggtgagagcgtggggaagggtggggtgagggggcgaggccgcagctagggcggcgaaactctcctcccctcggccccaccgcgtgggacggcgtgaacgtggtgtcggagggatgtcagccttctctgaggcggcgctggagaagaagctgtcggagttgagcaactcgcagcagagcgtgcagaccttgtccctgtggctcattcaccaccgtaaacactcgcggcccatcgtcaccgtgtgggagcgggagctgcggaaagccaaaccaaacaggaagcttacttttctctacctagccaatgatgtcatacagaacagcaagaggaaggggccagagtttacaaaagattttgcaccagttatagtggaggcttttaagcatgtttcaagtgaaactgatgaaagttgtaagaagcaccttggaagagtgttatctatttgggaagaaaggtctgtttatgaaaatgatgtattagaacaacttaaacaagctctgtatggtgataagaagcctaggaagcgaacttatgaacagataaaggtggatgaaaatgaaaactgttcctctctgggatctccaagtgaaccaccacagactctagatctcgttagagcattacaagatctggaaaatgcagcctcaggtgatgcagcagttcatcagaggatagcttctttacctgttgaagtccaagaagtatctctattagataaaataacagataaagaatctggagaaaggctttccaaaatggtagaggatgcgtgtatgttgctggcagattacaatggcagattggcggcagaaatagatgatagaaagcaactcactcgaatgttagcagattttcttcgttgtcaaaaggaagcccttgcagagaaagagcataaattggaagagtacaagcgcaagctagccagagtttccctggtgcgcaaagaactcaggtcccggatccagagcctgccagacttatctcgattgcccaatgtcactggcagccacatgcacctgccctttgcgggagacatctacagtgaagattgatggaccagcctctttccaggtcccaggactttgcaagagatggagacaggttaggtggatagtcctgtagtgttatttttgtatattgttgagaaagaaacactaacaaaaggaacaacgagtaatttataaaattgtttaaaatgttggtttgtttactattttattggtaaattaacatgacttaatttgaacaaagtgatgatttgtgtgtattaataagctcacaaatagtgattattttcaaaagatctttttgtaaattttttttttgatccaaggccttgtgagaaatctcttgtttgtatttcttcaggtattttcaattgtttttctttattttcttcagcatttaatcactgtatactatgtaattcctgaaggggaagaactaattaggagttgattgagactttattatggtatagttaggacttgattgtagaagggactaaatgttccaacataatctttacccttctccccaaacaaaatatcaattctgtgtctctacatgcctttgattccttagaggtcggtaatttaacataaaacagggatgtcactttgaggggcagatgaaagtctagagaactgttccttaatagcattgtaaaagttccattccaactgccagtgtagattttaaaagtgttaaatagtgactcccttgattaaactgtttgtaattatttgagtagattaataatgaaaatactttggaaataatatacattttgacattctaccaagaggacaactttggttctggaactggtttctatttgtcaaatcagtttccttttaacataattaatccctttaacaaaaagccgtctatgggattaaaagacacgtgaaatgatacttttattattcccttgctcatataactttaaaaataatacttttagctctaatagctcaagaacacaatattcgttaatgttcagtaaagtagcctgagacattttcaatgtttccttaaggtttttgaatgactgtatatttggcagttaagcagtgccacactacagggtagatatggtaaattttatatttgtatatttacagttacaaaacaaatgtacttttaccttttatttctgaccctgtgtgttagagcagttgcatgctctcctgctgttaaaaacacattgttaagctgtggatttgtactcaataatgacttaggataaacatttattttcattcattgctttacatactagacatttttcttctctttgtaagtagattcaaattagatagtcaataaaacatcttgaaaatcccacaagccaattatgtctctctagtctgaatggcttcattgtttctttctcagtattagaaattatagttacaatgaattgcatatgaagaaggcagacatttatttttaatagccaagtagttctgcaaatagttcttttaacaatttgacctctctccaaaacagagacacatataagtagtgctcatccatgcactactaataatacatggcttattccaaagtttttagtcaacttttgggacttggggtgcattttctcacagaaagaatagtagttaggttccctaacactaccgctgatagctcacctgggaactgaatccacctaaccatgaatgtccttcacttgtaacgtggttcacaggttactaatcatagatcctgaccagcatttgtaacactgctctaactaggacacagcatgcagcagccacactcacaccctgggatgtctgtgtacctctgtccctaggtgtaggaaatggaagaaaaagattcagccaagtggggaggtgacagatgcacaattatgaaacctggttgtacatgttatgaaagtatactaagtaagttagtttttattattaatgtgaaagcaaaaacttgtatgttaacttattttcaatatcttgaccttatttatgatctgctaaagtggtgatttatccattcaaaatatatatttttttccatttaaaactaatttataaactatgtactcctgggaagatttgaaatcttttagaagtttgttgaaatattttcaccatttcagacagacttctgacttagatactgattttaatgccagtatctgctctaaatatttatgataaaaatgcattatttttttaaagagcttgatgagatttgtgataagtgatagtactcaaaaacctgaatcccacccctcgaccaatcctccacaaacttcagttgttggttaacgtattaactgaacacagacaatacagtctgatttagaagtcatcttttcagccgtgtgataattaacatggtaagccttagcagcaaacattcttcctaaaaggaagacttcattttctcaagaaatgggattagttgggggtattataataccaaattgtaaatcatgagcgttttctccactgtgcacctgaggcagatcatgcatctttgagtgcagtttggtctgacccctcaagagaaaagcatggtgccgtagggctgctatggtttgaatggatgccatcactcttttctccacatacagtgcagagagctgtctggagtcacaatctgaacagattctcgggcgctccttctctccttccatcactacagtaagtaaaaggaccatagaggggaaccaggaatctgagaatcagctgtgctcaatagccaacctccctgtccagatgcagctattttggtatctcctatcacatgcactctgaatcagggtttttctataagaaatctttcagaatcagcaaaagtggggatgacccaggcatcttgatttgcaaaatcacaaaactaagttgtcagttatcactgtagatgagcaactcatctttttaaagtatagttactgaactgattctgagaaatctttagagagaaaaaactcaacagtacaaattaactaattgggaaagttagaatgtcctttctgaatttttcattaaaaaaattacattatctgaaataacataaagctactaaactgctttgtattctattaagaaatagctcctaaggatgtagtcttgtttcatagttgttgcactatatcaaaacttaaaatgtaagcccagttcttctctgtatagaaaggaaacattgtgttacttaatgaattatttatacagagcatttgttgccaactgttgttccagccatccacacaggagtctgttctgaggtggcaatagcacatgggaagatgaactttccctgtttgtttacccgttcttctttggctgtatctgatgacagtataagatgttcttaataaagttttatgttctttttgaaaaaagaggaa

SEQ ID NO: 429336 - DNA, 4311 bp, Homo sapiens
tgccggccgggcgcgatcttgctggtttgcggccggtcttggatgaagcggcggccgtggtgagagcgtggggaagggtggggtgagggggcgaggccgcagctagggcggcgaaactctcctcccctcggccccaccgcgtgggacggcgtgaacgtggtgtcggagggatgtcagccttctctgaggcggcgctggagaagaagctgtcggagttgagcaactcgcagcagagcgtgcagaccttgtccctgtggctcattcaccaccgtaaacactcgcggcccatcgtcaccgtgtgggagcgggagctgcggaaagtgaaactgatgaaagttgtaagaagcaccttggaagagtgttatctatttgggaagaaaggtctgtttatgaaaatgatgtattagaacaacttaaacaagctctgtatggtgataagaagcctaggaagcgaacttatgaacagataaaggtggatgaaaatgaaaactgttcctctctgggatctccaagtgaaccaccacagactctagatctcgttagagcattacaagatctggaaaatgcagcctcaggtgatgcagcagttcatcagaggatagcttctttacctgttgaagtccaagaagtatctctattagataaaataacagataaagaatctggagaaaggctttccaaaatggtagaggatgcgtgtatgttgctggcagattacaatggcagattggcggcagaaatagatgatagaaagcaactcactcgaatgttagcagattttcttcgttgtcaaaaggaagcccttgcagagaaagagcataaattggaagagtacaagcgcaagctagccagagtttccctggtgcgcaaagaactcaggtcccggatccagagcctgccagacttatctcgattgcccaatgtcactggcagccacatgcacctgccctttgcgggagacatctacagtgaagattgatggaccagcctctttccaggtcccaggactttgcaagagatggagacaggttaggtggatagtcctgtagtgttatttttgtatattgttgagaaagaaacactaacaaaaggaacaacgagtaatttataaaattgtttaaaatgttggtttgtttactattttattggtaaattaacatgacttaatttgaacaaagtgatgatttgtgtgtattaataagctcacaaatagtgattattttcaaaagatctttttgtaaattttttttttgatccaaggccttgtgagaaatctcttgtttgtatttcttcaggtattttcaattgtttttctttattttcttcagcatttaatcactgtatactatgtaattcctgaaggggaagaactaattaggagttgattgagactttattatggtatagttaggacttgattgtagaagggactaaatgttccaacataatctttacccttctccccaaacaaaatatcaattctgtgtctctacatgcctttgattccttagaggtcggtaatttaacataaaacagggatgtcactttgaggggcagatgaaagtctagagaactgttccttaatagcattgtaaaagttccattccaactgccagtgtagattttaaaagtgttaaatagtgactcccttgattaaactgtttgtaattatttgagtagattaataatgaaaatactttggaaataatatacattttgacattctaccaagaggacaactttggttctggaactggtttctatttgtcaaatcagtttccttttaacataattaatccctttaacaaaaagccgtctatgggattaaaagacacgtgaaatgatacttttattattcccttgctcatataactttaaaaataatacttttagctctaatagctcaagaacacaatattcgttaatgttcagtaaagtagcctgagacattttcaatgtttccttaaggtttttgaatgactgtatatttggcagttaagcagtgccacactacagggtagatatggtaaattttatatttgtatatttacagttacaaaacaaatgtacttttaccttttatttctgaccctgtgtgttagagcagttgcatgctctcctgctgttaaaaacacattgttaagctgtggatttgtactcaataatgacttaggataaacatttattttcattcattgctttacatactagacatttttcttctctttgtaagtagattcaaattagatagtcaataaaacatcttgaaaatcccacaagccaattatgtctctctagtctgaatggcttcattgtttctttctcagtattagaaattatagttacaatgaattgcatatgaagaaggcagacatttatttttaatagccaagtagttctgcaaatagttcttttaacaatttgacctctctccaaaacagagacacatataagtagtgctcatccatgcactactaataatacatggcttattccaaagtttttagtcaacttttgggacttggggtgcattttctcacagaaagaatagtagttaggttccctaacactaccgctgatagctcacctgggaactgaatccacctaaccatgaatgtccttcacttgtaacgtggttcacaggttactaatcatagatcctgaccagcatttgtaacactgctctaactaggacacagcatgcagcagccacactcacaccctgggatgtctgtgtacctctgtccctaggtgtaggaaatggaagaaaaagattcagccaagtggggaggtgacagatgcacaattatgaaacctggttgtacatgttatgaaagtatactaagtaagttagtttttattattaatgtgaaagcaaaaacttgtatgttaacttattttcaatatcttgaccttatttatgatctgctaaagtggtgatttatccattcaaaatatatatttttttccatttaaaactaatttataaactatgtactcctgggaagatttgaaatcttttagaagtttgttgaaatattttcaccatttcagacagacttctgacttagatactgattttaatgccagtatctgctctaaatatttatgataaaaatgcattatttttttaaagagcttgatgagatttgtgataagtgatagtactcaaaaacctgaatcccacccctcgaccaatcctccacaaacttcagttgttggttaacgtattaactgaacacagacaatacagtctgatttagaagtcatcttttcagccgtgtgataattaacatggtaagccttagcagcaaacattcttcctaaaaggaagacttcattttctcaagaaatgggattagttgggggtattataataccaaattgtaaatcatgagcgttttctccactgtgcacctgaggcagatcatgcatctttgagtgcagtttggtctgacccctcaagagaaaagcatggtgccgtagggctgctatggtttgaatggatgccatcactcttttctccacatacagtgcagagagctgtctggagtcacaatctgaacagattctcgggcgctccttctctccttccatcactacagtaagtaaaaggaccatagaggggaaccaggaatctgagaatcagctgtgctcaatagccaacctccctgtccagatgcagctattttggtatctcctatcacatgcactctgaatcagggtttttctataagaaatctttcagaatcagcaaaagtggggatgacccaggcatcttgatttgcaaaatcacaaaactaagttgtcagttatcactgtagatgagcaactcatctttttaaagtatagttactgaactgattctgagaaatctttagagagaaaaaactcaacagtacaaattaactaattgggaaagttagaatgtcctttctgaatttttcattaaaaaaattacattatctgaaataacataaagctactaaactgctttgtattctattaagaaatagctcctaaggatgtagtcttgtttcatagttgttgcactatatcaaaacttaaaatgtaagcccagttcttctctgtatagaaaggaaacattgtgttacttaatgaattatttatacagagcatttgttgccaactgttgttccagccatccacacaggagtctgttctgaggtggcaatagcacatgggaagatgaactttccctgtttgtttacccgttcttctttggctgtatctgatgacagtataagatgttcttaataaagttttatgttctttttgaaaaaagaggaa

SEQ ID NO: 429337 - DNA, 4500 bp, Homo sapiens
tgccggccgggcgcgatcttgctggtttgcggccggtcttggatgaagcggcggccgtggtgagagcgtggggaagggtggggtgagggggcgaggccgcagctagggcggcgaaactctcctcccctcggccccaccgcgtgggacggcgtgaacgtggtgtcggagggatgtcagccttctctgaggcggcgctggagaagaagctgtcggagttgagcaactcgcagcagagcgtgcagaccttgtccctgtggctcattcaccaccgtaaacactcgcggcccatcgtcaccgtgtgggagcgggagctgcggaaagagtggaggtgcaacaaatgagaaattccaattggagattttgtcaaacaggaatttactccaaaccaaacaggaagcttacttttctctacctagccaatgatgtcatacagaacagcaagaggaaggggccagagtttacaaaagattttgcaccagttatagtggaggcttttaagcatgtttcaagtgaaactgatgaaagttgtaagaagcaccttggaagagtgttatctatttgggaagaaaggtctgtttatgaaaatgatgtattagaacaacttaaacaagctctgtatggtgataagaagcctaggaagcgaacttatgaacagataaaggtggatgaaaatgaaaactgttcctctctgggatctccaagtgaaccaccacagactctagatctcgttagagcattacaagatctggaaaatgcagcctcaggtgatgcagcagttcatcagaggatagcttctttacctgttgaagtccaagaagtatctctattagataaaataacagataaagaatctggagaaaggctttccaaaatggtagaggatgcgtgtatgttgctggcagattacaatggcagattggcggcagaaatagatgatagaaagcaactcactcgaatgttagcagattttcttcgttgtcaaaaggaagcccttgcagagaaagagcataaattggaagagtacaagcgcaagctagccagagtttccctggtgcgcaaagaactcaggtcccggatccagagcctgccagacttatctcgattgcccaatgtcactggcagccacatgcacctgccctttgcgggagacatctacagtgaagattgatggaccagcctctttccaggtcccaggactttgcaagagatggagacaggttaggtggatagtcctgtagtgttatttttgtatattgttgagaaagaaacactaacaaaaggaacaacgagtaatttataaaattgtttaaaatgttggtttgtttactattttattggtaaattaacatgacttaatttgaacaaagtgatgatttgtgtgtattaataagctcacaaatagtgattattttcaaaagatctttttgtaaattttttttttgatccaaggccttgtgagaaatctcttgtttgtatttcttcaggtattttcaattgtttttctttattttcttcagcatttaatcactgtatactatgtaattcctgaaggggaagaactaattaggagttgattgagactttattatggtatagttaggacttgattgtagaagggactaaatgttccaacataatctttacccttctccccaaacaaaatatcaattctgtgtctctacatgcctttgattccttagaggtcggtaatttaacataaaacagggatgtcactttgaggggcagatgaaagtctagagaactgttccttaatagcattgtaaaagttccattccaactgccagtgtagattttaaaagtgttaaatagtgactcccttgattaaactgtttgtaattatttgagtagattaataatgaaaatactttggaaataatatacattttgacattctaccaagaggacaactttggttctggaactggtttctatttgtcaaatcagtttccttttaacataattaatccctttaacaaaaagccgtctatgggattaaaagacacgtgaaatgatacttttattattcccttgctcatataactttaaaaataatacttttagctctaatagctcaagaacacaatattcgttaatgttcagtaaagtagcctgagacattttcaatgtttccttaaggtttttgaatgactgtatatttggcagttaagcagtgccacactacagggtagatatggtaaattttatatttgtatatttacagttacaaaacaaatgtacttttaccttttatttctgaccctgtgtgttagagcagttgcatgctctcctgctgttaaaaacacattgttaagctgtggatttgtactcaataatgacttaggataaacatttattttcattcattgctttacatactagacatttttcttctctttgtaagtagattcaaattagatagtcaataaaacatcttgaaaatcccacaagccaattatgtctctctagtctgaatggcttcattgtttctttctcagtattagaaattatagttacaatgaattgcatatgaagaaggcagacatttatttttaatagccaagtagttctgcaaatagttcttttaacaatttgacctctctccaaaacagagacacatataagtagtgctcatccatgcactactaataatacatggcttattccaaagtttttagtcaacttttgggacttggggtgcattttctcacagaaagaatagtagttaggttccctaacactaccgctgatagctcacctgggaactgaatccacctaaccatgaatgtccttcacttgtaacgtggttcacaggttactaatcatagatcctgaccagcatttgtaacactgctctaactaggacacagcatgcagcagccacactcacaccctgggatgtctgtgtacctctgtccctaggtgtaggaaatggaagaaaaagattcagccaagtggggaggtgacagatgcacaattatgaaacctggttgtacatgttatgaaagtatactaagtaagttagtttttattattaatgtgaaagcaaaaacttgtatgttaacttattttcaatatcttgaccttatttatgatctgctaaagtggtgatttatccattcaaaatatatatttttttccatttaaaactaatttataaactatgtactcctgggaagatttgaaatcttttagaagtttgttgaaatattttcaccatttcagacagacttctgacttagatactgattttaatgccagtatctgctctaaatatttatgataaaaatgcattatttttttaaagagcttgatgagatttgtgataagtgatagtactcaaaaacctgaatcccacccctcgaccaatcctccacaaacttcagttgttggttaacgtattaactgaacacagacaatacagtctgatttagaagtcatcttttcagccgtgtgataattaacatggtaagccttagcagcaaacattcttcctaaaaggaagacttcattttctcaagaaatgggattagttgggggtattataataccaaattgtaaatcatgagcgttttctccactgtgcacctgaggcagatcatgcatctttgagtgcagtttggtctgacccctcaagagaaaagcatggtgccgtagggctgctatggtttgaatggatgccatcactcttttctccacatacagtgcagagagctgtctggagtcacaatctgaacagattctcgggcgctccttctctccttccatcactacagtaagtaaaaggaccatagaggggaaccaggaatctgagaatcagctgtgctcaatagccaacctccctgtccagatgcagctattttggtatctcctatcacatgcactctgaatcagggtttttctataagaaatctttcagaatcagcaaaagtggggatgacccaggcatcttgatttgcaaaatcacaaaactaagttgtcagttatcactgtagatgagcaactcatctttttaaagtatagttactgaactgattctgagaaatctttagagagaaaaaactcaacagtacaaattaactaattgggaaagttagaatgtcctttctgaatttttcattaaaaaaattacattatctgaaataacataaagctactaaactgctttgtattctattaagaaatagctcctaaggatgtagtcttgtttcatagttgttgcactatatcaaaacttaaaatgtaagcccagttcttctctgtatagaaaggaaacattgtgttacttaatgaattatttatacagagcatttgttgccaactgttgttccagccatccacacaggagtctgttctgaggtggcaatagcacatgggaagatgaactttccctgtttgtttacccgttcttctttggctgtatctgatgacagtataagatgttcttaataaagttttatgttctttttgaaaaaagaggaa

SEQ ID NO: 429338 - DNA, 4357 bp, Homo sapiens
tgccggccgggcgcgatcttgctggtttgcggccggtcttggatgaagcggcggccgtggtgagagcgtggggaagggtggggtgagggggcgaggccgcagctagggcggcgaaactctcctcccctcggccccaccgcgtgggacggcgtgaacgtggtgtcggagggatgtcagccttctctgaggcggcgctggagaagaagctgtcggagttgagcaactcgcagcagagcgtgcagaccttgtccctgtggctcattcaccaccgtaaacactcgcggcccatcgtcaccgtgtgggagcgggagctgcggaaagccaaaccaaacaggaagcttacttttctctacctagccaatgatgtcatacagaacagcaagaggaaggggccagagtttacaaaagattttgcaccagttatagtggaggcttttaagcatgtttcaagtgaaactgatgaaagttgtaagaagcaccttggaagagtgttatctatttgggaagaaaggtctgtttatgaaaatgatgtattagaacaacttaaacaagctctgtatggtgataagaagcctaggaagcgaacttatgaacagataaaggtggatgaaaatgaaaactgttcctctctgggatctccaagtgaaccaccacagactctagatctcgttagagcattacaagatctggaaaatgcagcctcaggtgatgcagcagttcatcagaggatagcttctttacctgttgaagtccaagaagtatctctattagataaaataacagataaagaatctggagaaaggctttccaaaatggtagaggatgcgtgtatgttgctggcagattacaatggcagattggcggcagaaatagatgatagaaagcaactcactcgaatgttagcagattttcttcgttgtcaaaaggaagcccttgcagagaaagagcataaattggaagagtacaagcgcaagctagccagagtttccctggtgcgcaaagaactcaggtcccggatccagagcctgccagacttatctcgattgcccaatgtcactggcagccacatgcacctgccctttgcgggagacatctacagtgaagattgatggaccagcctctttccaggtcccaggactttgcaagagatggagacaggttaggtggatagtcctgtagtgttatttttgtatattgttgagaaagaaacactaacaaaaggaacaacgagtaatttataaaattgtttaaaatgttggtttgtttactattttattggtaaattaacatgacttaatttgaacaaagtgatgatttgtgtgtattaataagctcacaaatagtgattattttcaaaagatctttttgtaaattttttttttgatccaaggccttgtgagaaatctcttgtttgtatttcttcaggtattttcaattgtttttctttattttcttcagcatttaatcactgtatactatgtaattcctgaaggggaagaactaattaggagttgattgagactttattatggtatagttaggacttgattgtagaagggactaaatgttccaacataatctttacccttctccccaaacaaaatatcaattctgtgtctctacatgcctttgattccttagaggtcggtaatttaacataaaacagggatgtcactttgaggggcagatgaaagtctagagaactgttccttaatagcattgtaaaagttccattccaactgccagtgtagattttaaaagtgttaaatagtgactcccttgattaaactgtttgtaattatttgagtagattaataatgaaaatactttggaaataatatacattttgacattctaccaagaggacaactttggttctggaactggtttctatttgtcaaatcagtttccttttaacataattaatccctttaacaaaaagccgtctatgggattaaaagacacgtgaaatgatacttttattattcccttgctcatataactttaaaaataatacttttagctctaatagctcaagaacacaatattcgttaatgttcagtaaagtagcctgagacattttcaatgtttccttaaggtttttgaatgactgtatatttggcagttaagcagtgccacactacagggtagatatggtaaattttatatttgtatatttacagttacaaaacaaatgtacttttaccttttatttctgaccctgtgtgttagagcagttgcatgctctcctgctgttaaaaacacattgttaagctgtggatttgtactcaataatgacttaggataaacatttattttcattcattgctttacatactagacatttttcttctctttgtaagtagattcaaattagatagtcaataaaacatcttgaaaatcccacaagccaattatgtctctctagtctgaatggcttcattgtttctttctcagtattagaaattatagttacaatgaattgcatatgaagaaggcagacatttatttttaatagccaagtagttctgcaaatagttcttttaacaatttgacctctctccaaaacagagacacatataagtagtgctcatccatgcactactaataatacatggcttattccaaagtttttagtcaacttttgggacttggggtgcattttctcacagaaagaatagtagttaggttccctaacactaccgctgatagctcacctgggaactgaatccacctaaccatgaatgtccttcacttgtaacgtggttcacaggttactaatcatagatcctgaccagcatttgtaacactgctctaactaggacacagcatgcagcagccacactcacaccctgggatgtctgtgtacctctgtccctaggtgtaggaaatggaagaaaaagattcagccaagtggggaggtgacagatgcacaattatgaaacctggttgtacatgttatgaaagtatactaagtaagttagtttttattattaatgtgaaagcaaaaacttgtatgttaacttattttcaatatcttgaccttatttatgatctgctaaagtggtgatttatccattcaaaatatatatttttttccatttaaaactaatttataaactatgtactcctgggaagatttgaaatcttttagaagtttgttgaaatattttcaccatttcagacagacttctgacttagatactgattttaatgccagtatctgctctaaatatttatgataaaaatgcattatttttttaaagagcttgatgagatttgtgataagtgatagtactcaaaaacctgaatcccacccctcgaccaatcctccacaaacttcagttgttggttaacgtattaactgaacacagacaatacagtctgatttagaagtcatcttttcagccgtgtgataattaacatggtaagccttagcagcaaacattcttcctaaaaggaagacttcattttctcaagaaatgggattagttgggggtattataataccaaattgtaaatcatgagcgttttctccactgtgcacctgaggcagatcatgcatctttgagtgcagtttggtctgacccctcaagagaaaagcatggtgccgtagggctgctatggtttgaatggatgccatcactcttttctccacatacagtgcagagagctgtctggagtcacaatctgaacagattctcgggcgctccttctctccttccatcactacagtaagtaaaaggaccatagaggggaaccaggaatctgagaatcagctgtgctcaatagccaacctccctgtccagatgcagctattttggtatctcctatcacatgcactctgaatcagggtttttctataagaaatctttcagaatcagcaaaagtggggatgacccaggcatcttgatttgcaaaatcacaaaactaagttgtcagttatcactgtagatgagcaactcatctttttaaagtatagttactgaactgattctgagaaatctttagagagaaaaaactcaacagtacaaattaactaattgggaaagttagaatgtcctttctgaatttttcattaaaaaaattacattatctgaaataacataaagctactaaactgctttgtattctattaagaaatagctcctaaggatgtagtcttgtttcatagttgttgcactatatcaaaacttaaaatgtaagcccagttcttctctgtatagaaaggaaacattgtgttacttaatgaattatttatacagagcatttgttgccatgtggttcagcctcccccggagtggctgggggcatgcctggagataatccgtggaccgactaggggatcacagttttt

SEQ ID NO: 429339 - DNA, 3080 bp, Homo sapiens
aggctaactagaggatcccgtcactttctacacttctatgtaatcagaactataatttcttcaggtattttcaattgtttttctttattttcttcagcatttaatcactgtatactatgtaattcctgaaggggaagaactaattaggagttgattgagactttattatggtatagttaggacttgattgtagaagggactaaatgttccaacataatctttacccttctccccaaacaaaatatcaattctgtgtctctacatgcctttgattccttagaggtcggtaatttaacataaaacagggatgtcactttgaggggcagatgaaagtctagagaactgttccttaatagcattgtaaaagttccattccaactgccagtgtagattttaaaagtgttaaatagtgactcccttgattaaactgtttgtaattatttgagtagattaataatgaaaatactttggaaataatatacattttgacattctaccaagaggacaactttggttctggaactggtttctatttgtcaaatcagtttccttttaacataattaatccctttaacaaaaagccgtctatgggattaaaagacacgtgaaatgatacttttattattcccttgctcatataactttaaaaataatacttttagctctaatagctcaagaacacaatattcgttaatgttcagtaaagtagcctgagacattttcaatgtttccttaaggtttttgaatgactgtatatttggcagttaagcagtgccacactacagggtagatatggtaaattttatatttgtatatttacagttacaaaacaaatgtacttttaccttttatttctgaccctgtgtgttagagcagttgcatgctctcctgctgttaaaaacacattgttaagctgtggatttgtactcaataatgacttaggataaacatttattttcattcattgctttacatactagacatttttcttctctttgtaagtagattcaaattagatagtcaataaaacatcttgaaaatcccacaagccaattatgtctctctagtctgaatggcttcattgtttctttctcagtattagaaattatagttacaatgaattgcatatgaagaaggcagacatttatttttaatagccaagtagttctgcaaatagttcttttaacaatttgacctctctccaaaacagagacacatataagtagtgctcatccatgcactactaataatacatggcttattccaaagtttttagtcaacttttgggacttggggtgcattttctcacagaaagaatagtagttaggttccctaacactaccgctgatagctcacctgggaactgaatccacctaaccatgaatgtccttcacttgtaacgtggttcacaggttactaatcatagatcctgaccagcatttgtaacactgctctaactaggacacagcatgcagcagccacactcacaccctgggatgtctgtgtacctctgtccctaggtgtaggaaatggaagaaaaagattcagccaagtggggaggtgacagatgcacaattatgaaacctggttgtacatgttatgaaagtatactaagtaagttagtttttattattaatgtgaaagcaaaaacttgtatgttaacttattttcaatatcttgaccttatttatgatctgctaaagtggtgatttatccattcaaaatatatatttttttccatttaaaactaatttataaactatgtactcctgggaagatttgaaatcttttagaagtttgttgaaatattttcaccatttcagacagacttctgacttagatactgattttaatgccagtatctgctctaaatatttatgataaaaatgcattatttttttaaagagcttgatgagatttgtgataagtgatagtactcaaaaacctgaatcccacccctcgaccaatcctccacaaacttcagttgttggttaacgtattaactgaacacagacaatacagtctgatttagaagtcatcttttcagccgtgtgataattaacatggtaagccttagcagcaaacattcttcctaaaaggaagacttcattttctcaagaaatgggattagttgggggtattataataccaaattgtaaatcatgagcgttttctccactgtgcacctgaggcagatcatgcatctttgagtgcagtttggtctgacccctcaagagaaaagcatggtgccgtagggctgctatggtttgaatggatgccatcactcttttctccacatacagtgcagagagctgtctggagtcacaatctgaacagattctcgggcgctccttctctccttccatcactacagtaagtaaaaggaccatagaggggaaccaggaatctgagaatcagctgtgctcaatagccaacctccctgtccagatgcagctattttggtatctcctatcacatgcactctgaatcagggtttttctataagaaatctttcagaatcagcaaaagtggggatgacccaggcatcttgatttgcaaaatcacaaaactaagttgtcagttatcactgtagatgagcaactcatctttttaaagtatagttactgaactgattctgagaaatctttagagagaaaaaactcaacagtacaaattaactaattgggaaagttagaatgtcctttctgaatttttcattaaaaaaattacattatctgaaataacataaagctactaaactgctttgtattctattaagaaatagctcctaaggatgtagtcttgtttcatagttgttgcactatatcaaaacttaaaatgtaagcccagttcttctctgtatagaaaggaaacattgtgttacttaatgaattatttatacagagcatttgttgccaactgttgttccagccatccacacaggagtctgttctgaggtggcaatagcacatgggaagatgaactttccctgtttgtttacccgttcttctttggctgtatctgatgacagtataagatgttcttaataaagttttatgttctttttgaaaaaagaggaa

SEQ ID NO: 429340 - DNA, 1994 bp, Homo sapiens
tgccggccgggcgcgatcttgctggtttgcggccggtcttggatgaagcggcggccgtggtgagagcgtggggaagggtggggtgagggggcgaggccgcagctagggcggcgaaactctcctcccctcggccccaccgcgtgggacggcgtgaacgtggtgtcggagggatgtcagccttctctgaggcggcgctggagaagaagctgtcggagttgagcaactcgcagcagagcgtgcagaccttgtccctgtggctcattcaccaccgtaaacactcgcggcccatcgtcaccgtgtgggagcgggagctgcggaaagagtggaggtgcaacaaatgagaaattccaattggagattttgtcaaacaggaatttactccaaaccaaacaggaagcttacttttctctacctagccaatgatgtcatacagaacagcaagaggaaggggccagagtttacaaaagattttgcaccagttatagtggaggcttttaagcatgtttcaagtgaaactgatgaaagttgtaagaagcaccttggaagagtgttatctatttgggaagaaaggtctgtttatgaaaatgatgtattagaacaacttaaacaagctctgtatggtgataagaagcctaggaagcgaacttatgaacagataaaggtggatgaaaatgaaaactgttcctctctgggatctccaagtgaaccaccacagactctagatctcgttagagcattacaagatctggaaaatgcagcctcaggtgatgcagcagttcatcagaggatagcttctttacctgttgaagtccaagaagtatctctattagataaaataacagataaagaatctggagaaaggctttccaaaatggtagaggatgcgtgtatgttgctggcagattacaatggcagattggcggcagaaatagatgatagaaagcaactcactcgaatgttagcagattttcttcgttgtcaaaaggaagcccttgcagagaaagagcataaattggaagagtacaagcgcaagctagccagagtttccctggtgcgcaaagaactcaggtcccggatccagagcctgccagacttatctcgattgcccaatgtcactggcagccacatgcacctgccctttgcgggagacatctacagtgaagattgatggaccagcctctttccaggtcccaggactttgcaagagatggagacagtgcagagagctgtctggagtcacaatctgaacagattctcgggcgctccttctctccttccatcactacagtaagtaaaaggaccatagaggggaaccaggaatctgagaatcagctgtgctcaatagccaacctccctgtccagatgcagctattttggtatctcctatcacatgcactctgaatcagggtttttctataagaaatctttcagaatcagcaaaagtggggatgacccaggcatcttgatttgcaaaatcacaaaactaagttgtcagttatcactgtagatgagcaactcatctttttaaagtatagttactgaactgattctgagaaatctttagagagaaaaaactcaacagtacaaattaactaattgggaaagttagaatgtcctttctgaatttttcattaaaaaaattacattatctgaaataacataaagctactaaactgctttgtattctattaagaaatagctcctaaggatgtagtcttgtttcatagttgttgcactatatcaaaacttaaaatgtaagcccagttcttctctgtatagaaaggaaacattgtgttacttaatgaattatttatacagagcatttgttgccaactgttgttccagccatccacacaggagtctgttctgaggtggcaatagcacatgggaagatgaactttccctgtttgtttacccgttcttctttggctgtatctgatgacagtataagatgttcttaataaagttttatgttctttttgaaaaaagaggaa

SEQ ID NO: 429341 - DNA, 2274 bp, Homo sapiens
tgccggccgggcgcgatcttgctggtttgcggccggtcttggatgaagcggcggccgtggtgagagcgtggggaagggtggggtgagggggcgaggccgcagctagggcggcgaaactctcctcccctcggccccaccgcgtgggacggcgtgaacgtggtgtcggagggatgtcagccttctctgaggcggcgctggagaagaagctgtcggagttgagcaactcgcagcagagcgtgcagaccttgtccctgtggctcattcaccaccgtaaacactcgcggcccatcgtcaccgtgtgggagcgggagctgcggaaagccaaaccaaacaggaagcttacttttctctacctagccaatgatgtcatacagaacagcaagaggaaggggccagagtttacaaaagattttgcaccagttatagtggaggcttttaagcatgtttcaagtgaaactgatgaaagttgtaagaagcaccttggaagagtgttatctatttgggaagaaaggtctgtttatgaaaatgatgtattagaacaacttaaacaagctctgtatggtgataagaagcctaggaagcgaacttatgaacagataaaggtggatgaaaatgaaaactgttcctctctgggatctccaagtgaaccaccacagactctagatctcgttagagcattacaagatctggaaaatgcagcctcaggtgatgcagcagttcatcagaggatagcttctttacctgttgaagtccaagaagtatctctattagataaaataacagataaagaatctggagaaaggctttccaaaatggtagaggatgcgtgtatgttgctggcagattacaatggcagattggcggcagaaatagatgatagaaagcaactcactcgaatgttagcagattttcttcgttgtcaaaaggaagcccttgcagagaaagagcataaattggaagtgcgtaacctttttcttctttagtgcttatttatttaattctctttttgttaggaattttaaaatattttaatctatgtgcacattttgcattttttaacatagacctttttaagcagtagcccaggtaagcttctccttgtattaatggtttttcttctacttgaaccaaattaatcttgcaagtaaacttagaaatttggaattagcaaaattgattgcatttaaaaattattcttgtgaaattccatgcaactataatttatcttaccagtttaaccctaatgtatcacagaaataataggaaaatagcaggtggcagtcacttgtagtaggatttatttagtttctgttttgagaagatgtagtcttttaggtataccattaagtctttaaattactcccttaattccacccgccaattctaatgcttacatgttccagccccactcccggctcacactcttaggcagaaattcattgctcctgtaaattaagtaataattaataccgctaatgagaaatctgggagtacaggaggtgattttaaaaaatgctcgtatttcctttgattagagtagcaattgttagggatacatgagccagatttggttttatgtaaaaaaaatctttcagttgatgagttcttgtttaaattgtattgctgtggcaatttcttattgtaataatatgtaggagaatttctaatttgaatccctttatttacagaaagctcactgtaaatttgtaggaatgtcatggtactaccccattaagttatttttattagtgtttagttattgattcagcagtctctaattgtgccaaaaatggtgcttagattagattgccattgctacccatgggagctgctacttaattattcccacctcaaattcccagctctcaagttagcactactcctttgcaatttactccttctctgctcgtataaataccctcagatgatgatagttggtggccactatacctttgaagaggttgcccacttctacatggaaaggaaaagatggtttttttttttaaaagatgaatttgataattaacttgccactatttcaccttgtgatgaaacctcaattttaaacatagtgttaattgttttattgtccacagaattaagggtaagtaatgtcatacaatttttgtctttagtcttttagtatggtttctttaacttctattgagcttctgttgcagatattggacatgggcgtatcttctaacgatgtcgtcaccattagtatattcttcctgctaaaaataaatatcaaaccctgaagcctgaaaaaac

SEQ ID NO: 429342 - DNA, 1602 bp, Homo sapiens
tgccggccgggcgcgatcttgctggtttgcggccggtcttggatgaagcggcggccgtggtgagagcgtggggaagggtggggtgagggggcgaggccgcagctagggcggcgaaactctcctcccctcggccccaccgcgtgggacggcgtgaacgtggtgtcggagggatgtcagccttctctgaggcggcgctggagaagaagctgtcggagttgagcaactcgcagcagagcgtgcagaccttgtccctgtggctcattcaccaccgtaaacactcgcggcccatcgtcaccgtgtgggagcgggagctgcggaaagccaaaccaaacaggaagcttacttttctctacctagccaatgatgtcatacagaacagcaagaggaaggggccagagtttacaaaagattttgcaccagttatagtggaggcttttaagcatgtttcaagtgaaactgatgaaagttgtaagaagcaccttggaagagtgttatctatttgggaagaaaggtctgtttatgaaaatgatgtattagaacaacttaaacaagctctgtatggtgataagaagcctaggaagcgaacttatgaacagataaaggtggatgaaaatgaaaactgttcctctctgggatctccaagtgaaccaccacagactctagatctcgttagagcattacaagatctggaaaatgcagcctcaggtgatgcagcagttcatcagaggatagcttctttacctgttgaagtccaagaagtatctctattagataaaataacagataaagaatctggagaaaggctttccaaaatggtagaggatgcgtgtatgttgctggcagattacaatggcagattggcggcagaaatagatgatagaaagcaactcactcgaatgttagcagattttcttcgttgtcaaaaggaagcccttgcagagaaagagcataaattggaagagtacaagcgcaagctagccagagtttccctggtgcgcaaagaactcaggtcccggatccagagcctgccagacttatctcgattgcccaatgtcactggcagccacatgcacctgccctttgcgggagacatctacagtgaagattgatggaccagcctctttccaggtcccaggactttgcaagagatggagacagtgcagagagctgtctggagtcacaatctgaacagattctcgggcgctccttctctccttccatcactacagtgtttttcatgcaccatctcactgagacctcaacaaagtttttatgagttctgtctctggcgtggtctaatgtagcagcaccattactgttcctgagtaaaagcatcccgatcttgggtttttggtatcagtgtgaatttctgctcaaaagtagcaagatctcttggacagtggctgcttccatgtcaggggctgaaggagtgaagatggtcctggaacttttctttgcagagaagcaagcaggggatgccttcaaagttctgatggagctgaacaaagaagccagcttacagcttactggccaaggtttaacaacttgagcatcaaaatggaaaatacaaattgtaattaattaaaacaagtagactgtgaa

SEQ ID NO: 429343 - DNA, 266 bp, Homo sapiens
gagtttacaaaagattttgcaccagttatagtggaggcttttaagcatgtttcaaggtatgatcatagttttgggtattaggtaatctgttttaaatgtaccatatgtccttttgctaaaatttgccttaaactattaaaataaaaagtagggaatatagttttttgatgcttttatttgaaaagacttccctctacatggcatttataaatgtattaaatgccttctctgaaggaaaaatattttttgaactgttgctaaggtgg

SEQ ID NO: 429344 - DNA, 2414 bp, Homo sapiens
tgccggccgggcgcgatcttgctggtttgcggccggtcttggatgaagcggcggccgtggtgagagcgtggggaagggtggggtgagggggcgaggccgcagctagggcggcgaaactctcctcccctcggccccaccgcgtgggacggcgtgaacgtggtgtcggagggatgtcagccttctctgaggcggcgctggagaagaagctgtcggagttgagcaactcgcagcagagcgtgcagaccttgtccctgtggctcattcaccaccgtaaacactcgcggcccatcgtcaccgtgtgggagcgggagctgcggaaagccaaaccaaacaggaagcttacttttctctacctagccaatgatgtcatacagaacagcaagaggaaggggccagagtttacaaaagattttgcaccagttatagtggaggcttttaagcatgtttcaagtgaaactgatgaaagttgtaagaagcaccttggaagagtgttatctatttgggaagaaaggtctgtttatgaaaatgatgtattagaacaacttaaacaagctctgtatggtgataagaagcctaggaagcgaacttatgaacagataaaggtggatgaaaatgaaaactgttcctctctgggatctccaagtgaaccaccacagactctagatctcgttagagcattacaagatctggaaaatgcagcctcaggtgatgcagcagttcatcagaggatagcttctttacctgttgaagtccaagaagtatctctattagataaaataacagataaagaatctggagaaaggctttccaaaatggtagaggatgcgtgtatgttgctggcagattacaatggcagattggcggcagaaatagatgatagaaagcaactcactcgaatgttagcagattttcttcgttgtcaaaaggaagcccttgcagagaaagagcataaattggaagagtacaagcgcaagctagccagagtttccctggtgcgcaaagaactcaggtcccggatccagagcctgccagacttatctcgattgcccaatgtcactggcagccacatgcacctgccctttgcgggagacatctacagtgaagattgatggaccagcctctttccaggtcccaggactttgcaagagatggagacaggttaggtggatagtcctgtagtgttatttttgtatattgttgagaaagaaacactaacaaaaggaacaacgagtaatttataaaattgtttaaaatgttggtttgtttactattttattggtaaattaacatgacttaatttgaacaaagtgatgatttgtgtgtattaataagctcacaaatagtgattattttcaaaagatctttttgtaaattttttttttgatccaaggccttgtgagaaatctcttgtttgtatttcttcaggtattttcaattgtttttctttattttcttcagcatttaatcactgtatactatgtaattcctgaaggggaagaactaattaggagttgattgagactttattatggtatagttaggacttgattgtagaagggactaaatgttccaacataatctttacccttctccccaaacaaaatatcaattctgtgtctctacatgcctttgattccttagaggtcggtaatttaacataaaacagggatgtcactttgaggggcagatgaaagtctagagaactgttccttaatagcattgtaaaagttccattccaactgccagtgtagattttaaaagtgttaaatagtgactcccttgattaaactgtttgtaattatttgagtagattaataatgaaaatactttggaaataatatacattttgacattctaccaagaggacaactttggttctggaactggtttctatttgtcaaatcagtttccttttaacataattaatccctttaacaaaaagccgtctatgggattaaaagacacgtgaaatgatacttttattattcccttgctcatataactttaaaaataatacttttagctctaatagctcaagaacacaatattcgttaatgttcagtaaagtagcctgagacattttcaatgtttccttaaggtttttgaatgactgtatatttggcagttaagcagtgccacactacagggtagatatggtaaattttatatttgtatatttacagttacaaaacaaatgtacttttaccttttatttctgaccctgtgtgttagagcagttgcatgctctcctgctgttaaaaacacattgttaagctgtggatttgtactcaataatgacttaggataaacatttattttcattcattgctttacatactagacatttttcttctctttgtaagtagattcaaattagatagtcaataaaacatcttgaaaatcccacaagccaa

SEQ ID NO: 429345 - DNA, 3541 bp, Homo sapiens
gagttcaattagaaagtcgaacaccgaccgctgttacgggtccgcgttgagggtcacaggagtacaagcgcaagctagccagagtttccctggtgcgcaaagaactcaggtcccggatccagagcctgccagacttatctcgattgcccaatgtcactggcagccacatgcacctgccctttgcgggagacatctacagtgaagattgatggaccagcctctttccaggtcccaggactttgcaagagatggagacaggttaggtggatagtcctgtagtgttatttttgtatattgttgagaaagaaacactaacaaaaggaacaacgagtaatttataaaattgtttaaaatgttggtttgtttactattttattggtaaattaacatgacttaatttgaacaaagtgatgatttgtgtgtattaataagctcacaaatagtgattattttcaaaagatctttttgtaaattttttttttgatccaaggccttgtgagaaatctcttgtttgtatttcttcaggtattttcaattgtttttctttattttcttcagcatttaatcactgtatactatgtaattcctgaaggggaagaactaattaggagttgattgagactttattatggtatagttaggacttgattgtagaagggactaaatgttccaacataatctttacccttctccccaaacaaaatatcaattctgtgtctctacatgcctttgattccttagaggtcggtaatttaacataaaacagggatgtcactttgaggggcagatgaaagtctagagaactgttccttaatagcattgtaaaagttccattccaactgccagtgtagattttaaaagtgttaaatagtgactcccttgattaaactgtttgtaattatttgagtagattaataatgaaaatactttggaaataatatacattttgacattctaccaagaggacaactttggttctggaactggtttctatttgtcaaatcagtttccttttaacataattaatccctttaacaaaaagccgtctatgggattaaaagacacgtgaaatgatacttttattattcccttgctcatataactttaaaaataatacttttagctctaatagctcaagaacacaatattcgttaatgttcagtaaagtagcctgagacattttcaatgtttccttaaggtttttgaatgactgtatatttggcagttaagcagtgccacactacagggtagatatggtaaattttatatttgtatatttacagttacaaaacaaatgtacttttaccttttatttctgaccctgtgtgttagagcagttgcatgctctcctgctgttaaaaacacattgttaagctgtggatttgtactcaataatgacttaggataaacatttattttcattcattgctttacatactagacatttttcttctctttgtaagtagattcaaattagatagtcaataaaacatcttgaaaatcccacaagccaattatgtctctctagtctgaatggcttcattgtttctttctcagtattagaaattatagttacaatgaattgcatatgaagaaggcagacatttatttttaatagccaagtagttctgcaaatagttcttttaacaatttgacctctctccaaaacagagacacatataagtagtgctcatccatgcactactaataatacatggcttattccaaagtttttagtcaacttttgggacttggggtgcattttctcacagaaagaatagtagttaggttccctaacactaccgctgatagctcacctgggaactgaatccacctaaccatgaatgtccttcacttgtaacgtggttcacaggttactaatcatagatcctgaccagcatttgtaacactgctctaactaggacacagcatgcagcagccacactcacaccctgggatgtctgtgtacctctgtccctaggtgtaggaaatggaagaaaaagattcagccaagtggggaggtgacagatgcacaattatgaaacctggttgtacatgttatgaaagtatactaagtaagttagtttttattattaatgtgaaagcaaaaacttgtatgttaacttattttcaatatcttgaccttatttatgatctgctaaagtggtgatttatccattcaaaatatatatttttttccatttaaaactaatttataaactatgtactcctgggaagatttgaaatcttttagaagtttgttgaaatattttcaccatttcagacagacttctgacttagatactgattttaatgccagtatctgctctaaatatttatgataaaaatgcattatttttttaaagagcttgatgagatttgtgataagtgatagtactcaaaaacctgaatcccacccctcgaccaatcctccacaaacttcagttgttggttaacgtattaactgaacacagacaatacagtctgatttagaagtcatcttttcagccgtgtgataattaacatggtaagccttagcagcaaacattcttcctaaaaggaagacttcattttctcaagaaatgggattagttgggggtattataataccaaattgtaaatcatgagcgttttctccactgtgcacctgaggcagatcatgcatctttgagtgcagtttggtctgacccctcaagagaaaagcatggtgccgtagggctgctatggtttgaatggatgccatcactcttttctccacatacagtgcagagagctgtctggagtcacaatctgaacagattctcgggcgctccttctctccttccatcactacagtaagtaaaaggaccatagaggggaaccaggaatctgagaatcagctgtgctcaatagccaacctccctgtccagatgcagctattttggtatctcctatcacatgcactctgaatcagggtttttctataagaaatctttcagaatcagcaaaagtggggatgacccaggcatcttgatttgcaaaatcacaaaactaagttgtcagttatcactgtagatgagcaactcatctttttaaagtatagttactgaactgattctgagaaatctttagagagaaaaaactcaacagtacaaattaactaattgggaaagttagaatgtcctttctgaatttttcattaaaaaaattacattatctgaaataacataaagctactaaactgctttgtattctattaagaaatagctcctaaggatgtagtcttgtttcatagttgttgcactatatcaaaacttaaaatgtaagcccagttcttctctgtatagaaaggaaacattgtgttacttaatgaattatttatacagagcatttgttgccaactgttgttccagccatccacacaggagtctgttctgaggtggcaatagcacatgggaagatgaactttccctgtttgtttacccgttcttctttggctgtatctgatgacagtataagatgttcttaataaagttttatgttctttttgaaaaaagaggaa

SEQ ID NO: 429346 - DNA, 1935 bp, Homo sapiens
tgccggccgggcgcgatcttgctggtttgcggccggtcttggatgaagcggcggccgtggtgagagcgtggggaagggtggggtgagggggcgaggccgcagctagggcggcgaaactctcctcccctcggccccaccgcgtgggacggcgtgaacgtggtgtcggagggatgtcagccttctctgaggcggcgctggagaagaagctgtcggagttgagcaactcgcagcagagcgtgcagaccttgtccctgtggctcattcaccaccgtaaacactcgcggcccatcgtcaccgtgtgggagcgggagctgcggaaagccaaaccaaacaggaagcttacttttctctacctagccaatgatgtcatacagaacagcaagaggaaggggccagagtttacaaaagattttgcaccagttatagtggaggcttttaagcatgtttcaagtgaaactgatgaaagttgtaagaagcaccttggaagagtgttatctatttgggaagaaaggtctgtttatgaaaatgatgtattagaacaacttaaacaagctctgtatggtgataagaagcctaggaagcgaacttatgaacagataaaggtggatgaaaatgaaaactgttcctctctgggatctccaagtgaaccaccacagactctagatctcgttagagcattacaagatctggaaaatgcagcctcaggtgatgcagcagttcatcagaggatagcttctttacctgttgaagtccaagaagtatctctattagataaaataacagataaagaatctggagaaaggctttccaaaatggtagaggatgcgtgtatgttgctggcagattacaatggcagattggcggcagaaatagatgatagaaagcaactcactcgaatgttagcagattttcttcgttgtcaaaaggaagcccttgcagagaaagagcataaattggaagagtacaagcgcaagctagccagagtttccctggtgcgcaaagaactcaggtcccggatccagagcctgccagacttatctcgattgcccaatgtcactggcagccacatgcacctgccctttgcgggagacatctacagtgaagattgatggaccagcctctttccaggtcccaggactttgcaagagatggagacagtgcagagagctgtctggagtcacaatctgaacagattctcgggcgctccttctctccttccatcactacagtaagtaaaaggaccatagaggggaaccaggaatctgagaatcagctgtgctcaatagccaacctccctgtccagatgcagctattttggtatctcctatcacatgcactctgaatcagggtttttctataagaaatctttcagaatcagcaaaagtggggatgacccaggcatcttgatttgcaaaatcacaaaactaagttgtcagttatcactgtagatgagcaactcatctttttaaagtatagttactgaactgattctgagaaatctttagagagaaaaaactcaacagtacaaattaactaattgggaaagttagaatgtcctttctgaatttttcattaaaaaaattacattatctgaaataacataaagctactaaactgctttgtattctattaagaaatagctcctaaggatgtagtcttgtttcatagttgttgcactatatcaaaacttaaaatgtaagcccagttcttctctgtatagaaaggaaacattgtgttacttaatgaattatttatacagagcatttgttgccaactgttgttccagccatccacacaggagtctgttctgaggtggcaatagcacatgggaagatgaactttccctgtttgtttacccgttcttctttggctgtatctgatgacagtataagatgttcttaataaagttttatgttctttttgaaaaaagaggaa

SEQ ID NO: 429347 - DNA, 1727 bp, Homo sapiens
acatttcaaaaagaacataaaactttattaagaacatcttatactgtcatcagatacagccaaagaagaacgggtaaacaaacagggaaagttcatcttcccatgtgctattgccacctcagaacagactcctgtgtggatggctggaacaacagttggcacccacgcgtccggaaatggaagaaaaagattcagccaagtggggaggtgacagatgcacaattatgaaacctggttgtacatgttatgaaagtatactaagtaagttagtttttattattaatgtgaaagcaaaaacttgtatgttaacttattttcaatatcttgaccttatttatgatctgctaaagtggtgatttatccattcaaaatatatatttttttccatttaaaactaatttataaactatgtactcctgggaagatttgaaatcttttagaagtttgttgaaatattttcaccatttcagacagacttctgacttagatactgattttaatgccagtatctgctctaaatatttatgataaaaatgcattatttttttaaagagcttgatgagatttgtgataagtgatagtactcaaaaacctgaatcccacccctcgaccaatcctccacaaacttcagttgttggttaacgtattaactgaacacagacaatacagtctgatttagaagtcatcttttcagccgtgtgataattaacatggtaagccttagcagcaaacattcttcctaaaaggaagacttcattttctcaagaaatgggattagttgggggtattataataccaaattgtaaatcatgagcgttttctccactgtgcacctgaggcagatcatgcatctttgagtgcagtttggtctgacccctcaagagaaaagcatggtgccgtagggctgctatggtttgaatggatgccatcactcttttctccacatacagtgcagagagctgtctggagtcacaatctgaacagattctcgggcgctccttctctccttccatcactacagtaagtaaaaggaccatagaggggaaccaggaatctgagaatcagctgtgctcaatagccaacctccctgtccagatgcagctattttggtatctcctatcacatgcactctgaatcagggtttttctataagaaatctttcagaatcagcaaaagtggggatgacccaggcatcttgatttgcaaaatcacaaaactaagttgtcagttatcactgtagatgagcaactcatctttttaaagtatagttactgaactgattctgagaaatctttagagagaaaaaactcaacagtacaaattaactaattgggaaagttagaatgtcctttctgaatttttcattaaaaaaattacattatctgaaataacataaagctactaaactgctttgtattctattaagaaatagctcctaaggatgtagtcttgtttcatagttgttgcactatatcaaaacttaaaatgtaagcccagttcttctctgtatagaaaggaaacattgtgttacttaatgaattatttatacagagcatttgttgccaactgttgttccagccatccacacaggagtctgttctgaggtggcaatagcacatgggaagatgaactttccctgtttgtttacccgttcttctttggctgtatctgatgacagtataagatgttcttaataaagttttatgttctttttgaaaaaagaggaa

SEQ ID NO: 429348 - DNA, 1053 bp, Homo sapiens
tgccggccgggcgcgatcttgctggtttgcggccggtcttggatgaagcggcggccgtggtgagagcgtggggaagggtggggtgagggggcgaggccgcagctagggcggcgaaactctcctcccctcggccccaccgcgtgggacggcgtgaacgtggtgtcggagggatgtcagccttctctgaggcggcgctggagaagaagctgtcggagttgagcaactcgcagcagagcgtgcagaccttgtccctgtggctcattcaccaccgtaaacactcgcggcccatcgtcaccgtgtgggagcgggagctgcggaaagccaaaccaaacaggaagcttacttttctctacctagccaatgatgtcatacagaacagcaagaggaaggggccagagtttacaaaagattttgcaccagttatagtggaggcttttaagcatgtttcaagtgaaactgatgaaagttgtaagaagcaccttggaagagtgttatctatttgggaagaaaggtctgtttatgaaaatgatgtattagaacaacttaaacaagctctgtatggtgataagaagcctaggaagcgaacttatgaacagataaaggtggatgaaaatgaaaactgttcctctctgggatctccaagtgaaccaccacagactctagatctcgttagagcattacaagatctggaaaatgcagcctcaggtgatgcagcagttcatcagaggatagcttctttacctgttgaagtccaagaagtatctctattagataaaataacagataaagaatctggagaaaggctttccaaaatggtagaggatgcgtgtatgttgctggcagattacaatggcagattggcggcagaaatagatgatagaaagcaactcactcgaatgttagcagattttcttcgttgtcaaaaggaagcccttgcagagaaagagcataaattggaaatattggacatgggcgtatcttctaacgatgtcgtcaccattagtatattcttcctgctaaaaataaatatcaaaccctgaagcctgaaaaaac

SEQ ID NO: 429349 - DNA, 814 bp, Homo sapiens
aggccctggtgaagtacggaatgccggaagggccgggctcaaagctccgcctctggcgcgaccgacgactggagcgcagggcaggggtagaggctcgtagatggaactggtagtcagctggagagcagcatggaggcgtcctgggggagcttcaacgctgagcggggctggtatgtctctgtccagcagcctgaagaagcggaggccgaagagttgagtccgttgctaagcaacgaacttcacagacagcgatccccaggtgtttcatttggtttatcagtgtttaatttgatgaatgccatcatgggaagtggcatccttggcttagcttatgttatggctaataccggtgtctttggatttagcttcttgctgctgacagttgctctcctggcttcttactcagtccatcttctgcttagtatgtgtattcagacagctgtaacatcttatgaagatcttggactctttgcatttggattacctggaaagttggtggtggcaggcaccataataattcagaatattggagctatgtcatcttatcttttaattattaaaacagagcttcctgctgctattgcagaatttttgactggagactatagtagacatataaaatgaagttgttgagccagatgatctctaaggtctcttccagctctaacattccataactgtgattctgagttactgctgggaggagatattggtatcttgatggacaaacactactaataatcatatgtgttggcattgtgttccctcttgcacttcttcccaaaataggtaagtctttatagagcacattatt

SEQ ID NO: 429350 - DNA, 584 bp, Homo sapiens
aaggccaggatttggtaatgggaatctaaaatctgttatcatccattagtgcaaaggaaaacaattttgttactattgataccttagtactttataatgtgatccttattattttatttacagacaaagtggagtcagaattactaaaaggttatagtaaatacttatcacatgatgttgttgtcatgactgtgaagttatgcatactatttgctgtgcttttgacagtccctctaatccacttccctgccagaaaagctgtaacaatgatgtttttctccaattttccattctcatggattcgccattttttgatcactctagcactcaatattatcatcgttttacttgcaatatatgttcctgacattagaaatgtatttggtgtagttggtgccagtacatcaacatgtttgatttttatattcccaggactattttatcttaaacttagcagagaggattttctgtcatggaaaaagcttggggcattcgttttgctcatctttggaattttggttgggaattttagtttagcactcatcatttttgattggattaataaataaaagaaatattttcct

SEQ ID NO: 429351 - DNA, 392 bp, Homo sapiens
tgccccttcagtcatagggtggtagcccccttcattgctattagctgttatgcactcaattgtgttccaaccccaaattcgtaggttgaggccccaatccccaggacctcagaatgcaactgtatttggagatagggtctttaaagaagtaattaaattaaaatgaggccattaagccctaattcaatgtgactggtgttcttgtaagaaaaggaagagataccatggagatgtgcacccagaggaaaggccacgcaaggacacagcaagaaggcaactgtttacaagccaagggaagaggcctcaggagaaccaaacgtgtccacaccttgatcttgcacttcccaacctccagaactgtgagcaaataaatgatgttgtttaatcaccca

SEQ ID NO: 429352 - DNA, 1976 bp, Homo sapiens
aggccctggtgaagtacggaatgccggaagggccgggctcaaagctccgcctctggcgcgaccgacgactggagcgcagggcaggggtagaggctcgtagatggaactggtagtcagctggagagcagcatggaggcgtcctgggggagcttcaacgctgagcggggctggtatgtctctgtccagcagcctgaagaagcggaggccgaagagttgagtccgttgctaagcaacgtaagtgggctgtgttcgcttccccgcgctgacgccctccggcttccctcaagtgcctgccaaataagacccagaaaaggaggaccgcaccgggacaggggagatgctggagcctgaaccctgggggatggggtctgaaggcagccgccgagattcagatgagattggcgcagttatgaacgtgatagcagcctagcatactctagaaagaaaagatgaaaagcgtcgggtggaagagatgcagcgttgagtggaagctgcgaacatgatgggatgagcggccctaggattatgtactcactgctgaacttcacagacagcgatccccaggtgtttcatttggtttatcagtgtttaatttgatgaatgccatcatgggaagtggcatccttggcttagcttatgttatggctaataccggtgtctttggatttagcttcttgctgctgacagttgctctcctggcttcttactcagtccatcttctgcttagtatgtgtattcagacagcctacttgggcccatgaactaactacttcatggttctgcctgcacattgactcacctgtcttccgttgattgaattccttcaatctttgtaaaattctctgtggagctgtaacatcttatgaagatcttggactctttgcatttggattacctggaaagttggtggtggcaggcaccataataattcagaatattggagctatgtcatcttatcttttaattattaaaacagagcttcctgctgctattgcagaatttttgactggagactatagtagatattggtatcttgatggacaaacactactaataatcatatgtgttggcattgtgttccctcttgcacttcttcccaaaataggctttcttggctacacaagtagtttatcatttttctttatgatgttctttgctcttgtggtaataattaaaaaatggtccatcccttgtcctctgacattaaattatgtagagaaaggcttccagatttcaaatgttacagatgattgtaagccaaagctctttcatttctccaaagagagtgcttatgccttaccaaccatggctttttcatttctctgccatacctcaatattgcccatatactgtgaacttcaaagtccttcaaagaaaagaatgcagaatgttaccaatacagcaattgctttaagttttctcatttattttatatctgcactctttgggtacctcactttttatgatgaacaactaaagcccagagaggtgaagtgacctgtcacagaattaaagacaaagtggagtcagaattactaaaaggttatagtaaatacttatcacatgatgttgttgtcatgactgtgaagttatgcatactatttgctgtgcttttgacagtccctctaatccacttccctgccagaaaagctgtaacaatgatgtttttctccaattttccattctcatggattcgccattttttgatcactctagcactcaatattatcatcgttttacttgcaatatatgttcctgacattagaaatgtatttggtgtagttggtgccagtacatcaacatgtttgatttttatattcccaggactattttatcttaaacttagcagagaggattttctgtcatggaaaaagcttggggcattcgttttgctcatctttggaattttggttgggaattttagtttagcactcatcatttttgattggattaataaataaaagaaatattttcct

SEQ ID NO: 429353 - DNA, 1934 bp, Homo sapiens
aggccctggtgaagtacggaatgccggaagggccgggctcaaagctccgcctctggcgcgaccgacgactggagcgcagggcaggggtagaggctcgtagatggaactggtagtcagctggagagcagcatggaggcgtcctgggggagcttcaacgctgagcggggctggtatgtctctgtccagcagcctgaagaagcggaggccgaagagttgagtccgttgctaagcaacgaacttcacagacagcgatccccaggtgtttcatttggtttatcagtgtttaatttgatgaatgccatcatgggaagtggcatccttggcttagcttatgttatggctaataccggtgtctttggatttagcttcttgctgctgacagttgctctcctggcttcttactcagtccatcttctgcttagtatgtgtattcagacagctgtaacatcttatgaagatcttggactctttgcatttggattacctggaaagttggtggtggcaggcaccataataattcagaatattggagctatgtcatcttatcttttaattattaaaacagagcttcctgctgctattgcagaatttttgactggagactatagtagatattggtatcttgatggacaaacactactaataatcatatgtgttggcattgtgttccctcttgcacttcttcccaaaataggctttcttggctacacaagtagtttatcatttttctttatgatgttctttgctcttgtggtaataattaaaaaatggtccatcccttgtcctctgacattaaattatgtagagaaaggcttccagatttcaaatgttacagatgattgtaagccaaagctctttcatttctccaaagagagtgcttatgccttaccaaccatggctttttcatttctctgccatacctcaatattgcccatatactgtgaacttcaaagtccttcaaagaaaagaatgcagaatgttaccaatacagcaattgctttaagttttctcatttattttatatctgcactctttgggtacctcactttttatgacaaagtggagtcagaattactaaaaggttatagtaaatacttatcacatgatgttgttgtcatgactgtgaagttatgcatactatttgctgtgcttttgacagtccctctaatccacttccctgccagaaaagctgtaacaatgatgtttttctccaattttccattctcatggattcgccattttttgatcactctagcactcaatattatcatcgttttacttgcaatatatgttcctgacattagaaatgtatttggtgtagttggtgccagtacatcaacatgtttgatttttatattcccaggactattttatcttaaacttagcagagaggattttctgtcatggaaaaagcttggggcattcgttttgctcatctttggaattttggttgggaattttagtttagcactcatcatttttgattggattaataaataaaagaaatattttcctacttcttacaagaataatatacccctagttgcaagaatgaattattccggaagacaccctggatgaaaaataacattttaataaaaattattaacagaaaaaaaaaaaaaaaaaaaaaaaaaaaaaaaaaatgtgtgggggggcaggaggccgacgaagaaaaggtttgtaaaagccacatctgcgtgggggcgccggcggggccaatgaaggtgaatttcaacactgtggcgcacaccgcgtctgccacaaaggggaagcccctcggcacacgacaacagcggtcggcgtttcctcccccaaataaaaaaacgcgcggggcaacccgggtgtgtttgagacaatcccagggggcttctcgggccctcgctgggctcacccgggtgccacggaccgtaacgcgcgcgcgcggggggggc

SEQ ID NO: 429354 - DNA, 1697 bp, Homo sapiens
aggccctggtgaagtacggaatgccggaagggccgggctcaaagctccgcctctggcgcgaccgacgactggagcgcagggcaggggtagaggctcgtagatggaactggtagtcagctggagagcagcatggaggcgtcctgggggagcttcaacgctgagcggggctggtatgtctctgtccagcagcctgaagaagcggaggccgaagagttgagtccgttgctaagcaacgaacttcacagacagcgatccccaggtgtttcatttggtttatcagtgtttaatttgatgaatgccatcatgggaagtggcatccttggcttagcttatgttatggctaataccggtgtctttggatttagcttcttgctgctgacagttgctctcctggcttcttactcagtccatcttctgcttagtatgtgtattcagacagctgtaacatcttatgaagatcttggactctttgcatttggattacctggaaagttggtggtggcaggcaccataataattcagaatattggagctatgtcatcttatcttttaattattaaaacagagcttcctgctgctattgcagaatttttgactggagactatagtagatattggtatcttgatggacaaacactactaataatcatatgtgttggcattgtgttccctcttgcacttcttcccaaaataggctttcttggctacacaagtagtttatcatttttctttatgatgttctttgctcttgtggtaataattaaaaaatggtccatcccttgtcctctgacattaaattatgtagagaaaggcttccagatttcaaatgttacagatgattgtaagccaaagctctttcatttctccaaagagagtgcttatgccttaccaaccatggctttttcatttctctgccatacctcaatattgcccatatactgtgaacttcaaagtccttcaaagaaaagaatgcagaatgttaccaatacagcaattgctttaagttttctcatttattttatatctgcactctttgggtacctcactttttatgacaaagtggagtcagaattactaaaaggttatagtaaatacttatcacatgatgttgttgtcatgactgtgaagttatgcatactatttgctgtgcttttgacagtccctctaatccacttccctgccagaaaagctgtaacaatgatgtttttctccaattttccattctcatggattcgccattttttgatcactctagcactcaatattatcatcgttttacttgcaatatatgttcctgacattagaaatgtatttggtgtagttggtgccagtacatcaacatgtttgatttttatattcccaggactattttatcttaaacttagcagagaggattttctgtcatggaaaaagcttggggcattcgttttgctcatctttggaattttggttgggaattttagtttagcactcatcatttttgattggattaataaataaaagaaatattttcctacttcttacaagaataatatacccctagttgcaagaatgaattattccggaagacaccctggatgaaaaataacattttaataaaaattattaacagaaaagcagaacaaaatggcagtgggtatggggaagtaagagtgtggcagttttaatcaaaaaaagaaacaaactcgaaatgctct

SEQ ID NO: 429355 - DNA, 1701 bp, Homo sapiens
aggccctggtgaagtacggaatgccggaagggccgggctcaaagctccgcctctggcgcgaccgacgactggagcgcagggcaggggtagaggctcgtagatggaactggtagtcagctggagagcagcatggaggcgtcctgggggagcttcaacgctgagcggggctggtatgtctctgtccagcagcctgaagaagcggaggccgaagagttgagtccgttgctaagcaacgaacttcacagacagcgatccccaggtgtttcatttggtttatcagtgtttaatttgatgaatgccatcatgggaagtggcatccttggcttagcttatgttatggctaataccggtgtctttggatttagcttcttgctgctgacagttgctctcctggcttcttactcagtccatcttctgcttagtatgtgtattcagacagctgtaacatcttatgaagatcttggactctttgcatttggattacctggaaagttggtggtggcaggcaccataataattcagaatattggagctatgtcatcttatcttttaattattaaaacagagcttcctgctgctattgcagaatttttgactggagactatagtagatattggtatcttgatggacaaacactactaataatcatatgtgttggcattgtgttccctcttgcacttcttcccaaaataggctttcttggctacacaagtagtttatcatttttctttatgatgttctttgctcttgtggtaataattaaaaaatggtccatcccttgtcctctgacattaaattatgtagagaaaggcttccagatttcaaatgttacagatgattgtaagccaaagctctttcatttctccaaagagagtgcttatgccttaccaaccatggctttttcatttctctgccatacctcaatattgcccatatactgtgaacttcaaagtccttcaaagaaaagaatgcagaatgttaccaatacagcaattgctttaagttttctcatttattttatatctgcactctttgggtacctcactttttatgacaaagtggagtcagaattactaaaaggttatagtaaatacttatcacatgatgttgttgtcatgactgtgaagttatgcatactatttgctgtgcttttgacagtccctctaatccacttccctgccagaaaagctgtaacaatgatgtttttctccaattttccattctcatggattcgccattttttgatcactctagcactcaatattatcatcgttttacttgcaatatatgttcctgacattagaaatgtatttggtgtagttggtgccagtacatcaacatgtttgatttttatattcccaggactattttatcttaaacttagcagagaggattttctgtcatggaaaaagcttggggttggcgtgcagtggtgtgatctcagctcattgcaacctctgcctcccggactcaagcaatcctcccacctcagcctccagagtagctgagactacagaaaaggaagagataccatggagatgtgcacccagaggaaaggccacgcaaggacacagcaagaaggcaactgtttacaagccaagggaagaggcctcaggagaaccaaacgtgtccacaccttgatcttgcacttcccaacctccagaactgtgagcaaataaatgatgttgtttaatcaccca

SEQ ID NO: 429356 - DNA, 1910 bp, Homo sapiens
aggccctggtgaagtacggaatgccggaagggccgggctcaaagctccgcctctggcgcgaccgacgactggagcgcagggcaggggtagaggctcgtagatggaactggtagtcagctggagagcagcatggaggcgtcctgggggagcttcaacgctgagcggggctggtatgtctctgtccagcagcctgaagaagcggaggccgaagagttgagtccgttgctaagcaacgaacttcacagacagcgatccccaggtgtttcatttggtttatcagtgtttaatttgatgaatgccatcatgggaagtggcatccttggcttagcttatgttatggctaataccggtgtctttggatttagcttcttgctgctgacagttgctctcctggcttcttactcagtccatcttctgcttagtatgtgtattcagacagctgtaacatcttatgaagatcttggactctttgcatttggattacctggaaagttggtggtggcaggcaccataataattcagaatattggagctatgtcatcttatcttttaattattaaaacagagcttcctgctgctattgcagaatttttgactggagactatagtagatattggtatcttgatggacaaacactactaataatcatatgtgttggcattgtgttccctcttgcacttcttcccaaaataggctttcttggctacacaagtagtttatcatttttctttatgatgttctttgctcttgtggtaataattaaaaaatggtccatcccttgtcctctgacattaaattatgtagagaaaggcttccagatttcaaatgttacagatgattgtaagccaaagctctttcatttctccaaagagagtgcttatgccttaccaaccatggctttttcatttctctgccatacctcaatattgcccatatactgtgaacttcaaagtccttcaaagaaaagaatgcagaatgttaccaatacagcaattgctttaagttttctcatttattttatatctgcactctttgggtacctcactttttatgacaaagtggagtcagaattactaaaaggttatagtaaatacttatcacatgatgttgttgtcatgactgtgaagttatgcatactatttgctgtgcttttgacagtccctctaatccacttccctgccagaaaagctgtaacaatgatgtttttctccaattttccattctcatggattcgccattttttgatcactctagcactcaatattatcatcgttttacttgcaatatatgttcctgacattagaaatgtatttggtgtagttggtgccagtacatcaacatgtttgatttttatattcccaggactattttatcttaaacttagcagagaggattttctgtcatggaaaaagcttggggtaggttgtttttgtttctttctttcaagacttctattttaagaaatagtttgtcagtttatattattttacctgcatcaagaaagtcaatatattttaaaatatagaatacattattgcagagagtagagatttaacaaataatccaattgtatttttttatcttttttcttttatctttcttatcttttatcttttttcttatttccacaggcattcgttttgctcatctttggaattttggttgggaattttagtttagcactcatcatttttgattggattaataaataaaagaaatattttcctacttcttacaagaataatatacccctagttgcaagaatgaattattccggaagacaccctggatgaaaaataacattttaataaaaattattaacagaaaagcagaacaaaatggcagtgggtatggggaagtaagagtgtggcagttttaatcaaaaaaagaaacaaactcgaaatgctct

SEQ ID NO: 429357 - DNA, 1336 bp, Homo sapiens
aggccctggtgaagtacggaatgccggaagggccgggctcaaagctccgcctctggcgcgaccgacgactggagcgcagggcaggggtagaggctcgtagatggaactggtagtcagctggagagcagcatggaggcgtcctgggggagcttcaacgctgagcggggctggtatgtctctgtccagcagcctgaagaagcggaggccgaagagttgagtccgttgctaagcaacgaacttcacagacagcgatccccaggtgtttcatttggtttatcagtgtttaatttgatgaatgccatcatgggaagtggcatccttggcttagcttatgttatggctaataccggtgtctttggatttagcttcttgctgctgacagttgctctcctggcttcttactcagtccatcttctgcttagtatgtgtattcagacagctgtaacatcttatgaagatcttggactctttgcatttggattacctggaaagttggtggtggcaggcaccataataattcagaatattggagctatgtcatcttatcttttaattattaaaacagagcttcctgctgctattgcagaatttttgactggagactatagtagatattggtatcttgatggacaaacactactaataatcatatgtgttggcattgtgttccctcttgcacttcttcccaaaataggctttcttggctacacaagtagtttatcatttttctttatgatgttctttgctcttgtggtaataattaaaaaatggtccatcccttgtcctctgacattaaattatgtagagaaaggcttccagatttcaaatgttacagatgattgtaagccaaagctctttcatttctccaaagagagtgcttatgccttaccaaccatggctttttcatttctctgccatacctcaatattgcccatatactgtgaacttcaaagtccttcaaagaaaagaatgcagaatgttaccaatacagcaattgctttaagttttctcatttattttatatctgcactctttgggtacctcactttttatggttggcgtgcagtggtgtgatctcagctcattgcaacctctgcctcccggactcaagcaatcctcccacctcagcctccagagtagctgagactacagaaaaggaagagataccatggagatgtgcacccagaggaaaggccacgcaaggacacagcaagaaggcaactgtttacaagccaagggaagaggcctcaggagaaccaaacgtgtccacaccttgatcttgcacttcccaacctccagaactgtgagcaaataaatgatgttgtttaatcaccca

SEQ ID NO: 429358 - DNA, 1647 bp, Homo sapiens
aggccctggtgaagtacggaatgccggaagggccgggctcaaagctccgcctctggcgcgaccgacgactggagcgcagggcaggggtagaggctcgtagatggaactggtagtcagctggagagcagcatggaggcgtcctgggggagcttcaacgctgagcggggctggtatgtctctgtccagcagcctgaagaagcggaggccgaagagttgagtccgttgctaagcaacgaacttcacagacagcgatccccaggtgtttcatttggtttatcagtgtttaatttgatgaatgccatcatgggaagtggcatccttggcttagcttatgttatggctaataccggtgtctttggatttagcttcttgctgctgacagttgctctcctggcttcttactcagtccatcttctgcttagtatgtgtattcagacagctgtaacatcttatgaagatcttggactctttgcatttggattacctggaaagttggtggtggcaggcaccataataattcagaatattggagctatgtcatcttatcttttaattattaaaacagagcttcctgctgctattgcagaatttttgactggagactatagtagatattggtatcttgatggacaaacactactaataatcatatgtgttggcattgtgttccctcttgcacttcttcccaaaataggctttcttggctacacaagtagtttatcatttttctttatgatgttctttgctcttgtggtaataattaaaaaatggtccatcccttgtcctctgacattaaattatgtagagaaaggcttccagagtgcttatgccttaccaaccatggctttttcatttctctgccatacctcaatattgcccatatactgtgaacttcaaagtccttcaaagaaaagaatgcagaatgttaccaatacagcaattgctttaagttttctcatttattttatatctgcactctttgggtacctcactttttatgacaaagtggagtcagaattactaaaaggttatagtaaatacttatcacatgatgttgttgtcatgactgtgaagttatgcatactatttgctgtgcttttgacagtccctctaatccacttccctgccagaaaagctgtaacaatgatgtttttctccaattttccattctcatggattcgccattttttgatcactctagcactcaatattatcatcgttttacttgcaatatatgttcctgacattagaaatgtatttggtgtagttggtgccagtacatcaacatgtttgatttttatattcccaggactattttatcttaaacttagcagagaggattttctgtcatggaaaaagcttggggttggcgtgcagtggtgtgatctcagctcattgcaacctctgcctcccggactcaagcaatcctcccacctcagcctccagagtagctgagactacagaaaaggaagagataccatggagatgtgcacccagaggaaaggccacgcaaggacacagcaagaaggcaactgtttacaagccaagggaagaggcctcaggagaaccaaacgtgtccacaccttgatcttgcacttcccaacctccagaactgtgagcaaataaatgatgttgtttaatcaccca

SEQ ID NO: 429359 - DNA, 1235 bp, Homo sapiens
aggccctggtgaagtacggaatgccggaagggccgggctcaaagctccgcctctggcgcgaccgacgactggagcgcagggcaggggtagaggctcgtagatggaactggtagtcagctggagagcagcatggaggcgtcctgggggagcttcaacgctgagcggggctggtatgtctctgtccagcagcctgaagaagcggaggccgaagagttgagtccgttgctaagcaacgaacttcacagacagcgatccccaggtgtttcatttggtttatcagtgtttaatttgatgaatgccatcatgggaagtggcatccttggcttagcttatgttatggctaataccggtgtctttggatttagcttcttgctgctgacagttgctctcctggcttcttactcagtccatcttctgcttagtatgtgtattcagacagctgtaacatcttatgaagatcttggactctttgcatttggattacctggaaagttggtggtggcaggcaccataataattcagaatattggagctatgtcatcttatcttttaattattaaaacagagcttcctgctgctattgcagaatttttgactggagactatagtagatattggtatcttgatggacaaacactactaataatcatatgtgttggcattgtgttccctcttgcacttcttcccaaaataggctttcttggctacacaagtagtttatcatttttctttatgatgttctttgctcttgtggtaataattaaaaaatggtccatcccttgtcctctgacattaaattatgtagagaaaggcttccagatttcaaatgttacagatgattgtaagccaaagctctttcatttctccaaagagagtgcttatgccttaccaaccatggctttttcatttctctgccatacctcaatattgcccatatactgtgaacttcaaaggttggcgtgcagtggtgtgatctcagctcattgcaacctctgcctcccggactcaagcaatcctcccacctcagcctccagagtagctgagactacagaaaaggaagagataccatggagatgtgcacccagaggaaaggccacgcaaggacacagcaagaaggcaactgtttacaagccaagggaagaggcctcaggagaaccaaacgtgtccacaccttgatcttgcacttcccaacctccagaactgtgagcaaataaatgatgttgtttaatcaccca

SEQ ID NO: 429360 - DNA, 1249 bp, Homo sapiens
  misc_feature (913)..(913): n is a, c, g, or t
aggccctggtgaagtacggaatgccggaagggccgggctcaaagctccgcctctggcgcgaccgacgactggagcgcagggcaggggtagaggctcgtagatggaactggtagtcagctggagagcagcatggaggcgtcctgggggagcttcaacgctgagcggggctggtatgtctctgtccagcagcctgaagaagcggaggccgaagagttgagtccgttgctaagcaacgaacttcacagacagcgatccccaggtgtttcatttggtttatcagtgtttaatttgatgaatgccatcatgggaagtggcatccttggcttagcttatgttatggctaataccggtgtctttggatttagcttcttgctgctgacagttgctctcctggcttcttactcagtccatcttctgcttagtatgtgtattcagacagctgtaacatcttatgaagatcttggactctttgcatttggattacctggaaagttggtggtggcaggcaccataataattcagaatattggagctatgtcatcttatcttttaattattaaaacagagcttcctgctgctattgcagaatttttgactggagactatagtagatattggtatcttgatggacaaacactactaataatcatatgtgttggcattgtgttccctcttgcacttcttcccaaaataggctttcttggctacacaagtagtttatcatttttctttatgatgttctttgctcttgtggtaataattaaaaaatggtccatcccttgtcctctgacattaaattatgtagagaaaggcttccagatttcaaatgttacagatgattgtaagccaaagctctttcatttctccaaagagcagtgggccgggcttataatatgcttaccaacccatggcnttttttttctccccccccaaattttccttcctccccccttttttcccccctttttttggggggggcccccccccccccccaaaacaaccctttcttcctcaacacaaacgcgccccccccccccccctgtgttttttttttttcccccccccagccacaacacgacccaaccacacccctcccgccgtccttctctcccccacaaccaaacccacggtctcttctttcgctcggccgctggcggggggggggggggcccccccccccacccacccccagccacccccgacccgcccctcagagccagcaacacacgccgcgcctctcgtctatcaa

SEQ ID NO: 429361 - DNA, 1881 bp, Homo sapiens
aggccctggtgaagtacggaatgccggaagggccgggctcaaagctccgcctctggcgcgaccgacgactggagcgcagggcaggggtagaggctcgtagatggaactggtagtcagctggagagcagcatggaggcgtcctgggggagcttcaacgctgagcggggctggtatgtctctgtccagcagcctgaagaagcggaggccgaagagttgagtccgttgctaagcaacgaacttcacagacagcgatccccaggtgtttcatttggtttatcagtgtttaatttgatgaatgccatcatgggaagtggcatccttggcttagcttatgttatggctaataccggtgtctttggatttagcttcttgctgctgacagttgctctcctggcttcttactcagtccatcttctgcttagtatgtgtattcagacagttggtggtggcaggcaccataataattcagaatattggagctatgtcatcttatcttttaattattaaaacagagcttcctgctgctattgcagaatttttgactggagactatagtagatattggtatcttgatggacaaacactactaataatcatatgtgttggcattgtgttccctcttgcacttcttcccaaaataggctttcttggctacacaagtagtttatcatttttctttatgatgttctttgctcttgtggtaataattaaaaaatggtccatcccttgtcctctgacattaaattatgtagagaaaggcttccagatttcaaatgttacagatgattgtaagccaaagctctttcatttctccaaagagagtgcttatgccttaccaaccatggctttttcatttctctgccatacctcaatattgcccatatactgtgaacttcaaagtccttcaaagaaaagaatgcagaatgttaccaatacagcaattgctttaagttttctcatttattttatatctgcactctttgggtacctcactttttatgacaaagtggagtcagaattactaaaaggttatagtaaatacttatcacatgatgttgttgtcatgactgtgaagttatgcatactatttgctgtgcttttgacagtccctctaatccacttccctgccagaaaagctgtaacaatgatgtttttctccaattttccattctcatggattcgccattttttgatcactctagcactcaatattatcatcgttttacttgcaatatatgttcctgacattagaaatgtatttggtgtagttggtgccagtacatcaacatgtttgatttttatattcccaggactattttatcttaaacttagcagagaggattttctgtcatggaaaaagcttggggcattcgttttgctcatctttggaattttggttgggaattttagtttagcactcatcatttttgattggattaataaataaaagaaatattttcctacttcttacaagaataatatacccctagttgcaagaatgaattattccggaagacaccctggatgaaaaataacattttaataaaaattattaacagaaaaaaaaaaaaaaaaaaaaaaaaaaaaaaaaaatgtgtgggggggcaggaggccgacgaagaaaaggtttgtaaaagccacatctgcgtgggggcgccggcggggccaatgaaggtgaatttcaacactgtggcgcacaccgcgtctgccacaaaggggaagcccctcggcacacgacaacagcggtcggcgtttcctcccccaaataaaaaaacgcgcggggcaacccgggtgtgtttgagacaatcccagggggcttctcgggccctcgctgggctcacccgggtgccacggaccgtaacgcgcgcgcgcggggggggc

SEQ ID NO: 429362 - DNA, 2029 bp, Homo sapiens
aggccctggtgaagtacggaatgccggaagggccgggctcaaagctccgcctctggcgcgaccgacgactggagcgcagggcaggggtagaggctcgtagatggaactggtagtcagctggagagcagcatggaggcgtcctgggggagcttcaacgctgagcggggctggtatgtctctgtccagcagcctgaagaagcggaggccgaagagttgagtccgttgctaagcaacgaacttcacagacagcgatccccaggtgtttcatttggtttatcagtgtttaatttgatgaatgccatcatgggaagtggcatccttggcttagcttatgttatggctaataccggtgtctttggatttagcttcttgctgctgacagttgctctcctggcttcttactcagtccatcttctgcttagtatgtgtattcagacagctgtaacatcttatgaagatcttggactctttgcatttggattacctggaaagttggtggtggcaggcaccataataattcagaatattggagctatgtcatcttatcttttaattattaaaacagagcttcctgctgctattgcagaatttttgactggagactatagtagacatataaaatgaagttgttgagccagatgatctctaaggtctcttccagctctaacattccataactgtgattctgagttactgctgggaggagatattggtatcttgatggacaaacactactaataatcatatgtgttggcattgtgttccctcttgcacttcttcccaaaataggctttcttggctacacaagtagtttatcatttttctttatgatgttctttgctcttgtggtaataattaaaaaatggtccatcccttgtcctctgacattaaattatgtagagaaaggcttccagatttcaaatgttacagatgattgtaagccaaagctctttcatttctccaaagagagtgcttatgccttaccaaccatggctttttcatttctctgccatacctcaatattgcccatatactgtgaacttcaaagtccttcaaagaaaagaatgcagaatgttaccaatacagcaattgctttaagttttctcatttattttatatctgcactctttgggtacctcactttttatgacaaagtggagtcagaattactaaaaggttatagtaaatacttatcacatgatgttgttgtcatgactgtgaagttatgcatactatttgctgtgcttttgacagtccctctaatccacttccctgccagaaaagctgtaacaatgatgtttttctccaattttccattctcatggattcgccattttttgatcactctagcactcaatattatcatcgttttacttgcaatatatgttcctgacattagaaatgtatttggtgtagttggtgccagtacatcaacatgtttgatttttatattcccaggactattttatcttaaacttagcagagaggattttctgtcatggaaaaagcttggggcattcgttttgctcatctttggaattttggttgggaattttagtttagcactcatcatttttgattggattaataaataaaagaaatattttcctacttcttacaagaataatatacccctagttgcaagaatgaattattccggaagacaccctggatgaaaaataacattttaataaaaattattaacagaaaaaaaaaaaaaaaaaaaaaaaaaaaaaaaaaatgtgtgggggggcaggaggccgacgaagaaaaggtttgtaaaagccacatctgcgtgggggcgccggcggggccaatgaaggtgaatttcaacactgtggcgcacaccgcgtctgccacaaaggggaagcccctcggcacacgacaacagcggtcggcgtttcctcccccaaataaaaaaacgcgcggggcaacccgggtgtgtttgagacaatcccagggggcttctcgggccctcgctgggctcacccgggtgccacggaccgtaacgcgcgcgcgcggggggggc

SEQ ID NO: 429363 - DNA, 2179 bp, Homo sapiens
aggccctggtgaagtacggaatgccggaagggccgggctcaaagctccgcctctggcgcgaccgacgactggagcgcagggcaggggtagaggctcgtagatggaactggtagtcagctggagagcagcatggaggcgtcctgggggagcttcaacgctgagcggggctggtatgtctctgtccagcagcctgaagaagcggaggccgaagagttgagtccgttgctaagcaacgtaagtgggctgtgttcgcttccccgcgctgacgccctccggcttccctcaagtgcctgccaaataagacccagaaaaggaggaccgcaccgggacaggggagatgctggagcctgaaccctgggggatggggtctgaaggcagccgccgagattcagatgagattggcgcagttatgaacgtgatagcagcctagcatactctagtgatgggatgagcggccctaggattatgtactcactgctgaacttcacagacagcgatccccaggtgtttcatttggtttatcagtgtttaatttgatgaatgccatcatgggaagtggcatccttggcttagcttatgttatggctaataccggtgtctttggatttagcttcttgctgctgacagttgctctcctggcttcttactcagtccatcttctgcttagtatgtgtattcagacagctgtaacatcttatgaagatcttggactctttgcatttggattacctggaaagttggtggtggcaggcaccataataattcagaatattggagctatgtcatcttatcttttaattattaaaacagagcttcctgctgctattgcagaatttttgactggagactatagtagatattggtatcttgatggacaaacactactaataatcatatgtgttggcattgtgttccctcttgcacttcttcccaaaataggctttcttggctacacaagtagtttatcatttttctttatgatgttctttgctcttgtggtaataattaaaaaatggtccatcccttgtcctctgacattaaattatgtagagaaaggcttccagatttcaaatgttacagatgattgtaagccaaagctctttcatttctccaaagagagtgcttatgccttaccaaccatggctttttcatttctctgccatacctcaatattgcccatatactgtgaacttcaaagtccttcaaagaaaagaatgcagaatgttaccaatacagcaattgctttaagttttctcatttattttatatctgcactctttgggtacctcactttttatgacaaagtggagtcagaattactaaaaggttatagtaaatacttatcacatgatgttgttgtcatgactgtgaagttatgcatactatttgctgtgcttttgacagtccctctaatccacttccctgccagaaaagctgtaacaatgatgtttttctccaattttccattctcatggattcgccattttttgatcactctagcactcaatattatcatcgttttacttgcaatatatgttcctgacattagaaatgtatttggtgtagttggtgccagtacatcaacatgtttgatttttatattcccaggactattttatcttaaacttagcagagaggattttctgtcatggaaaaagcttggggcattcgttttgctcatctttggaattttggttgggaattttagtttagcactcatcatttttgattggattaataaataaaagaaatattttcctacttcttacaagaataatatacccctagttgcaagaatgaattattccggaagacaccctggatgaaaaataacattttaataaaaattattaacagaaaaaaaaaaaaaaaaaaaaaaaaaaaaaaaaaatgtgtgggggggcaggaggccgacgaagaaaaggtttgtaaaagccacatctgcgtgggggcgccggcggggccaatgaaggtgaatttcaacactgtggcgcacaccgcgtctgccacaaaggggaagcccctcggcacacgacaacagcggtcggcgtttcctcccccaaataaaaaaacgcgcggggcaacccgggtgtgtttgagacaatcccagggggcttctcgggccctcgctgggctcacccgggtgccacggaccgtaacgcgcgcgcgcggggggggc

SEQ ID NO: 429364 - DNA, 1950 bp, Homo sapiens
tctctccccactccattcccatcctatcttcatctcttgcagtcacaaggaacttcacagacagcgatccccaggtgtttcatttggtttatcagtgtttaatttgatgaatgccatcatgggaagtggcatccttggcttagcttatgttatggctaataccggtgtctttggatttagcttcttgctgctgacagttgctctcctggcttcttactcagtccatcttctgcttagtatgtgtattcagacagcctacttgggcccatgaactaactacttcatggttctgcctgcacattgactcacctgtcttccgttgattgaattccttcaatctttgtaaaattctctgtggagctgtaacatcttatgaagatcttggactctttgcatttggattacctggaaagttggtggtggcaggcaccataataattcagaatattggagctatgtcatcttatcttttaattattaaaacagagcttcctgctgctattgcagaatttttgactggagactatagtagacatataaaatgaagttgttgagccagatgatctctaaggtctcttccagctctaacattccataactgtgattctgagttactgctgggaggagatattggtatcttgatggacaaacactactaataatcatatgtgttggcattgtgttccctcttgcacttcttcccaaaataggctttcttggctacacaagtagtttatcatttttctttatgatgttctttgctcttgtggtaataattaaaaaatggtccatcccttgtcctctgacattaaattatgtagagaaaggcttccagatttcaaatgttacagatgattgtaagccaaagctctttcatttctccaaagagagtgcttatgccttaccaaccatggctttttcatttctctgccatacctcaatattgcccatatactgtgaacttcaaagtccttcaaagaaaagaatgcagaatgttaccaatacagcaattgctttaagttttctcatttattttatatctgcactctttgggtacctcactttttatgacaaagtggagtcagaattactaaaaggttatagtaaatacttatcacatgatgttgttgtcatgactgtgaagttatgcatactatttgctgtgcttttgacagtccctctaatccacttccctgccagaaaagctgtaacaatgatgtttttctccaattttccattctcatggattcgccattttttgatcactctagcactcaatattatcatcgttttacttgcaatatatgttcctgacattagaaatgtatttggtgtagttggtgccagtacatcaacatgtttgatttttatattcccaggactattttatcttaaacttagcagagaggattttctgtcatggaaaaagcttggggcattcgttttgctcatctttggaattttggttgggaattttagtttagcactcatcatttttgattggattaataaataaaagaaatattttcctacttcttacaagaataatatacccctagttgcaagaatgaattattccggaagacaccctggatgaaaaataacattttaataaaaattattaacagaaaaaaaaaaaaaaaaaaaaaaaaaaaaaaaaaatgtgtgggggggcaggaggccgacgaagaaaaggtttgtaaaagccacatctgcgtgggggcgccggcggggccaatgaaggtgaatttcaacactgtggcgcacaccgcgtctgccacaaaggggaagcccctcggcacacgacaacagcggtcggcgtttcctcccccaaataaaaaaacgcgcggggcaacccgggtgtgtttgagacaatcccagggggcttctcgggccctcgctgggctcacccgggtgccacggaccgtaacgcgcgcgcgcggggggggc

SEQ ID NO: 429365 - DNA, 1720 bp, Homo sapiens
tccaagctccctacaagaacaatggcagaggctattttgtgattactcactgaagagaaaaattgcactttcacatcatcgtacagagatggactgtcatatacattagttaatacaccggctgtttcaatgtcatgcagtatctgtgaatgtacacatggaattgagaactacaaacctagataacgataacaaaaggtccttttcacttatcatgacttcctatatttatcaagtacttttggtctcacagcccaatcactacatgcatagataattatttataatcttttctagttgcaatactattgtgtgtgtgtgtgtgtgtgtgtgtgtgtgtgtgtgtcagaacaaacactggagtcccatgcctaaagtagaactttttttataatagatattggtatcttgatggacaaacactactaataatcatatgtgttggcattgtgttccctcttgcacttcttcccaaaataggctttcttggctacacaagtagtttatcatttttctttatgatgttctttgctcttgtggtaataattaaaaaatggtccatcccttgtcctctgacattaaattatgtagagaaaggcttccagatttcaaatgttacagatgattgtaagccaaagctctttcatttctccaaagagagtgcttatgccttaccaaccatggctttttcatttctctgccatacctcaatattgcccatatactgtgaacttcaaagtccttcaaagaaaagaatgcagaatgttaccaatacagcaattgctttaagttttctcatttattttatatctgcactctttgggtacctcactttttatgacaaagtggagtcagaattactaaaaggttatagtaaatacttatcacatgatgttgttgtcatgactgtgaagttatgcatactatttgctgtgcttttgacagtccctctaatccacttccctgccagaaaagctgtaacaatgatgtttttctccaattttccattctcatggattcgccattttttgatcactctagcactcaatattatcatcgttttacttgcaatatatgttcctgacattagaaatgtatttggtgtagttggtgccagtacatcaacatgtttgatttttatattcccaggactattttatcttaaacttagcagagaggattttctgtcatggaaaaagcttggggcattcgttttgctcatctttggaattttggttgggaattttagtttagcactcatcatttttgattggattaataaataaaagaaatattttcctacttcttacaagaataatatacccctagttgcaagaatgaattattccggaagacaccctggatgaaaaataacattttaataaaaattattaacagaaaaaaaaaaaaaaaaaaaaaaaaaaaaaaaaaatgtgtgggggggcaggaggccgacgaagaaaaggtttgtaaaagccacatctgcgtgggggcgccggcggggccaatgaaggtgaatttcaacactgtggcgcacaccgcgtctgccacaaaggggaagcccctcggcacacgacaacagcggtcggcgtttcctcccccaaataaaaaaacgcgcggggcaacccgggtgtgtttgagacaatcccagggggcttctcgggccctcgctgggctcacccgggtgccacggaccgtaacgcgcgcgcgcggggggggc

SEQ ID NO: 429366 - DNA, 1329 bp, Homo sapiens
aggccctggtgaagtacggaatgccggaagggccgggctcaaagctccgcctctggcgcgaccgacgactggagcgcagggcaggggtagaggctcgtagatggaactggtagtcagctggagagcagcatggaggcgtcctgggggagcttcaacgctgagcggggctggtatgtctctgtccagcagcctgaagaagcggaggccgaagagttgagtccgttgctaagcaacgtaagtgggctgtgttcgcttccccgcgctgacgccctccggcttccctcaagtgcctgccaaataagacccagaaaaggaggaccgcaccgggacaggggagatgctggagcctgaaccctgggggatggggtctgaaggcagccgccgagattcagatgagattggcgcagttatgaacgtgatagcagcctagcatactctagaaagaaaagatgaaaagcgtcgggtggaagagatgcagcgttgagtggaagctgcgaacatgatgggatgagcggccctaggattatgtactcactgctgaacttcacagacagcgatccccaggtgtttcatttggtttatcagtgtttaatttgatgaatgccatcatgggaagtggcatccttggcttagcttatgttatggctaataccggtgtctttggatttagcttcttgctgctgacagttgctctcctggcttcttactcagtccatcttctgcttagtatgtgtattcagacagcctacttgggcccatgaactaactacttcatggttctgcctgcacattgactcacctgtcttccgttgattgaattccttcaatctttgtaaaattctctgtggaggtaggcttttccttttttttttttttttcaatacatacattcatatataaagactagagtataatacgtaactaactctctcccaacagtttgttggactgtcataaaggattattatgctcagattgaattcattggtaagagaaagagctatcatgagtttttatgaaataacttcttcatttatttgctggtggtaaagggtaaagagaaattttcatctttataaaagtaaaggatttcttcacatgaaattctactttagattttatggagcgtttggggtctatcaggacttttcatgggagctgaggtggaatgtaaagaaccttattctctctagccttcgtttgtcatctgtaaaatggcaatgataacacttccttcttggaattgttctgagagtgaaataaaataatgtatatgaaatgtcaagtccttggcaaatgagtgctccctggggcaaaaatgcccactgg

SEQ ID NO: 429367 - DNA, 1003 bp, Homo sapiens
aaggccaggatttggtaatgggaatctaaaatctgttatcatccattagtgcaaaggaaaacaattttgttactattgataccttagtactttataatgtgatccttattattttatttacagacaaagtggagtcagaattactaaaaggttatagtaaatacttatcacatgatgttgttgtcatgactgtgaagttatgcatactatttgctgtgcttttgacagtccctctaatccacttccctgccagaaaagctgtaacaatgatgtttttctccaattttccattctcatggattcgccattttttgatcactctagcactcaatattatcatcgttttacttgcaatatatgttcctgacattagaaatgtatttggtgtagttggtgccagtacatcaacatgtttgatttttatattcccaggactattttatcttaaacttagcagagaggattttctgtcatggaaaaagcttggggcattcgttttgctcatctttggaattttggttgggaattttagtttagcactcatcatttttgattggattaataaataaaagaaatattttcctacttcttacaagaataatatacccctagttgcaagaatgaattattccggaagacaccctggatgaaaaataacattttaataaaaattattaacagaaaaaaaaaaaaaaaaaaaaaaaaaaaaaaaaaatgtgtgggggggcaggaggccgacgaagaaaaggtttgtaaaagccacatctgcgtgggggcgccggcggggccaatgaaggtgaatttcaacactgtggcgcacaccgcgtctgccacaaaggggaagcccctcggcacacgacaacagcggtcggcgtttcctcccccaaataaaaaaacgcgcggggcaacccgggtgtgtttgagacaatcccagggggcttctcgggccctcgctgggctcacccgggtgccacggaccgtaacgcgcgcgcgcggggggggc

SEQ ID NO: 429368 - DNA, 1066 bp, Homo sapiens
aggccctggtgaagtacggaatgccggaagggccgggctcaaagctccgcctctggcgcgaccgacgactggagcgcagggcaggggtagaggctcgtagatggaactggtagtcagctggagagcagcatggaggcgtcctgggggagcttcaacgctgagcggggctggtatgtctctgtccagcagcctgaagaagcggaggccgaagagttgagtccgttgctaagcaacgaacttcacagacagcgatccccaggtgtttcatttggtttatcagtgtttaatttgatgaatgccatcatgggaagtggcatccttggcttagcttatgttatggctaataccggtgtctttggatttagcttcttgctgctgacagttgctctcctggcttcttactcagtccatcttctgcttagtatgtgtattcagacagctgtaacatcttatgaagatcttggactctttgcatttggattacctggaaagttggtggtggcaggcaccataataattcagaatattggagctatgtcatcttatcttttaattattaaaacagagcttcctgctgctattgcagaatttttgactggagactatagtagacatataaaatgaagttgttgagccagatgatctctaaggtctcttccagctctaacattccataactgtgattctgagttactgctgggaggaggtaaagttatcttcagtcccacagttcagtgctttggtcagttatatgacttttatggacataaatgaattgtgatctgaaatagtataaagtaactggtgtacagaatttcaaaaagtgttcctttattcctgtgcaagagaaaagagtcctggtcctggggattaaatgctcccttttgtacaactttagcttcgtgacatttttttttcttttaaagagtgaaattggcttataataattttttgttttattttattacggtaagaacacttgacatgaaatctgcactctcaacagattttcaagtgtataatgcggtattgttatctacgagagacagcaaaactaacagatgga

SEQ ID NO: 429369 - DNA, 1313 bp, Homo sapiens
aggccctggtgaagtacggaatgccggaagggccgggctcaaagctccgcctctggcgcgaccgacgactggagcgcagggcaggggtagaggctcgtagatggaactggtagtcagctggagagcagcatggaggcgtcctgggggagcttcaacgctgagcggggctggtatgtctctgtccagcagcctgaagaagcggaggccgaagagttgagtccgttgctaagcaacgtaagtgggctgtgttcgcttccccgcgctgacgccctccggcttccctcaagtgcctgccaaataagacccagaaaaggaggaccgcaccgggacaggggagatgctggagcctgaaccctgggggatggggtctgaaggcagccgccgagattcagatgagattggcgcagttatgaacgtgatagcagcctagcatactctagaaagaaaagatgaaaagcgtcgggtggaagagatgcagcgttgagtggaagctgcgaacatgatgggatgagcggccctaggattatgtactcactgctgaacttcacagacagcgatccccaggtgtttcatttggtttatcagtgtttaatttgatgaatgccatcatgggaagtggcatccttggcttagcttatgttatggctaataccggtgtctttggatttagcttcttgctgctgacagttgctctcctggcttcttactcagtccatcttctgcttagtatgtgtattcagacagatttttggaaggaaagctttcttaagaaagaacggaaaagagagaagaaccaaatagacgcaataaaaaatgataaaggggttatcaccactgatcccacagaaatacaaactaccatcagagaatactacaaacacctctacgcaaataaactagaaaatctagaagaaatggataaattccttgacacatacaccctcccaacactaaaccaggaagaagttgaatctctgaatagaccaataacaggctctgaaattgtggcaataatcaatagcttaccaaccaaaaagaatccaggaccagatggattcgcagccgaattctaccagaggtacaaggaggaactggtaccgttccttctgaaactattccaatcaatagaaaaagagggaatcctccctaactcattgtatgaggccagcatcatcctgataccaaagccaggcagagacacaaccaaaaaagagaattttagaccaatatccttgatgaacatggatgcaaaaatcctcaataaaatactggcaaactgaatccagcagcacatcaaaaagcttatccaccat

SEQ ID NO: 429370 - DNA, 296 bp, Homo sapiens
gcggcccctactactactatacgggtgttagaagacgacagaaggtgtccttaagtttgctcgcttggtcaagtcctacgaagcccaggatcctgagatcgccagcctgtcaggcaagctgaaggcgctgtttctgccgcccatgaccctgccaccccatgggcctgctgctggtggcagcgtggccgcctcctgagagttggccctcccttgtgccactgccaggggaggaaaggccttgatgttccagacaataataaatgcgcctgtgacttaaaaaaaaaaagtcgtatcga

SEQ ID NO: 429371 - DNA, 1247 bp, Homo sapiens
gggtggggtgggctagttttaataggtccaggcgattagtacctggcatccttaaccacctacagtttgagaagggagtgggtgataaaagcctggaagcggagggaaatcgggccgggcattaggctccatcgctcatcaatagacaaggcctttaggaaactgcgacaacggcttttgctctgggcctttactgccgaatccaggtctccgggcttaacaacaacgaaggggctgtgactggctgctttctcaaccaatcagcaccgaactcatttgcatgggctgagaacaaatgttcgcgaactctagaaatgaatgacttaagtaagttccttagaatattatttttcctactgaaagttaccacatgcgtcgttgtttatacagtaataggaacaagaaaaaagtcacctaagctcaccctcatcaattgtggagttcctttatatcccatcttctctccaaacacatacgcagcagtgttacagctcttttagaatttgtctagtaggctttctggctttttaccggaaagcccctcttatgatgtttgttgccaatgatagattgttttcactgtgcaaaaattatgggtagttttggtggtcttgatgcagttgtaagcttggggtatgaaggtttgggccacgcctgggcgcttccggctgcgccggatgctgtttcctttccgctcccaggggcgttgggaacggttgtaggacgtggctctttattcgtgagttttccatttacctccgctgaacctagagcttcagacgccctatggcgtccgcctcgacccaaccggcggccttgagcgctgagcaagcaaaggtggtcctcgcggaggtgatccaggcgttctccgccccggagaatgcagtgcgcatggacgaggctcgggataacgcctgcaacgacatgggtaagatgctgcaattcgtgctgcccgtggccacgcagatccagcaggaggttatcaaagcctatggcttcagctgcgacggggaaggtgtccttaagtttgctcgcttggtcaagtcctacgaagcccaggatcctgagatcgccagcctgtcaggcaagctgaaggcgctgtttctgccgcccatgaccctgccaccccatgggcctgctgctggtggcagcgtggccgcctcctgagagttggccctcccttgtgccactgccaggggaggaaaggccttgatgttccagacaataataaatgcgcctgtgactta

SEQ ID NO: 429372 - DNA, 1649 bp, Homo sapiens
  misc_feature (1329)..(1329): n is a, c, g, or t
  misc_feature (1339)..(1339): n is a, c, g, or t
  misc_feature (1341)..(1341): n is a, c, g, or t
  misc_feature (1346)..(1346): n is a, c, g, or t
  misc_feature (1349)..(1349): n is a, c, g, or t
  misc_feature (1354)..(1354): n is a, c, g, or t
  misc_feature (1357)..(1357): n is a, c, g, or t
  misc_feature (1359)..(1359): n is a, c, g, or t
  misc_feature (1373)..(1373): n is a, c, g, or t
  misc_feature (1377)..(1377): n is a, c, g, or t
  misc_feature (1467)..(1468): n is a, c, g, or t
gggtggggtgggctagttttaataggtccaggcgattagtacctggcatccttaaccacctacagtttgagaagggagtgggtgataaaagcctggaagcggagggaaatcgggccgggcattaggctccatcgctcatcaatagacaaggcctttaggaaactgcgacaacggcttttgctctgggcctttactgccgaatccaggtctccgggcttaacaacaacgaaggggctgtgactggctgctttctcaaccaatcagcaccgaactcatttgcatgggctgagaacaaatgttcgcgaactctagaaatgaatgacttaagtaagttccttagaatattatttttcctactgaaagttaccacatgcgtcgttgtttatacagtaataggaacaagaaaaaagtcacctaagctcaccctcatcaattgtggagttcctttatatcccatcttctctccaaacacatacgcagcagtgttacagctcttttagaatttgtctagtaggctttctggctttttaccggaaagcccctcttatgatgtttgttgccaatgatagattgttttcactgtgcaaaaattatgggtagttttggtggtcttgatgcagttgtaagcttggggtatgaaggtttgggccacgcctgggcgcttccggctgcgccggatgctgtttcctttccgctcccaggggcgttgggaacggttgtaggacgtggctctttattcgtgagttttccatttacctccgctgaacctagagcttcagacgccctatggcgtccgcctcgacccaaccggcggccttgagcgctgagcaagcaaaggtggtcctcgcggaggtgatccaggcgttctccgccccggagaatgcagtgcgcatggacgaggctcgggataacgcctgcaacgacatgggtaagatgctgcaattcgtgctgcccgtggccacgcagatccagcaggaggttatcaaagcctatggcttcagctgcgacggggaaggtgtccttaagtttgctcgcttggtcaagtcctacgaagcccaggatcctgagatcgccagcctgtcaggcaagctgaaggcgctgtttctgccgcccatgaccctgccaccccatgggcctgctgctggtggcagcgtggccgcctcctgagagttggccctcccttgtgccactgccaggggaggaaaggccttgatgttccagacaataataaatgcgcctgtgacttaaaaaaaaaaaaaaaaaaaaaaaaaagaaaaacataaaaaaaaaaaaccgggggctttttttcgggggggggaaaaaggggtnttgaaggggncnggggncanagggntcngnaccctttttttgcncaangggggaaatcggcggggggcccccaaaaggagggcggaataaaatccgagaaaacgcgggttacccgcgtagtgtcgtctccgacaaacnnccacgagacacacagcaacgccgacacaaccagcgcgacacacaaagaaagaaagcgacgacacgcagatacaaggaacaacacacatcaaacaacacaggcgacacagacagctcacacacgacacacaacacaaagaacacgaaaccaacacacatcgagacacaacacagcgaagaca

SEQ ID NO: 429373 - DNA, 1343 bp, Homo sapiens
gggtggggtgggctagttttaataggtccaggcgattagtacctggcatccttaaccacctacagtttgagaagggagtgggtgataaaagcctggaagcggagggaaatcgggccgggcattaggctccatcgctcatcaatagacaaggcctttaggaaactgcgacaacggcttttgctctgggcctttactgccgaatccaggtctccgggcttaacaacaacgaaggggctgtgactggctgctttctcaaccaatcagcaccgaactcatttgcatgggctgagaacaaatgttcgcgaactctagaaatgaatgacttaagtaagttccttagaatattatttttcctactgaaagttaccacatgcgtcgttgtttatacagtaataggaacaagaaaaaagtcacctaagctcaccctcatcaattgtggagttcctttatatcccatcttctctccaaacacatacgcagcagtgttacagctcttttagaatttgtctagtaggctttctggctttttaccggaaagcccctcttatgatgtttgttgccaatgatagattgttttcactgtgcaaaaattatgggtagttttggtggtcttgatgcagttgtaagcttggggtatgaaggtttgggccacgcctgggcgcttccggctgcgccggatgctgtttcctttccgctcccaggggcgttgggaacggttgtaggacgtggctctttattcgtgagttttccatttacctccgctgaacctagagcttcagacgccctatggcgtccgcctcgacccaaccggcggccttgagcgctgagcaagcaaaggcctcaatccactaattccttgcgctctccgctgggcccgctgtctgttctccgacgcctacccgggacgcctccctgggatgcttctggcgcgcagtggtcctcgcggaggtgatccaggcgttctccgccccggagaatgcagtgcgcatggacgaggctcgggataacgcctgcaacgacatgggtaagatgctgcaattcgtgctgcccgtggccacgcagatccagcaggaggttatcaaagcctatggcttcagctgcgacggggaaggtgtccttaagtttgctcgcttggtcaagtcctacgaagcccaggatcctgagatcgccagcctgtcaggcaagctgaaggcgctgtttctgccgcccatgaccctgccaccccatgggcctgctgctggtggcagcgtggccgcctcctgagagttggccctcccttgtgccactgccaggggaggaaaggccttgatgttccagacaataataaatgcgcctgtgactta

SEQ ID NO: 429374 - DNA, 1549 bp, Homo sapiens
gggtggggtgggctagttttaataggtccaggcgattagtacctggcatccttaaccacctacagtttgagaagggagtgggtgataaaagcctggaagcggagggaaatcgggccgggcattaggctccatcgctcatcaatagacaaggcctttaggaaactgcgacaacggcttttgctctgggcctttactgccgaatccaggtctccgggcttaacaacaacgaaggggctgtgactggctgctttctcaaccaatcagcaccgaactcatttgcatgggctgagaacaaatgttcgcgaactctagaaatgaatgacttaagtaagttccttagaatattatttttcctactgaaagttaccacatgcgtcgttgtttatacagtaataggaacaagaaaaaagtcacctaagctcaccctcatcaattgtggagttcctttatatcccatcttctctccaaacacatacgcagcagtgttacagctcttttagaatttgtctagtaggctttctggctttttaccggaaagcccctcttatgatgtttgttgccaatgatagattgttttcactgtgcaaaaattatgggtagttttggtggtcttgatgcagttgtaagcttggggtatgaaggtttgggccacgcctgggcgcttccggctgcgccggatgctgtttcctttccgctcccaggggcgttgggaacggttgtaggacgtggctctttattcgtgagttttccatttacctccgctgaacctagagcttcagacgccctatggcgtccgcctcgacccaaccggcggccttgagcgctgagcaagcaaagggtgagaatcgtcctagtcaaggcataggctgctggcctggggtagtcaaggcatgggctgctggtctggggaggatgcgggcggaggatgtggggcgacaaacctggctacgtccgccgggaaaatggggtaggggacgccgggtaccgtccttctaagtggggcgcttgcccccaagacttgggatcttattgggttacctacagcctcaatccactaattccttgcgctctccgctgggcccgctgtctgttctccgacgcctacccgggacgcctccctgggatgcttctggcgcgcagtggtcctcgcggaggtgatccaggcgttctccgccccggagaatgcagtgcgcatggacgaggctcgggataacgcctgcaacgacatgggtaagatgctgcaattcgtgctgcccgtggccacgcagatccagcaggaggttatcaaagcctatggcttcagctgcgacggggaaggtgtccttaagtttgctcgcttggtcaagtcctacgaagcccaggatcctgagatcgccagcctgtcaggcaagctgaaggcgctgtttctgccgcccatgaccctgccaccccatgggcctgctgctggtggcagcgtggccgcctcctgagagttggccctcccttgtgccactgccaggggaggaaaggccttgatgttccagacaataataaatgcgcctgtgactta

SEQ ID NO: 429375 - DNA, 1160 bp, Homo sapiens
gggtggggtgggctagttttaataggtccaggcgattagtacctggcatccttaaccacctacagtttgagaagggagtgggtgataaaagcctggaagcggagggaaatcgggccgggcattaggctccatcgctcatcaatagacaaggcctttaggaaactgcgacaacggcttttgctctgggcctttactgccgaatccaggtctccgggcttaacaacaacgaaggggctgtgactggctgctttctcaaccaatcagcaccgaactcatttgcatgggctgagaacaaatgttcgcgaactctagaaatgaatgacttaagtaagttccttagaatattatttttcctactgaaagttaccacatgcgtcgttgtttatacagtaataggaacaagaaaaaagtcacctaagctcaccctcatcaattgtggagttcctttatatcccatcttctctccaaacacatacgcagcagtgttacagctcttttagaatttgtctagtaggctttctggctttttaccggaaagcccctcttatgatgtttgttgccaatgatagattgttttcactgtgcaaaaattatgggtagttttggtggtcttgatgcagttgtaagcttggggtatgaaggtttgggccacgcctgggcgcttccggctgcgccggatgctgtttcctttccgctcccaggggcgttgggaacggttgtaggacgtggctctttattcgtgagttttccatttacctccgctgaacctagagcttcagacgccctatggcgtccgcctcgacccaaccggcggccttgagcgctgagcaagcaaaggtggtcctcgcggaggtgatccaggcgttctccgccccggagaatgcagtgcgcatggacgaggctcgggataacgcctgcaacgacatgggtgtccttaagtttgctcgcttggtcaagtcctacgaagcccaggatcctgagatcgccagcctgtcaggcaagctgaaggcgctgtttctgccgcccatgaccctgccaccccatgggcctgctgctggtggcagcgtggccgcctcctgagagttggccctcccttgtgccactgccaggggaggaaaggccttgatgttccagacaataataaatgcgcctgtgactta

SEQ ID NO: 429376 - DNA, 2365 bp, Homo sapiens
gggtggggtgggctagttttaataggtccaggcgattagtacctggcatccttaaccacctacagtttgagaagggagtgggtgataaaagcctggaagcggagggaaatcgggccgggcattaggctccatcgctcatcaatagacaaggcctttaggaaactgcgacaacggcttttgctctgggcctttactgccgaatccaggtctccgggcttaacaacaacgaaggggctgtgactggctgctttctcaaccaatcagcaccgaactcatttgcatgggctgagaacaaatgttcgcgaactctagaaatgaatgacttaagtaagttccttagaatattatttttcctactgaaagttaccacatgcgtcgttgtttatacagtaataggaacaagaaaaaagtcacctaagctcaccctcatcaattgtggagttcctttatatcccatcttctctccaaacacatacgcagcagtgttacagctcttttagaatttgtctagtaggctttctggctttttaccggaaagcccctcttatgatgtttgttgccaatgatagattgttttcactgtgcaaaaattatgggtagttttggtggtcttgatgcagttgtaagcttggggtatgaaggtttgggccacgcctgggcgcttccggctgcgccggatgctgtttcctttccgctcccaggggcgttgggaacggttgtaggacgtggctctttattcgtgagttttccatttacctccgctgaacctagagcttcagacgccctatggcgtccgcctcgacccaaccggcggccttgagcgctgagcaagcaaaggtggtcctcgcggaggtgatccaggcgttctccgccccggagaatgcagtgcgcatggacgaggctcgggataacgcctgcaacgacatgggtaagatgctgcaattcgtgctgcccgtggccacgcagatccagcaggaggttatcaaagcctatggcttcagctgcgacggggaaggtgggtcagacgcgggaaggcgggtcagacgcgggaaggcgggagttgggtcgggagagggcgccggatctgtgggcccatgagcggttgtcccctttctcgccacacggcggcagccacaatctgactaacattcttggcactcagagcccagggtctaccctgagcttgtgcgtccgagttgcgttttgtacagtagaggttctgtatcccttacccgaaatggttgggaccggaagtgtttcgggttttttcagatttcggaatatttacatatacatggatatcttgggggatgggacctaaatctgaacacgaaattgttttgtttcatatacacgcaccttatgcacatagcctgagggtaattttatataatagtctgaataattttgtgcatgagacaaagttttgactgcgttttgactacagtctcccccaccccccactatgaagtcaggtgtggaattttccattttcggcctcacactggcactcataatttcagatttgggattttctaattaaggatggccaacctgtactgttaatcacattattattccatttggtgatgaggaagcaaactctaatggtgcagactctcgagtagcagagctggacttaaatgctgtggtgccaccttttagtgacatgtctgcatgacagcagtggctgcagtctctccagggtgtttcagctaattttggttgggggggggttggtggttaaatttttggtgagatcctggtgttccccaaaggtgttgactgattcagctctgctgcctcatagccttcctgagttccagctacagacctggggtctcgtgttcattcttggggttccagtgactaaactgctaaaatggttcacctgagagcaagaagcacactgccttgggacattttcattcactgcatcccatctagttgtgcccagtgtagaccaaatgtcatcatccaaaccacacgggacagaggcctgcatgcgtcctgtttggcaaacagctgcccagccagtgggggagcagttcatgcttaaactaccaccccctccaggtgtcttaggcacgctggtccttaggagaagggttgaccttccactccctcttgcaggtgtccttaagtttgctcgcttggtcaagtcctacgaagcccaggatcctgagatcgccagcctgtcaggcaagctgaaggcgctgtttctgccgcccatgaccctgccaccccatgggcctgctgctggtggcagcgtggccgcctcctgagagttggccctcccttgtgccactgccaggggaggaaaggccttgatgttccagacaataataaatgcgcctgtgactta

SEQ ID NO: 429377 - DNA, 1460 bp, Homo sapiens
gggtggggtgggctagttttaataggtccaggcgattagtacctggcatccttaaccacctacagtttgagaagggagtgggtgataaaagcctggaagcggagggaaatcgggccgggcattaggctccatcgctcatcaatagacaaggcctttaggaaactgcgacaacggcttttgctctgggcctttactgccgaatccaggtctccgggcttaacaacaacgaaggggctgtgactggctgctttctcaaccaatcagcaccgaactcatttgcatgggctgagaacaaatgttcgcgaactctagaaatgaatgacttaagtaagttccttagaatattatttttcctactgaaagttaccacatgcgtcgttgtttatacagtaataggaacaagaaaaaagtcacctaagctcaccctcatcaattgtggagttcctttatatcccatcttctctccaaacacatacgcagcagtgttacagctcttttagaatttgtctagtaggctttctggctttttaccggaaagcccctcttatgatgtttgttgccaatgatagattgttttcactgtgcaaaaattatgggtagttttggtggtcttgatgcagttgtaagcttggggtatgaaggtttgggccacgcctgggcgcttccggctgcgccggatgctgtttcctttccgctcccaggggcgttgggaacggttgtaggacgtggctctttattcgtgagttttccatttacctccgctgaacctagagcttcagacgccctatggcgtccgcctcgacccaaccggcggccttgagcgctgagcaagcaaaggtggtcctcgcggaggtgatccaggcgttctccgccccggagaatgcagtgcgcatggacgaggctcgggataacgcctgcaacgacatgggtgtccttaagtttgctcgcttggtcaagtcctacgaagcccaggatcctgagatcgccagcctgtcaggcaagctgaaggcgctgtttctgccgcccatgaccctgccaccccatgggcctgctgctggtggcagcgtggccgcctcctgagagttggccctcccttgtgccactgccaggggaggaaaggccttgatgttccagacaataataaatgcgcctgtgacttaaaaaaacacaaaaaaaaacaaataaacacaaaaaaacagggggggcccccctaaaagttcccccccggggggcccccagattttcgtccctccccccggcttttgtgtggtcaccggagggtggcccctcctaataggggcggtcgctttttctaggcctcgggactgttgcgccccgcgcttcatccaaggctccgggcagtgggcgacaccgtgcccaccctgggggaccccttcgcgcgaaggccaccctcactctgctggggcggagccccatcatgtgggccgcgcttctcccca

SEQ ID NO: 429378 - DNA, 1409 bp, Homo sapiens
gggtggggtgggctagttttaataggtccaggcgattagtacctggcatccttaaccacctacagtttgagaagggagtgggtgataaaagcctggaagcggagggaaatcgggccgggcattaggctccatcgctcatcaatagacaaggcctttaggaaactgcgacaacggcttttgctctgggcctttactgccgaatccaggtctccgggcttaacaacaacgaaggggctgtgactggctgctttctcaaccaatcagcaccgaactcatttgcatgggctgagaacaaatgttcgcgaactctagaaatgaatgacttaagtaagttccttagaatattatttttcctactgaaagttaccacatgcgtcgttgtttatacagtaataggaacaagaaaaaagtcacctaagctcaccctcatcaattgtggagttcctttatatcccatcttctctccaaacacatacgcagcagtgttacagctcttttagaatttgtctagtaggctttctggctttttaccggaaagcccctcttatgatgtttgttgccaatgatagattgttttcactgtgcaaaaattatgggtagttttggtggtcttgatgcagttgtaagcttggggtatgaaggtttgggccacgcctgggcgcttccggctgcgccggatgctgtttcctttccgctcccaggggcgttgggaacggttgtaggacgtggctctttattcgtgagttttccatttacctccgctgaacctagagcttcagacgccctatggcgtccgcctcgacccaaccggcggccttgagcgctgagcaagcaaaggcctcaatccactaattccttgcgctctccgctgggcccgctgtctgttctccgacgcctacccgggacgcctccctgggatgcttctggcgcgcagtggtcctcgcggaggtgatccaggcgttctccgccccggagaatgcagtgcgcatggacgaggctcgggataacgcctgcaacgacatgggtgtccttaagtttgctcgcttggtcaagtcctacgaagcccaggatcctgagatcgccagcctgtcaggcaagctgaaggcgctgtttctgccgcccatgaccctgccaccccatgggcctgctgctggtggcagcgtggccgcctcctgagagttggccctcccttgtgccactgccaggggaggaaaggccttgatgttccagacaataataaatgcgcctgtgacttacaaaacaacgtccacacaagaaccaacacaacacacaacacatacaccgagggggggccggtaccaattggcctaatgtgagcgattccactcctggccgtgtatccacttcttccggggcctggtttccttatcgctgtggcaccccttcgc

SEQ ID NO: 429379 - DNA, 1036 bp, Homo sapiens
gggtggggtgggctagttttaataggtccaggcgattagtacctggcatccttaaccacctacagtttgagaagggagtgggtgataaaagcctggaagcggagggaaatcgggccgggcattaggctccatcgctcatcaatagacaaggcctttaggaaactgcgacaacggcttttgctctgggcctttactgccgaatccaggtctccgggcttaacaacaacgaaggggctgtgactggctgctttctcaaccaatcagcaccgaactcatttgcatgggctgagaacaaatgttcgcgaactctagaaatgaatgacttaagtaagttccttagaatattatttttcctactgaaagttaccacatgcgtcgttgtttatacagtaataggaacaagaaaaaagtcacctaagctcaccctcatcaattgtggagttcctttatatcccatcttctctccaaacacatacgcagcagtgttacagctcttttagaatttgtctagtaggctttctggctttttaccggaaagcccctcttatgatgtttgttgccaatgatagattgttttcactgtgcaaaaattatgggtagttttggtggtcttgatgcagttgtaaaaaaaaaaaaaaaaaaaaaaaaagaaaaacataaaaaaaaaaaaaaaataaatctaaaatttcagcataaaatttctaatccatttcaaccttaccctatataaccatatttttatctattcatacttttttcccttcacataaagtttttttttacccccaatcttgctctctttattcattctaggtcaccgacctttattttttacacttcaacattgttcatatttcgacaatatgttcgcatttttttatatctttgttacacaaaggcttatttccatcatttcatacccttataacaccttctagtgcgaatgtccggcgtataccactaataatctttcgcctaacatcaccttattccttctctcctttatcactgatcttacttaatggcctcttatgcg

SEQ ID NO: 429380 - DNA, 736 bp, Homo sapiens
gggtggggtgggctagttttaataggtccaggcgattagtacctggcatccttaaccacctacagtttgagaagggagtgggtgataaaagcctggaagcggagggaaatcgggccgggcattaggctccatcgctcatcaatagacaaggcctttaggaaactgcgacaacggcttttgctctgggcctttactgccgaatccaggtctccgggcttaacaacaacgaaggggctgtgactggctgctttctcaaccaatcagcaccgaactcatttgcatgggctgagaacaaatgttcgcgaactctagaaatgaatgacttaatggtcctcgcggaggtgatccaggcgttctccgccccggagaatgcagtgcgcatggacgaggctcgggataacgcctgcaacgacatgggtaagatgctgcaattcgtgctgcccgtggccacgcagatccagcaggaggttatcaaagcctatggcttcagctgcgacggggaaggtgtccttaagtttgctcgcttggtcaagtcctacgaagcccaggatcctgagatcgccagcctgtcaggcaagctgaaggcgctgtttctgccgcccatgaccctgccaccccatgggcctgctgctggtggcagcgtggccgcctcctgagagttggccctcccttgtgccactgccaggggaggaaaggccttgatgttccagacaataataaatgcgcctgtgactta

SEQ ID NO: 429381 - DNA, 754 bp, Homo sapiens
acgaccggccggcaagagacccatctggaaaggttcctggaatgggttagggaccccttaccgggtaaaacggtcccgttgaatgccagaaaaaaacccagggccaccgtctctttctagtgaattccctagcctaatcttatctcttaaagacctctcttttcaggatggtgcactctcagcctcgtgccgaattcggcacgagctcgggcgttgggaacggttgtaggacgtggctctttattcgtgagttttccatttacctccgctgaacctagagcttcagacgccctatggcgtccgcctcgacccaaccggcggccttgagcgctgagcaagcaaaggtggtcctcgcggaggtgatccaggcgttctccgccccggagaatgcagtgcgcatggacgaggctcgggataacgcctgcaacgacatgggtaagatgctgcaattcgtgctgcccgtggccacgcagatccagcaggaggttatcaaagcctatggcttcagctgcgacggggaaggtgtccttaagtttgctcgcttggtcaagtcctacgaagcccaggatcctgagatcgccagcctgtcaggcaagctgaaggcgctgtttctgccgcccatgaccctgccaccccatgggcctgctgctggtggcagcgtggccgcctcctgagagttggccctcccttgtgccactgccaggggaggaaaggccttgatgttccagacaataataaatgcgcctgtgactta

SEQ ID NO: 429382 - DNA, 1290 bp, Homo sapiens
gggtggggtgggctagttttaataggtccaggcgattagtacctggcatccttaaccacctacagtttgagaagggagtgggtgataaaagcctggaagcggagggaaatcgggccgggcattaggctccatcgctcatcaatagacaaggcctttaggaaactgcgacaacggcttttgctctgggcctttactgccgaatccaggtctccgggcttaacaacaacgaaggggctgtgactggctgctttctcaaccaatcagcaccgaactcatttgcatgggctgagaacaaatgttcgcgaactctagaaatgaatgacttaagtaagttccttagaatattatttttcctactgaaagttaccacatgcgtcgttgtttatacagtaataggaacaagaaaaaagtcacctaagctcaccctcatcaattgtggagttcctttatatcccatcttctctccaaacacatacgcagcagtgttacagctcttttagaatttgtctagtaggctttctggctttttaccggaaagcccctcttatgatgtttgttgccaatgatagattgttttcactgtgcaaaaattatgggtagttttggtggtcttgatgcagttgtaagcttggggtatgaaggtttgggccacgcctgggcgcttccggctgcgccggatgctgtttcctttccgctcccaggggcgttgggaacggttgtaggacgtggctctttattcgtgagttttccatttacctccgctgaacctagagcttcagacgccctatggcgtccgcctcgacccaaccggcggccttgagcgctgagcaagcaaaggtggtcctcgcggaggtgatccaggcgttctccgccccggagaatgcagtgcgcatggacgaggctcgggataacgcctgcaacgacatgggtaagatgctgcaattcgtgctgcccgtggccacgcagatccagcaggaggttatcaaagcctatggcttcagctgcgacggggaaggtgtccttaagtttgctcgcttggtcaagtcctacgaagcccaggatcctgagatcgccagcctgtcaggcaagctgaaggcgctgtttctgccgcccatgaccctgccaccccatgggcctgctgctggtggcagcgtggccgcctcctgagagttggccctcccttgtgccactgccaggggaggaaaggccttgatgttccagacaataataaatgcgcctgtgacttaagccttggtgtcagtctcttgcggacctgacaacccccatctc

SEQ ID NO: 429383 - DNA, 1745 bp, Homo sapiens
  misc_feature (1425)..(1425): n is a, c, g, or t
  misc_feature (1435)..(1435): n is a, c, g, or t
  misc_feature (1437)..(1437): n is a, c, g, or t
  misc_feature (1442)..(1442): n is a, c, g, or t
  misc_feature (1445)..(1445): n is a, c, g, or t
  misc_feature (1450)..(1450): n is a, c, g, or t
  misc_feature (1453)..(1453): n is a, c, g, or t
  misc_feature (1455)..(1455): n is a, c, g, or t
  misc_feature (1469)..(1469): n is a, c, g, or t
  misc_feature (1473)..(1473): n is a, c, g, or t
  misc_feature (1563)..(1564): n is a, c, g, or t
gggtggggtgggctagttttaataggtccaggcgattagtacctggcatccttaaccacctacagtttgagaagggagtgggtgataaaagcctggaagcggagggaaatcgggccgggcattaggctccatcgctcatcaatagacaaggcctttaggaaactgcgacaacggcttttgctctgggcctttactgccgaatccaggtctccgggcttaacaacaacgaaggggctgtgactggctgctttctcaaccaatcagcaccgaactcatttgcatgggctgagaacaaatgttcgcgaactctagaaatgaatgacttaagtaagttccttagaatattatttttcctactgaaagttaccacatgcgtcgttgtttatacagtaataggaacaagaaaaaagtcacctaagctcaccctcatcaattgtggagttcctttatatcccatcttctctccaaacacatacgcagcagtgttacagctcttttagaatttgtctagtaggctttctggctttttaccggaaagcccctcttatgatgtttgttgccaatgatagattgttttcactgtgcaaaaattatgggtagttttggtggtcttgatgcagttgtaagcttggggtatgaaggtttgggccacgcctgggcgcttccggctgcgccggatgctgtttcctttccgctcccaggggcgttgggaacggttgtaggacgtggctctttattcgtgagttttccatttacctccgctgaacctagagcttcagacgccctatggcgtccgcctcgacccaaccggcggccttgagcgctgagcaagcaaaggcctcaatccactaattccttgcgctctccgctgggcccgctgtctgttctccgacgcctacccgggacgcctccctgggatgcttctggcgcgcagtggtcctcgcggaggtgatccaggcgttctccgccccggagaatgcagtgcgcatggacgaggctcgggataacgcctgcaacgacatgggtaagatgctgcaattcgtgctgcccgtggccacgcagatccagcaggaggttatcaaagcctatggcttcagctgcgacggggaaggtgtccttaagtttgctcgcttggtcaagtcctacgaagcccaggatcctgagatcgccagcctgtcaggcaagctgaaggcgctgtttctgccgcccatgaccctgccaccccatgggcctgctgctggtggcagcgtggccgcctcctgagagttggccctcccttgtgccactgccaggggaggaaaggccttgatgttccagacaataataaatgcgcctgtgacttaaaaaaaaaaaaaaaaaaaaaaaaaagaaaaacataaaaaaaaaaaaccgggggctttttttcgggggggggaaaaaggggtnttgaaggggncnggggncanagggntcngnaccctttttttgcncaangggggaaatcggcggggggcccccaaaaggagggcggaataaaatccgagaaaacgcgggttacccgcgtagtgtcgtctccgacaaacnnccacgagacacacagcaacgccgacacaaccagcgcgacacacaaagaaagaaagcgacgacacgcagatacaaggaacaacacacatcaaacaacacaggcgacacagacagctcacacacgacacacaacacaaagaacacgaaaccaacacacatcgagacacaacacagcgaagaca

SEQ ID NO: 429384 - DNA, 1311 bp, Homo sapiens
gggtggggtgggctagttttaataggtccaggcgattagtacctggcatccttaaccacctacagtttgagaagggagtgggtgataaaagcctggaagcggagggaaatcgggccgggcattaggctccatcgctcatcaatagacaaggcctttaggaaactgcgacaacggcttttgctctgggcctttactgccgaatccaggtctccgggcttaacaacaacgaaggggctgtgactggctgctttctcaaccaatcagcaccgaactcatttgcatgggctgagaacaaatgttcgcgaactctagaaatgaatgacttaagtaagttccttagaatattatttttcctactgaaagttaccacatgcgtcgttgtttatacagtaataggaacaagaaaaaagtcacctaagctcaccctcatcaattgtggagttcctttatatcccatcttctctccaaacacatacgcagcagtgttacagctcttttagaatttgtctagtaggctttctggctttttaccggaaagcccctcttatgatgtttgttgccaatgatagattgttttcactgtgcaaaaattatgggtagttttggtggtcttgatgcagttgtaagcttggggtatgaaggtttgggccacgcctgggcgcttccggctgcgccggatgctgtttcctttccgctcccaggggcgttgggaacggttgtaggacgtggctctttattcgtgagttttccatttacctccgctgaacctagagcttcagacgccctatggcgtccgcctcgacccaaccggcggccttgagcgctgagcaagcaaagggtgagaatcgtcctagtcaagtggtcctcgcggaggtgatccaggcgttctccgccccggagaatgcagtgcgcatggacgaggctcgggataacgcctgcaacgacatgggtaagatgctgcaattcgtgctgcccgtggccacgcagatccagcaggaggttatcaaagcctatggcttcagctgcgacggggaaggtgtccttaagtttgctcgcttggtcaagtcctacgaagcccaggatcctgagatcgccagcctgtcaggcaagctgaaggcgctgtttctgccgcccatgaccctgccaccccatgggcctgctgctggtggcagcgtggccgcctcctgagagttggccctcccttgtgccactgccaggggaggaaaggccttgatgttccagacaataataaatgcgcctgtgacttaagccttggtgtcagtctcttgcggacctgacaacccccatctc

SEQ ID NO: 429385 - DNA, 1213 bp, Homo sapiens
gctcagaacacttgggtcacttgcctctggtcactcaactctctagtatctggcagaactgggcttggagcccatttttttttctttcctttttttgtctttgttcccttttttttcagcctacaaaggccatgttgacttgtaggagtcaggaaaactgaattcagagttgactctgtcacagactgactctttgtgaccttggacaaaccacaaactccccctgaacctcagtttcctcatgtggaaagcaaagggggtgtgggaatcaatagcatttgaggccaacctgtggaacttagaatgttgttgatttctctgagtggccacgtgtaccctagacaaagtcatctgcccaagaggcctgtggatgtgttcctctcacctgcactctcttgttcttcaagtctggccctgcctgccatatttttccatgaccccgttctagcctacaagggcaagaactctccaggccttggggtagaaaagggaatttccctggtcccccagttcctcctccccaaaggatgttctatgattcagagctcttctctggcatctctgaccctagctgctgctttcttctgcccccacagctgaccaggtgtatggagaccaggacatgcatgaggttgtgcgaaagcattgcatggactatctggtacaagcagtcagttctcggcaggggccgaccgggcaacttccccccttgtgtccctctaccctgctttggagtgccgggccctcattcagcagatgtccccctctgcctttggtctgaatgactgggatgatgatgagatcctagcttcggtgctggcagtgtcccaacaggaatacctagacagtatgaagaaaaacaaagtgcacagagacccgcccccagacaagagttgatggagacccagggattggacaccatctcccaaccccaggactcgggcaagggtgccgaagatagacaagaggcacacagagacagaccaactggcagccaggcagccccagaggagagagacattcagacagaggaaagtctccctgcccctcattccttccaagatgagaaaaacttgccgccaccccccgacactgatgccagggaggtgggaggaagaagtgggaaatttcccttcccagtacccccaagaacgtctgagccttcaatgttgaattttttctttattaaaattacttttatcttataaaatca

SEQ ID NO: 429386 - DNA, 420 bp, Homo sapiens
aagcgcacgatggcgcgtcctgaagagaaggaacggcatgtgtgaagatcctcaagcgaagcagagggagtgtgtttccttctcgccttagtttgaccaaatctcacgacgcctggactattcgggccacaggctgcccatcctgagttaagctaaactgaccaggtgtatggagaccaggacatgcatgaggttgtgcgaaagcattgcatggactatctgatgaagaatgccgactacttctccaactatgtcacagaggactttaccacctacattaacaggaagcggaaaaacaattgccatggcaaccacattgagatgcaggccatggcagagatgtacaaccgtcctgtggaggtgtaccagtacagcacagaacccatcaacacattccatgggacgcgccatcgtgcgctt

SEQ ID NO: 429387 - DNA, 424 bp, Homo sapiens
gcgagctcggtacccccccgactagcccgacagcattcagcagatgtccccctctgcctttggtctgaatgactgggatgatgatgagatcctagcttcggtgctggcagtgtcccaacaggaatacctagacagtatgaagaaaaacaaagtgcacagagacccgcccccagacaagagttgatggagacccagggattggacaccatctcccaaccccagtactcctgctctccggtgccacctcaccttctttggcttcttccctcttgcctccttctgttctttctgctctcccctcttttccctcctcctcacttccctctggctagcccacccctgcactctctctcattgccgctgccactatcatagtgcggcacaagtccgcatggggatcctgtacgagacgacatgcagcctg

SEQ ID NO: 429388 - DNA, 3444 bp, Homo sapiens
ttgatgttttccagtcattccggctgacagcgttcaagttggaatcctggaggggaggtgtttttcctgtcgtacgtgggacaggccacgctgtccgtccgcagtaccgacgcctgcaggtcagagcttcggggagaaaagtgaagagcaagacggaactgacggggagaaaggctgggaaccagggtgtcgactttgactgaaatttgagacggagggcaccggagggcgagcactcgcctgtgattggcccgtgggcgtcgtcgaggtcccacgcagctgctcaattggttggtgttgcaattgttgtggcggcggcggcggcgattttgcccacgtacttccgagtaaggggcggggctgtgccctggcgcgcgtgcgcagcgccccggggccccacccggtagtgcaagaacctgcgagggggcggagcgaagaggtgcttgttttggttctgtttcctttgaagcagaaggccggaacaagcgtagcaataaacttgctggacttggagagaaggctaagacaaactcgccgcactgccttcatcttggactttacatccgggttctcctctcggcgtgacccgcgcgccgccaccgccgccgccgccgccgccgccgcctccgccgccgagggttctcgaaccggtgccgcgatccctttatccgggtctcgccgttcccgtcgtgcctcgcgcactacactagccccctcatccgggttctctcccggcgtgccccgcgccgggtttgttggggggtactcggcagtgcagccatgactatactccccaaaaagaagccgccgcctcccgacgccgaccccgccaacgagccgccgccgcccgggccgatgcccccggcgccgcggcgcggcggaggtgtgggcgtgggcggcggcggcacgggcgtgggcggcggcgatcgcgaccgtgactccggcgtcgtgggggcccgtccgcgagcttcgccaccgcctcaaggcccgctaccaggaccgccgggcgctcttcatcgctgggcgctggccgtgccgcctggtgcagtggcgggtccccggccacaacaggcttctccacctccttgcgggggcccaggtggtcccggcggcggtcccggcgacgcgctgggcgcagcggcggcgggtgtgggtgccgcgggcgtggtggtgggtgtgggtggtgccgtaggcgtgggcggctgctgctccgggcctgggcacagcaagcggcgacgtcaagctcccggggttggcgcggttggcgggggcagtcccgagcgtgaggaggtcggcgcaggctacaacagtgaggacgagtatgaggcggctgcagcacgcatcgaggctatggaccctgccactgtcgagcagcaggagcattggtttgaaaaggccctacgagacaagaagggcttcatcatcaagcagatgaaggaggatggcgcctgtctcttccgggctgtagctgaccaggtgtatggagaccaggacatgcatgaggttgtgcgaaagcattgcatggactatctgatgaagaatgccgactacttctccaactatgtcacagaggactttaccacctacattaacaggaagcggaaaaacaattgccatggcaaccacattgagatgcaggccatggcagagatgtacaaccgtcctgtggaggtgtaccagtacagcacagaacccatcaacacattccatgggatacatcaaaacgaggacgaacccattcgtgttagctaccatcggaatatccactataattcagtggtgaatcctaacaaggccaccattggtgtggggctgggcctgccatcattcaaaccagggtttgcagagcagtctctgatgaagaatgccataaaaacatcggaggagtcatggattgaacagcagatgctagaagacaagaaacgggccacagactgggaggccacaaatgaagccatcgaggagcaggtggctcgggaatcctacctgcagtggttgcgggatcaggagaaacaggctcgccaggtccgaggccccagccagccccggaaagccagcgccacatgcagttcggccacagcagcagcctccagtggcctggaggagtggactagccggtccccgcggcagcggagttcagcctcgtcacctgagcaccctgagctgcatgctgaattgggcatgaagcccccttccccaggcactgttttagctcttgccaaacctccttcgccctgtgcgccaggtacaagcagtcagttctcggcaggggccgaccgggcaacttccccccttgtgtccctctaccctgctttggagtgccgggccctcattcagcagatgtccccctctgcctttggtctgaatgactgggatgatgatgagatcctagcttcggtgctggcagtgtcccaacaggaatacctagacagtatgaagaaaaacaaagtgcacagagacccgcccccagacaagagttgatggagacccagggattggacaccatctcccaaccccagtactcctgctctccggtgccacctcaccttctttggcttcttccctcttgcctccttctgttctttctgctctcccctcttttccctcctcctcacttccctctggctagcccacccctgcactctctctcattgccgctgccactatcacctgtctctctgccagctgatgtgccctgttgccccccaccccatcccgcacagaaccatccctgcattccacaggggactcgggcaagggtgccgaagatagacaagaggcacacagagacagaccaactggcagccaggcagccccagaggagagagacattcagacagaggaaagtctccctgcccctcattccttccaagatgagaaaaacttgccgccaccccccgacactgatgccagggaggtgggaggaagaagtgggaaatttcccttcccagtacccccaagaacgtctgagccttcaatgttgaattttttctttattaaaattacttttatcttataaaatcaactaatcaaaaatgatatagacgacagcactggctctgtgaaggtggcatctttctgggcaggcaggccatggggcatggaggagggtgcaaagatatgggttgctgtcttctggcctccagctgcatggaggccggcccagggtctagggtgtgcactgggcaagggcagggcggcaggtgtcaggccggcttggacaatgaaaccctgaccttgctgcattccttttgcttccaccaccactagcttctttggaatcttggggtgggggtcatctttggggattatggctgccacccgggatttgagtgtagggagtgtgggagcagccttggcagatggggcacccgtgccctgcaggtgttgacaagatccgccatctgtaatgtccttggcacaataaaaccaaatgtcagtttc

SEQ ID NO: 429389 - DNA, 3372 bp, Homo sapiens
ttgatgttttccagtcattccggctgacagcgttcaagttggaatcctggaggggaggtgtttttcctgtcgtacgtgggacaggccacgctgtccgtccgcagtaccgacgcctgcaggtcagagcttcggggagaaaagtgaagagcaagacggaactgacggggagaaaggctgggaaccagggtgtcgactttgactgaaatttgagacggagggcaccggagggcgagcactcgcctgtgattggcccgtgggcgtcgtcgaggtcccacgcagctgctcaattggttggtgttgcaattgttgtggcggcggcggcggcgattttgcccacgtacttccgagtaaggggcggggctgtgccctggcgcgcgtgcgcagcgccccggggccccacccggtagtgcaagaacctgcgagggggcggagcgaagaggtgcttgttttggttctgtttcctttgaagcagaaggccggaacaagcgtagcaataaacttgctggacttggagagaaggctaagacaaactcgccgcactgccttcatcttggactttacatccgggttctcctctcggcgtgacccgcgcgccgccaccgccgccgccgccgccgccgccgcctccgccgccgagggttctcgaaccggtgccgcgatccctttatccgggtctcgccgttcccgtcgtgcctcgcgcactacactagccccctcatccgggttctctcccggcgtgccccgcgccgggtttgttggggggtactcggcagtgcagccatgactatactccccaaaaagaagccgccgcctcccgacgccgaccccggcggcacgggcgtgggcggcggcgatcgcgaccgtgactccggcgtcgtgggggcccgtccgcgagcttcgccaccgcctcaaggcccgctaccaggaccgccgggcgctcttcatcgctgggcgctggccgtgccgcctggtgcagtggcgggtccccggccacaacaggcttctccacctccttgcgggggcccaggtggtcccggcggcggtcccggcgacgcgctgggcgcagcggcggcgggtgtgggtgccgcgggcgtggtggtgggtgtgggtggtgccgtaggcgtgggcggctgctgctccgggcctgggcacagcaagcggcgacgtcaagctcccggggttggcgcggttggcgggggcagtcccgagcgtgaggaggtcggcgcaggctacaacagtgaggacgagtatgaggcggctgcagcacgcatcgaggctatggaccctgccactgtcgagcagcaggagcattggtttgaaaaggccctacgagacaagaagggcttcatcatcaagcagatgaaggaggatggcgcctgtctcttccgggctgtagctgaccaggtgtatggagaccaggacatgcatgaggttgtgcgaaagcattgcatggactatctgatgaagaatgccgactacttctccaactatgtcacagaggactttaccacctacattaacaggaagcggaaaaacaattgccatggcaaccacattgagatgcaggccatggcagagatgtacaaccgtcctgtggaggtgtaccagtacagcacagaacccatcaacacattccatgggatacatcaaaacgaggacgaacccattcgtgttagctaccatcggaatatccactataattcagtggtgaatcctaacaaggccaccattggtgtggggctgggcctgccatcattcaaaccagggtttgcagagcagtctctgatgaagaatgccataaaaacatcggaggagtcatggattgaacagcagatgctagaagacaagaaacgggccacagactgggaggccacaaatgaagccatcgaggagcaggtggctcgggaatcctacctgcagtggttgcgggatcaggagaaacaggctcgccaggtccgaggccccagccagccccggaaagccagcgccacatgcagttcggccacagcagcagcctccagtggcctggaggagtggactagccggtccccgcggcagcggagttcagcctcgtcacctgagcaccctgagctgcatgctgaattgggcatgaagcccccttccccaggcactgttttagctcttgccaaacctccttcgccctgtgcgccaggtacaagcagtcagttctcggcaggggccgaccgggcaacttccccccttgtgtccctctaccctgctttggagtgccgggccctcattcagcagatgtccccctctgcctttggtctgaatgactgggatgatgatgagatcctagcttcggtgctggcagtgtcccaacaggaatacctagacagtatgaagaaaaacaaagtgcacagagacccgcccccagacaagagttgatggagacccagggattggacaccatctcccaaccccagtactcctgctctccggtgccacctcaccttctttggcttcttccctcttgcctccttctgttctttctgctctcccctcttttccctcctcctcacttccctctggctagcccacccctgcactctctctcattgccgctgccactatcacctgtctctctgccagctgatgtgccctgttgccccccaccccatcccgcacagaaccatccctgcattccacaggggactcgggcaagggtgccgaagatagacaagaggcacacagagacagaccaactggcagccaggcagccccagaggagagagacattcagacagaggaaagtctccctgcccctcattccttccaagatgagaaaaacttgccgccaccccccgacactgatgccagggaggtgggaggaagaagtgggaaatttcccttcccagtacccccaagaacgtctgagccttcaatgttgaattttttctttattaaaattacttttatcttataaaatcaactaatcaaaaatgatatagacgacagcactggctctgtgaaggtggcatctttctgggcaggcaggccatggggcatggaggagggtgcaaagatatgggttgctgtcttctggcctccagctgcatggaggccggcccagggtctagggtgtgcactgggcaagggcagggcggcaggtgtcaggccggcttggacaatgaaaccctgaccttgctgcattccttttgcttccaccaccactagcttctttggaatcttggggtgggggtcatctttggggattatggctgccacccgggatttgagtgtagggagtgtgggagcagccttggcagatggggcacccgtgccctgcaggtgttgacaagatccgccatctgtaatgtccttggcacaataaaaccaaatgtcagtttc

SEQ ID NO: 429390 - DNA, 3879 bp, Homo sapiens
  misc_feature (3878)..(3879): n is a, c, g, or t
ttgatgttttccagtcattccggctgacagcgttcaagttggaatcctggaggggaggtgtttttcctgtcgtacgtgggacaggccacgctgtccgtccgcagtaccgacgcctgcaggtcagagcttcggggagaaaagtgaagagcaagacggaactgacggggagaaaggctgggaaccagggtgtcgactttgactgaaatttgagacggagggcaccggagggcgagcactcgcctgtgattggcccgtgggcgtcgtcgaggtcccacgcagctgctcaattggttggtgttgcaattgttgtggcggcggcggcggcgattttgcccacgtacttccgagtaaggggcggggctgtgccctggcgcgcgtgcgcagcgccccggggccccacccggtagtgcaagaacctgcgagggggcggagcgaagaggtgcttgttttggttctgtttcctttgaagcagaaggccggaacaagcgtagcaataaacttgctggacttggagagaaggctaagacaaactcgccgcactgccttcatcttggactttacatccgggttctcctctcggcgtgacccgcgcgccgccaccgccgccgccgccgccgccgccgcctccgccgccgagggttctcgaaccggtgccgcgatccctttatccgggtctcgccgttcccgtcgtgcctcgcgcactacactagccccctcatccgggttctctcccggcgtgccccgcgccgggtttgttggggggtactcggcagtgcagccatgactatactccccaaaaagaagccgccgcctcccgacgccgaccccgccaacgagccgccgccgcccgggccgatgcccccggcgccgcggcgcggcggaggtgtgggcgtgggcggcggcggcacgggcgtgggcggcggcgatcgcgaccgtgactccggcgtcgtgggggcccgtccgcgagcttcgccaccgcctcaaggcccgctaccaggaccgccgggcgctcttcatcgctgggcgctggccgtgccgcctggtgcagtggcgggtccccggccacaacaggcttctccacctccttgcgggggcccaggtggtcccggcggcggtcccggcgacgcgctgggcgcagcggcggcgggtgtgggtgccgcgggcgtggtggtgggtgtgggtggtgccgtaggcgtgggcggctgctgctccgggcctgggcacagcaagcggcgacgtcaagctcccggggttggcgcggttggcgggggcagtcccgagcgtgaggaggtcggcgcaggctacaacagtgaggacgagtatgaggcggctgcagcacgcatcgaggctatggaccctgccactgtcgagcagcaggagcattggtttgaaaaggccctacgagacaagaagggcttcatcatcaagcagatgaaggaggatggcgcctgtctcttccgggctgtagctgaccaggtgtatggagaccaggacatgcatgaggttgtgcgaaagcattgcatggactatctgatgaagaatgccgactacttctccaactatgtcacagaggactttaccacctacattaacaggaagcggaaaaacaattgccatggcaaccacattgagatgcaggccatggcagagatgtacaaccgtcctgtggaggtgtaccagtacagcacagaacccatcaacacattccatgggatacatcaaaacgaggacgaacccattcgtgttagctaccatcggaatatccactataattcagtggtgaatcctaacaaggccaccattggtgtggggctgggcctgccatcattcaaaccagggtttgcagagcagtctctgatgaagaatgccataaaaacatcggaggagtcatggattgaacagcagatgctagaagacaagaaacgggccacagactgggaggccacaaatgaagccatcgaggagcaggtggctcgggaatcctacctgcagtggttgcgggatcaggagaaacaggctcgccaggtccgaggccccagccagccccggaaagccagcgccacatgcagttcggccacagcagcagcctccagtggcctggaggagtggactagccggtccccgcggcagcggagttcagcctcgtcacctgagcaccctgagctgcatgctgaattgggcatgaagcccccttccccaggcactgttttagctcttgccaaacctccttcgccctgtgcgccaggtacaagcagtcagttctcggcaggggccgaccgggcaacttccccccttgtgtccctctaccctgctttggagtgccgggccctcattcagcagatgtccccctctgcctttggtctgaatgactgggatgatgatgagatcctagcttcggtgctggcagtgtcccaacaggaatacctagacagtatgaagaaaaacaaagtgcacagagacccgcccccagacaagagttgatggagacccagggattggacaccatctcccaaccccagtactcctgctctccggtgccacctcaccttctttggcttcttccctcttgcctccttctgttctttctgctctcccctcttttccctcctcctcacttccctctggctagcccacccctgcactctctctcattgccgctgccactatcacctgtctctctgccagctgatgtgccctgttgccccccaccccatcccgcacagaaccatccctgcattccacaggggactcgggcaagggtgccgaagatagacaagaggcacacagagacagaccaactggcagccaggcagccccagaggagagagacattcagacagaggaaagtctccctgcccctcattccttccaagatgagaaaaacttgccgccaccccccgacactgatgccagggaggtgggaggaagaagtgggaaatttcccttcccagtacccccaagaacgtctgagccttcaatgttgaattttttctttattaaaattacttttatcttataaaatcaactaatcaaaaatgatatagacgacagcactggctctgtgaaggtggcatctttctgggcaggcaggccatggggcatggaggagggtgcaaagatatgggttgctgtcttctggcctccagctgcatggaggccggcccagggtctagggtgtgcactgggcaagggcagggcggcaggtgtcaggccggcttggacaatgaaaccctgaccttgctgcattccttttgcttccaccaccactagcttctttggaatcttggggtgggggtcatctttggggattatggctgccacccgggatttgagtgtagggagtgtgggagcagccttggcagatggggcacccgtgccctgcaggtgttgacaagatccgccatctgtaatgtccttggcacaataaaaccaaatgtcagtttcaaaaaacacaaaaaaaattcgaggcaccaacgcccgagagccgacagacacgccgccactgcaacctggccccggccctacgtcgccccggacccagctccccggcacacacgggccaaccccgccggtctccctcatagtgacccgcacaacccccaacaccaggtcaccggctacaaagcggcaacacacctccacacacccccgcccccccagcaccacgcgcgggcacccaccacaccacagaccgagcacgagaccgcacaacccgacaccaaacacccgacacaaccgagccgacagccagacgaaccacgccgacacccacgcagacagcaggaagacgaccacacacgcagaggtcgagggagacccacctgcagcgcacacccccgcacgagaagcgctacccgccccccccggcggaaacaatnn

SEQ ID NO: 429391 - DNA, 3024 bp, Homo sapiens
ttgatgttttccagtcattccggctgacagcgttcaagttggaatcctggaggggaggtgtttttcctgtcgtacgtgggacaggccacgctgtccgtccgcagtaccgacgcctgcaggtcagagcttcggggagaaaagtgaagagcaagacggaactgacggggagaaaggctgggaaccagggtgtcgactttgactgaaatttgagacggagggcaccggagggcgagcactcgcctgtgattggcccgtgggcgtcgtcgaggtcccacgcagctgctcaattggttggtgttgcaattgttgtggcggcggcggcggcgattttgcccacgtacttccgagtaaggggcggggctgtgccctggcgcgcgtgcgcagcgccccggggccccacccggtagtgcaagaacctgcgagggggcggagcgaagaggtgcttgttttggttctgtttcctttgaagcagaaggccggaacaagcgtagcaataaacttgctggacttggagagaaggctaagacaaactcgccgcactgccttcatcttggactttacatccgggttctcctctcggcgtgacccgcgcgccgccaccgccgccgccgccgccgccgccgcctccgccgccgagggttctcgaaccggtgccgcgatccctttatccgggtctcgccgttcccgtcgtgcctcgcgcactacactagccccctcatccgggttctctcccggcgtgccccgcgccgggtttgttggggggtactcggcagtgcagccatgactatactccccaaaaagaagccgccgcctcccgacgccgaccccgccaacgagccgccgccgcccgggccgatgcccccggcgccgcggcgcggcggaggtgtgggcgtgggcggcggcggcacgggcgtgggcggcggcgatcgcgaccgtgactccggcgtcgtgggggcccgtccgcgagcttcgccaccgcctcaaggcccgctaccaggaccgccgggcgctcttcatcgctgggcgctggccgtgccgcctggtgcagtggcgggtccccggccacaacaggcttctccacctccttgcgggggcccaggtggtcccggcggcggtcccggcgacgcgctgggcgcagcggcggcgggtgtgggtgccgcgggcgtggtggtgggtgtgggtggtgccgtaggcgtgggcggctgctgctccgggcctgggcacagcaagcggcgacgtcaagctcccggggttggcgcggttggcgggggcagtcccgagcgtgaggaggtcggcgcaggctacaacagtgaggacgagtatgaggcggctgcagcacgcatcgaggctatggaccctgccactgtcgagcagcaggagcattggtttgaaaaggccctacgagacaagaagggcttcatcatcaagcagatgaaggaggatggcgcctgtctcttccgggctgtagctgaccaggtgtatggagaccaggacatgcatgaggttgtgcgaaagcattgcatggactatctgatgaagaatgccgactacttctccaactatgtcacagaggactttaccacctacattaacaggaagcggaaaaacaattgccatggcaaccacattgagatgcaggccatggcagagatgtacaaccgtcctgtggaggtgtaccagtacagcacagaacccatcaacacattccatgggatacatcaaaacgaggacgaacccattcgtgttagctaccatcggaatatccactataattcagtggtgaatcctaacaaggccaccattggtgtggggctgggcctgccatcattcaaaccagggtttgcagagcagtctctgatgaagaatgccataaaaacatcggaggagtcatggattgaacagcagatgctagaagacaagaaacgggccacagactgggaggccacaaatgaagccatcgaggagcaggtggctcgggaatcctacctgcagtggttgcgggatcaggagaaacaggctcgccaggtccgaggccccagccagccccggaaagccagcgccacatgcagttcggccacagcagcagcctccagtggcctggaggagtggactagccggtccccgcggcagcggagttcagcctcgtcacctgagcaccctgagctgcatgctgaattgggcatgaagcccccttccccaggcactgttttagctcttgccaaacctccttcgccctgtgcgccaggtacaagcagtcagttctcggcaggggccgaccgggcaacttccccccttgtgtccctctaccctgctttggagtgccgggccctcattcagcagatgtccccctctgcctttggtctgaatgactgggatgatgatgagatcctagcttcggtgctggcagtgtcccaacaggaatacctagacagtatgaagaaaaacaaagtgcacagagacccgcccccagacaagagttgatggagacccagggattggacaccatctcccaaccccagtactcctgctctccggtgccacctcaccttctttggcttcttccctcttgcctccttctgttctttctgctctcccctcttttccctcctcctcacttccctctggctagcccacccctgcactctctctcattgccgctgccactatcacctgtctctctgccagctgatgtgccctgttgccccccaccccatcccgcacagaaccatccctgcattccacaggggactcgggcaagggtgccgaagatagacaagaggcacacagagacagaccaactggcagccaggcagccccagaggagagagacattcagacagaggaaagtctccctgcccctcattccttccaagatgagaaaaacttgccgccaccccccgacactgatgccagggaggtgggaggaagaagtgggaaatttcccttcccagtacccccaagaacgtctgagccttcaatgttgaattttttctttattaaaattacttttatcttataaaatca

SEQ ID NO: 429392 - DNA, 2189 bp, Homo sapiens
ttgatgttttccagtcattccggctgacagcgttcaagttggaatcctggaggggaggtgtttttcctgtcgtacgtgggacaggccacgctgtccgtccgcagtaccgacgcctgcagcaggagcattggtttgaaaaggccctacgagacaagaagggcttcatcatcaagcagatgaaggaggatggcgcctgtctcttccgggctgtagctgaccaggtgtatggagaccaggacatgcatgaggttgtgcgaaagcattgcatggactatctgatgaagaatgccgactacttctccaactatgtcacagaggactttaccacctacattaacaggaagcggaaaaacaattgccatggcaaccacattgagatgcaggccatggcagagatgtacaaccgtcctgtggaggtgtaccagtacagcacagaacccatcaacacattccatgggatacatcaaaacgaggacgaacccattcgtgttagctaccatcggaatatccactataattcagtggtgaatcctaacaaggccaccattggtgtggggctgggcctgccatcattcaaaccagggtttgcagagcagtctctgatgaagaatgccataaaaacatcggaggagtcatggattgaacagcagatgctagaagacaagaaacgggccacagactgggaggccacaaatgaagccatcgaggagcaggtggctcgggaatcctacctgcagtggttgcgggatcaggagaaacaggctcgccaggtccgaggccccagccagccccggaaagccagcgccacatgcagttcggccacagcagcagcctccagtggcctggaggagtggactagccggtccccgcggcagcggagttcagcctcgtcacctgagcaccctgagctgcatgctgaattgggcatgaagcccccttccccaggcactgttttagctcttgccaaacctccttcgccctgtgcgccaggtacaagcagtcagttctcggcaggggccgaccgggcaacttccccccttgtgtccctctaccctgctttggagtgccgggccctcattcagcagatgtccccctctgcctttggtctgaatgactgggatgatgatgagatcctagcttcggtgctggcagtgtcccaacaggaatacctagacagtatgaagaaaaacaaagtgcacagagacccgcccccagacaagagttgatggagacccagggattggacaccatctcccaaccccagtactcctgctctccggtgccacctcaccttctttggcttcttccctcttgcctccttctgttctttctgctctcccctcttttccctcctcctcacttccctctggctagcccacccctgcactctctctcattgccgctgccactatcacctgtctctctgccagctgatgtgccctgttgccccccaccccatcccgcacagaaccatccctgcattccacaggggactcgggcaagggtgccgaagatagacaagaggcacacagagacagaccaactggcagccaggcagccccagaggagagagacattcagacagaggaaagtctccctgcccctcattccttccaagatgagaaaaacttgccgccaccccccgacactgatgccagggaggtgggaggaagaagtgggaaatttcccttcccagtacccccaagaacgtctgagccttcaatgttgaattttttctttattaaaattacttttatcttataaaatcaactaatcaaaaatgatatagacgacagcactggctctgtgaaggtggcatctttctgggcaggcaggccatggggcatggaggagggtgcaaagatatgggttgctgtcttctggcctccagctgcatggaggccggcccagggtctagggtgtgcactgggcaagggcagggcggcaggtgtcaggccggcttggacaatgaaaccctgaccttgctgcattccttttgcttccaccaccactagcttctttggaatcttggggtgggggtcatctttggggattatggctgccacccgggatttgagtgtagggagtgtgggagcagccttggcagatggggcacccgtgccctgcaggtgttgacaagatccgccatctgtaatgtccttggcacaataaaaccaaatgtcagtttc

SEQ ID NO: 429393 - DNA, 2251 bp, Homo sapiens
gagagatggggatagttatgactgaggttttctcggtgatgaggtttatgtgttatttgtggtgatgagccccttgtgtgtggtacatatgtagagggagtatagggctgtgactagtatgtttgagtcctgtaagtaggagagtgatattagatcaggagaacgtggttactagcacagagagttctcccagtaggttaatattggggggtaaggcgaggttagcgaggcttgctagaagtcatcaaaaagctattagtgggagtagagtctgaagtccttggaagaaagtccattggacatgcatgaggttgtgcgaaagcattgcatggactatctgatgaagaatgccgactacttctccaactatgtcacagaggactttaccacctacattaacaggaagcggaaaaacaattgccatggcaaccacattgagatgcaggccatggcagagatgtacaaccgtcctgtggaggtgtaccagtacagcacagaacccatcaacacattccatgggatacatcaaaacgaggacgaacccattcgtgttagctaccatcggaatatccactataattcagtggtgaatcctaacaaggccaccattggtgtggggctgggcctgccatcattcaaaccagggtttgcagagcagtctctgatgaagaatgccataaaaacatcggaggagtcatggattgaacagcagatgctagaagacaagaaacgggccacagactgggaggccacaaatgaagccatcgaggagcaggtggctcgggaatcctacctgcagtggttgcgggatcaggagaaacaggctcgccaggtccgaggccccagccagccccggaaagccagcgccacatgcagttcggccacagcagcagcctccagtggcctggaggagtggactagccggtccccgcggcagcggagttcagcctcgtcacctgagcaccctgagctgcatgctgaattgggcatgaagcccccttccccaggcactgttttagctcttgccaaacctccttcgccctgtgcgccaggtacaagcagtcagttctcggcaggggccgaccgggcaacttccccccttgtgtccctctaccctgctttggagtgccgggccctcattcagcagatgtccccctctgcctttggtctgaatgactgggatgatgatgagatcctagcttcggtgctggcagtgtcccaacaggaatacctagacagtatgaagaaaaacaaagtgcacagagacccgcccccagacaagagttgatggagacccagggattggacaccatctcccaaccccagtactcctgctctccggtgccacctcaccttctttggcttcttccctcttgcctccttctgttctttctgctctcccctcttttccctcctcctcacttccctctggctagcccacccctgcactctctctcattgccgctgccactatcacctgtctctctgccagctgatgtgccctgttgccccccaccccatcccgcacagaaccatccctgcattccacaggggactcgggcaagggtgccgaagatagacaagaggcacacagagacagaccaactggcagccaggcagccccagaggagagagacattcagacagaggaaagtctccctgcccctcattccttccaagatgagaaaaacttgccgccaccccccgacactgatgccagggaggtgggaggaagaagtgggaaatttcccttcccagtacccccaagaacgtctgagccttcaatgttgaattttttctttattaaaattacttttatcttataaaatcaactaatcaaaaatgatatagacgacagcactggctctgtgaaggtggcatctttctgggcaggcaggccatggggcatggaggagggtgcaaagatatgggttgctgtcttctggcctccagctgcatggaggccggcccagggtctagggtgtgcactgggcaagggcagggcggcaggtgtcaggccggcttggacaatgaaaccctgaccttgctgcattccttttgcttccaccaccactagcttctttggaatcttggggtgggggtcatctttggggattatggctgccacccgggatttgagtgtagggagtgtgggagcagccttggcagatggggcacccgtgccctgcaggtgttgacaagatccgccatctgtaatgtccttggcacaataaaaccaaatgtcagtttc

SEQ ID NO: 429394 - DNA, 2133 bp, Homo sapiens
aagcgcacgatggcgcgtcctgaagagaaggaacggcatgtgtgaagatcctcaagcgaagcagagggagtgtgtttccttctcgccttagtttgaccaaatctcacgacgcctggactattcgggccacaggctgcccatcctgagttaagctaaactgaccaggtgtatggagaccaggacatgcatgaggttgtgcgaaagcattgcatggactatctgatgaagaatgccgactacttctccaactatgtcacagaggactttaccacctacattaacaggaagcggaaaaacaattgccatggcaaccacattgagatgcaggccatggcagagatgtacaaccgtcctgtggaggtgtaccagtacagcacagaacccatcaacacattccatgggatacatcaaaacgaggacgaacccattcgtgttagctaccatcggaatatccactataattcagtggtgaatcctaacaaggccaccattggtgtggggctgggcctgccatcattcaaaccagggtttgcagagcagtctctgatgaagaatgccataaaaacatcggaggagtcatggattgaacagcagatgctagaagacaagaaacgggccacagactgggaggccacaaatgaagccatcgaggagcaggtggctcgggaatcctacctgcagtggttgcgggatcaggagaaacaggctcgccaggtccgaggccccagccagccccggaaagccagcgccacatgcagttcggccacagcagcagcctccagtggcctggaggagtggactagccggtccccgcggcagcggagttcagcctcgtcacctgagcaccctgagctgcatgctgaattgggcatgaagcccccttccccaggcactgttttagctcttgccaaacctccttcgccctgtgcgccaggtacaagcagtcagttctcggcaggggccgaccgggcaacttccccccttgtgtccctctaccctgctttggagtgccgggccctcattcagcagatgtccccctctgcctttggtctgaatgactgggatgatgatgagatcctagcttcggtgctggcagtgtcccaacaggaatacctagacagtatgaagaaaaacaaagtgcacagagacccgcccccagacaagagttgatggagacccagggattggacaccatctcccaaccccagtactcctgctctccggtgccacctcaccttctttggcttcttccctcttgcctccttctgttctttctgctctcccctcttttccctcctcctcacttccctctggctagcccacccctgcactctctctcattgccgctgccactatcacctgtctctctgccagctgatgtgccctgttgccccccaccccatcccgcacagaaccatccctgcattccacaggggactcgggcaagggtgccgaagatagacaagaggcacacagagacagaccaactggcagccaggcagccccagaggagagagacattcagacagaggaaagtctccctgcccctcattccttccaagatgagaaaaacttgccgccaccccccgacactgatgccagggaggtgggaggaagaagtgggaaatttcccttcccagtacccccaagaacgtctgagccttcaatgttgaattttttctttattaaaattacttttatcttataaaatcaactaatcaaaaatgatatagacgacagcactggctctgtgaaggtggcatctttctgggcaggcaggccatggggcatggaggagggtgcaaagatatgggttgctgtcttctggcctccagctgcatggaggccggcccagggtctagggtgtgcactgggcaagggcagggcggcaggtgtcaggccggcttggacaatgaaaccctgaccttgctgcattccttttgcttccaccaccactagcttctttggaatcttggggtgggggtcatctttggggattatggctgccacccgggatttgagtgtagggagtgtgggagcagccttggcagatggggcacccgtgccctgcaggtgttgacaagatccgccatctgtaatgtccttggcacaataaaaccaaatgtcagtttc

SEQ ID NO: 429395 - DNA, 3633 bp, Homo sapiens
ttgatgttttccagtcattccggctgacagcgttcaagttggaatcctggaggggaggtgtttttcctgtcgtacgtgggacaggccacgctgtccgtccgcagtaccgacgcctgcaggtcagagcttcggggagaaaagtgaagagcaagacggaactgacggggagaaaggctgggaaccagggtgtcgactttgactgaaatttgagacggagggcaccggagggcgagcactcgcctgtgattggcccgtgggcgtcgtcgaggtcccacgcagctgctcaattggttggtgttgcaattgttgtggcggcggcggcggcgattttgcccacgtacttccgagtaaggggcggggctgtgccctggcgcgcgtgcgcagcgccccggggccccacccggtagtgcaagaacctgcgagggggcggagcgaagaggtgcttgttttggttctgtttcctttgaagcagaaggccggaacaagcgtagcaataaacttgctggacttggagagaaggctaagacaaactcgccgcactgccttcatcttggactttacatccgggttctcctctcggcgtgacccgcgcgccgccaccgccgccgccgccgccgccgccgcctccgccgccgagggttctcgaaccggtgccgcgatccctttatccgggtctcgccgttcccgtcgtgcctcgcgcactacactagccccctcatccgggttctctcccggcgtgccccgcgccgggtttgttggggggtactcggcagtgcagccatgactatactccccaaaaagaagccgccgcctcccgacgccgaccccgccaacgagccgccgccgcccgggccgatgcccccggcgccgcggcgcggcggaggtgtgggcgtgggcggcggcggcacgggcgtgggcggcggcgatcgcgaccgtgactccggcgtcgtgggggcccgtccgcgagcttcgccaccgcctcaaggcccgctaccaggaccgccgggcgctcttcatcgctgggcgctggccgtgccgcctggtgcagtggcgggtccccggccacaacaggcttctccacctccttgcgggggcccaggtggtcccggcggcggtcccggcgacgcgctgggcgcagcggcggcgggtgtgggtgccgcgggcgtggtggtgggtgtgggtggtgccgtaggcgtgggcggctgctgctccgggcctgggcacagcaagcggcgacgtcaagctcccggggttggcgcggttggcgggggcagtcccgagcgtgaggaggtcggcgcaggctacaacagtgaggacgagtatgaggcggctgcagcacgcatcgaggctatggaccctgccactgtcgagcagcaggagcattggtttgaaaaggccctacgagacaagaagggcttcatcatcaagcagatgaaggaggatggcgcctgtctcttccgggctgtagctgaccaggtgtatggagaccaggacatgcatgaggttgtgcgaaagcattgcatggactatctgatgaagaatgccgactacttctccaactatgtcacagaggactttaccacctacattaacaggaagcggaaaaacaattgccatggcaaccacattgagatgcaggccatggcagagatgtacaaccgtcctgtggaggtgtaccagtacagcacagaacccatcaacacattccatgggatacatcaaaacgaggacgaacccattcgtgttagctaccatcggaatatccactataattcagtggtgaatcctaacaaggccaccattggtgtggggctgggcctgccatcattcaaaccagggtttgcagagcagtctctgatgaagaatgccataaaaacatcggaggagtcatggattgaacagcagatgctagaagacaagaaacgggccacagactgggaggccacaaatgaagccatcgaggagcaggtggctcgggaatcctacctgcagtggttgcgggatcaggagaaacaggctcgccaggtccgaggccccagccagccccggaaagccagcgccacatgcagttcggccacagcagcagcctccagtggcctggaggagtggactagccggtccccgcggcagcggagttcagcctcgtcacctgagcaccctgagctgcatgctgaattgggcatgaagcccccttccccaggcactgttttagctcttgccaaacctccttcgccctgtgcgccaggtacaagcagtcagttctcggcaggggccgaccgggcaacttccccccttgtgtccctctaccctgctttggagtgccgggccctcattcagcagatgtccccctctgcctttggtctgaatgactgggatgatgatgagatcctagcttcggtgctggcagtgtcccaacaggaatacctagacagtatgaagaaaaacaaagtgcacagagacccgcccccagacaagagttgatggagacccagggattggacaccatctcccaaccccagtactcctgctctccggtgccacctcaccttctttggcttcttccctcttgcctccttctgttctttctgctctcccctcttttccctcctcctcacttccctctggctagcccacccctgcactctctctcattgccgctgccactatcacctgtctctctgccagctgatgtgccctgttgccccccaccccatcccgcacagaaccatccctgcattccacaggggactcgggcaagggtgccgaagatagacaagaggcacacagagacagaccaactggcagccaggcagccccagaggagagagacattcagacagaggaaagtctccctgcccctcattccttccaagatgagaaaaacttgccgccaccccccgacactgatgccagggaggtgggaggaagaagtgggaaatttcccttcccagtacccccaagaacgtctgagccttcaatgttgaattttttctttattaaaattacttttatcttataaaatcaactaatcaaaaatgatatagacgacagcactggctctgtgaaggtggcatctttctgggcaggcaggccatggggcatggaggagggtgcaaagatatgggttgctgtcttctggcctccagctgcatggaggccggcccagggtctagggtgtgcactgggcaagggcagggcggcaggtgtcaggccggcttggacaatgaaaccctgaccttgctgcattccttttgcttccaccaccactagcttctttggaatcttggggtgggggtcatctttggggattatggctgccacccgggatttgagtgtagggagtgtgggagcagccttggcagatggggcacccgtgccctgcaggtgttgacaagatccgccatctgtaatgtccttggcacaataaaaccaaatgtcagtttctttccctgagcgactctgttctgtgtggggcaggggttgggcgggcctctgggcagaggatgcaatggcacggaccttggcttgacctcagaggtgtgaatgctctccagcagggtctgtctgggggcctggagtttgtatttgatttgctgcttattaaacctccttctggacctattgccactggaa

SEQ ID NO: 429396 - DNA, 3520 bp, Homo sapiens
ttgatgttttccagtcattccggctgacagcgttcaagttggaatcctggaggggaggtgtttttcctgtcgtacgtgggacaggccacgctgtccgtccgcagtaccgacgcctgcaggtcagagcttcggggagaaaagtgaagagcaagacggaactgacggggagaaaggctgggaaccagggtgtcgactttgactgaaatttgagacggagggcaccggagggcgagcactcgcctgtgattggcccgtgggcgtcgtcgaggtcccacgcagctgctcaattggttggtgttgcaattgttgtggcggcggcggcggcgattttgcccacgtacttccgagtaaggggcggggctgtgccctggcgcgcgtgcgcagcgccccggggccccacccggtagtgcaagaacctgcgagggggcggagcgaagaggtgcttgttttggttctgtttcctttgaagcagaaggccggaacaagcgtagcaataaacttgctggacttggagagaaggctaagacaaactcgccgcactgccttcatcttggactttacatccgggttctcctctcggcgtgacccgcgcgccgccaccgccgccgccgccgccgccgccgcctccgccgccgagggttctcgaaccggtgccgcgatccctttatccgggtctcgccgttcccgtcgtgcctcgcgcactacactagccccctcatccgggttctctcccggcgtgccccgcgccgggtttgttggggggtactcggcagtgcagccatgactatactccccaaaaagaagccgccgcctcccgacgccgaccccgccaacgagccgccgccgcccgggccgatgcccccggcgccgcggcgcggcggaggtgtgggcgtgggcggcggcggcacgggcgtgggcggcggcgatcgcgaccgtgactccggcgtcgtgggggcccgtccgcgagcttcgccaccgcctcaaggcccgctaccaggaccgccgggcgctcttcatcgctgggcgctggccgtgccgcctggtgcagtggcgggtccccggccacaacaggcttctccacctccttgcgggggcccaggtggtcccggcggcggtcccggcgacgcgctgggcgcagcggcggcgggtgtgggtgccgcgggcgtggtggtgggtgtgggtggtgccgtaggcgtgggcggctgctgctccgggcctgggcacagcaagcggcgacgtcaagctcccggggttggcgcggttggcgggggcagtcccgagcgtgaggaggtcggcgcaggctacaacagtgaggacgagtatgaggcggctgcagcacgcatcgaggctatggaccctgccactgtcgagcagcaggagcattggtttgaaaaggccctacgagacaagaagggcttcatcatcaagcagatgaaggaggatggcgcctgtctcttccgggctgtagctgaccaggtgtatggagaccaggacatgcatgaggttgtgcgaaagcattgcatggactatctgatgaagaatgccgactacttctccaactatgtcacagaggactttaccacctacattaacaggaagcggaaaaacaattgccatggcaaccacattgagatgcaggccatggcagagatgtacaaccgtcctgtggaggtgtaccagtacagcacagaacccatcaacacattccatgggatacatcaaaacgaggacgaacccattcgtgttagctaccatcggaatatccactataattcagtggtgaatcctaacaaggccaccattggtgtggggctgggcctgccatcattcaaaccagggtttgcagagcagtctctgatgaagaatgccataaaaacatcggaggagtcatggattgaacagcagatgctagaagacaagaaacgggccacagactgggaggccacaaatgaagccatcgaggagcaggtggctcgggaatcctacctgcagtggttgcgggatcaggagaaacaggctcgccaggtccgaggccccagccagccccggaaagccagcgccacatgcagttcggccacagcagcagcctccagtggcctggaggagtggactagccggtccccgcggcagcggagttcagcctcgtcacctgagcaccctgagctgcatgctgaattgggcatgaagcccccttccccaggcactgttttagctcttgccaaacctccttcgccctgtgcgccaggtacaagcagtcagttctcggcaggggccgaccgggcaacttccccccttgtgtccctctaccctgctttggagtgccgggccctcattcagcagatgtccccctctgcctttggtctgaatgactgggatgatgatgagatcctagcttcggtgctggcagtgtcccaacaggaatacctagacagtatgaagaaaaacaaagtgcacagagacccgcccccagacaagagttgatggagacccagggattggacaccatctcccaaccccagtactcctgctctccggtgccacctcaccttctttggcttcttccctcttgcctccttctgttctttctgctctcccctcttttccctcctcctcacttccctctggctagcccacccctgcactctctctcattgccgctgccactatcacctgtctctctgccagctgatgtgccctgttgccccccaccccatcccgcacagaaccatccctgcattccacaggggactcgggcaagggtgccgaagatagacaagaggcacacagagacagaccaactggcagccaggcagccccagaggagagagacattcagacagaggaaagtctccctgcccctcattccttccaagatgagaaaaacttgccgccaccccccgacactgatgccagggaggtgggaggaagaagtgggaaatttcccttcccagtacccccaagaacgtctgagccttcaatgttgaattttttctttattaaaattacttttatcttataaaatcaactaatcaaaaatgatatagacgacagcactggctctgtgaaggtggcatctttctgggcaggcaggccatggggcatggaggagggtgcaaagatatgggttgctgtcttctggcctccagctgcatggaggccggcccagggtctagggtgtgcactgggcaagggcagggcggcaggtgtcaggccggcttggacaatgaaaccctgaccttgctgcattccttttgcttccaccaccactagcttctttggaatcttggggtgggggtcatctttggggattatggctgccacccgggatttgagtgtagggagtgtgggagcagccttggcagatggggcacccgtgccctgcaggtgttgacaagatccgcgacatccggggacgtgcggcccagtacttttggccctccttgcagttcggttctcctcccttctcccaagctcctacatggtgtagactagaatgtggtcctcaatacagaataaagac

SEQ ID NO: 429397 - DNA, 3286 bp, Homo sapiens
  misc_feature (3108)..(3108): n is a, c, g, or t
  misc_feature (3112)..(3112): n is a, c, g, or t
  misc_feature (3115)..(3115): n is a, c, g, or t
  misc_feature (3123)..(3123): n is a, c, g, or t
  misc_feature (3127)..(3127): n is a, c, g, or t
  misc_feature (3132)..(3132): n is a, c, g, or t
  misc_feature (3136)..(3136): n is a, c, g, or t
ttgatgttttccagtcattccggctgacagcgttcaagttggaatcctggaggggaggtgtttttcctgtcgtacgtgggacaggccacgctgtccgtccgcagtaccgacgcctgcaggtcagagcttcggggagaaaagtgaagagcaagacggaactgacggggagaaaggctgggaaccagggtgtcgactttgactgaaatttgagacggagggcaccggagggcgagcactcgcctgtgattggcccgtgggcgtcgtcgaggtcccacgcagctgctcaattggttggtgttgcaattgttgtggcggcggcggcggcgattttgcccacgtacttccgagtaaggggcggggctgtgccctggcgcgcgtgcgcagcgccccggggccccacccggtagtgcaagaacctgcgagggggcggagcgaagaggtgcttgttttggttctgtttcctttgaagcagaaggccggaacaagcgtagcaataaacttgctggacttggagagaaggctaagacaaactcgccgcactgccttcatcttggactttacatccgggttctcctctcggcgtgacccgcgcgccgccaccgccgccgccgccgccgccgccgcctccgccgccgagggttctcgaaccggtgccgcgatccctttatccgggtctcgccgttcccgtcgtgcctcgcgcactacactagccccctcatccgggttctctcccggcgtgccccgcgccgggtttgttggggggtactcggcagtgcagccatgactatactccccaaaaagaagccgccgcctcccgacgccgaccccgccaacgagccgccgccgcccgggccgatgcccccggcgccgcggcgcggcggaggtgtgggcgtgggcggcggcggcacgggcgtgggcggcggcgatcgcgaccgtgactccggcgtcgtgggggcccgtccgcgagcttcgccaccgcctcaaggcccgctaccaggaccgccgggcgctcttcatcgctgggcgctggccgtgccgcctggtgcagtggcgggtccccggccacaacaggcttctccacctccttgcgggggcccaggtggtcccggcggcggtcccggcgacgcgctgggcgcagcggcggcgggtgtgggtgccgcgggcgtggtggtgggtgtgggtggtgccgtaggcgtgggcggctgctgctccgggcctgggcacagcaagcggcgacgtcaagctcccggggttggcgcggttggcgggggcagtcccgagcgtgaggaggtcggcgcaggctacaacagtgaggacgagtatgaggcggctgcagcacgcatcgaggctatggaccctgccactgtcgagcagcaggagcattggtttgaaaaggccctacgagacaagaagggcttcatcatcaagcagatgaaggaggatggcgcctgtctcttccgggctgtagctgaccaggtgtatggagaccaggacatgcatgaggttgtgcgaaagcattgcatggactatctgatgaagaatgccgactacttctccaactatgtcacagaggactttaccacctacattaacaggaagcggaaaaacaattgccatggcaaccacattgagatgcaggccatggcagagatgtacaaccgtcctgtggaggtgtaccagtacagcacagaacccatcaacacattccatgggatacatcaaaacgaggacgaacccattcgtgttagctaccatcggaatatccactataattcagtggtgaatcctaacaaggccaccattggtgtggggctgggcctgccatcattcaaaccagggtttgcagagcagtctctgatgaagaatgccataaaaacatcggaggagtcatggattgaacagcagatgctagaagacaagaaacgggccacagactgggaggccacaaatgaagccatcgaggagcaggtggctcgggaatcctacctgcagtggttgcgggatcaggagaaacaggctcgccaggtccgaggccccagccagccccggaaagccagcgccacatgcagttcggccacagcagcagcctccagtggcctggaggagtggactagccggtccccgcggcagcggagttcagcctcgtcacctgagcaccctgagctgcatgctgaattgggcatgaagcccccttccccaggcactgttttagctcttgccaaacctccttcgccctgtgcgccaggtacaagcagtcagttctcggcaggggccgaccgggcaacttccccccttgtgtccctctaccctgctttggagtgccgggccctcattcagcagatgtccccctctgcctttggtctgaatgactgggatgatgatgagatcctagcttcggtgctggcagtgtcccaacaggaatacctagacagtatgaagaaaaacaaagtgcacagagacccgcccccagacaagagttgatggagacccagggattggacaccatctcccaaccccagtactcctgctctccggtgccacctcaccttctttggcttcttccctcttgcctccttctgttctttctgctctcccctcttttccctcctcctcacttccctctggctagcccacccctgcactctctctcattgccgctgccactatcacctgtctctctgccagctgatgtgccctgttgccccccaccccatcccgcacagaaccatccctgcattccacaggggactcgggcaagggtgccgaagatagacaagaggcacacagagacagaccaactggcagccaggcagccccagaggagagagacattcagacagaggaaagtctccctgcccctcattccttccaagatgagaaaaacttgccgccaccccccgacactgatgccagggaggtgggaggaagaagtgggaaatttcccttcccagtacccccaagaacgtctgagccttcaatgttgaattttttctttattaaaattacttttatcttataaaatcaactaatcaaaaatgatatagacgacagcactggctctgtgaaggtggcatctttctgggcaggcaggccatggggcatggaggnacgnttnggtgcgtntggncaggntggngcggcagttaggggctggcaggcgggagttgagcggtggaagaaccgactgggtctggtcacccaagttggatggggggctgggatggccgaattggagggactaggccgggggcacgggtggaaatgtaaaaattggggcttctcgcta

SEQ ID NO: 429398 - DNA, 3012 bp, Homo sapiens
ttgatgttttccagtcattccggctgacagcgttcaagttggaatcctggaggggaggtgtttttcctgtcgtacgtgggacaggccacgctgtccgtccgcagtaccgacgcctgcaggtcagagcttcggggagaaaagtgaagagcaagacggaactgacggggagaaaggctgggaaccagggtgtcgactttgactgaaatttgagacggagggcaccggagggcgagcactcgcctgtgattggcccgtgggcgtcgtcgaggtcccacgcagctgctcaattggttggtgttgcaattgttgtggcggcggcggcggcgattttgcccacgtacttccgagtaaggggcggggctgtgccctggcgcgcgtgcgcagcgccccggggccccacccggtagtgcaagaacctgcgagggggcggagcgaagaggtgcttgttttggttctgtttcctttgaagcagaaggccggaacaagcgtagcaataaacttgctggacttggagagaaggctaagacaaactcgccgcactgccttcatcttggactttacatccgggttctcctctcggcgtgacccgcgcgccgccaccgccgccgccgccgccgccgccgcctccgccgccgagggttctcgaaccggtgccgcgatccctttatccgggtctcgccgttcccgtcgtgcctcgcgcactacactagccccctcatccgggttctctcccggcgtgccccgcgccgggtttgttggggggtactcggcagtgcagccatgactatactccccaaaaagaagccgccgcctcccgacgccgaccccgccaacgagccgccgccgcccgggccgatgcccccggcgccgcggcgcggcggaggtgtgggcgtgggcggcggcggcacgggcgtgggcggcggcgatcgcgaccgtgactccggcgtcgtgggggcccgtccgcgagcttcgccaccgcctcaaggcccgctaccaggaccgccgggcgctcttcatcgctgggcgctggccgtgccgcctggtgcagtggcgggtccccggccacaacaggcttctccacctccttgcgggggcccaggtggtcccggcggcggtcccggcgacgcgctgggcgcagcggcggcgggtgtgggtgccgcgggcgtggtggtgggtgtgggtggtgccgtaggcgtgggcggctgctgctccgggcctgggcacagcaagcggcgacgtcaagctcccggggttggcgcggttggcgggggcagtcccgagcgtgaggaggtcggcgcaggctacaacagtgaggacgagtatgaggcggctgcagcacgcatcgaggctatggaccctgccactgtcgagcagcaggagcattggtttgaaaaggccctacgagacaagaagggcttcatcatcaagcagatgaaggaggatggcgcctgtctcttccgggctgtagctgaccaggtgtatggagaccaggacatgcatgaggttgtgcgaaagcattgcatggactatctgatgaagaatgccgactacttctccaactatgtcacagaggactttaccacctacattaacaggaagcggaaaaacaattgccatggcaaccacattgagatgcaggccatggcagagatgtacaaccgtcctgtggaggtgtaccagtacagcacagaacccatcaacacattccatgggatacatcaaaacgaggacgaacccattcgtgttagctaccatcggaatatccactataattcagtggtgaatcctaacaaggccaccattggtgtggggctgggcctgccatcattcaaaccagggtttgcagagcagtctctgatgaagaatgccataaaaacatcggaggagtcatggattgaacagcagatgctagaagacaagaaacgggccacagactgggaggccacaaatgaagccatcgaggagcaggtggctcgggaatcctacctgcagtggttgcgggatcaggagaaacaggctcgccaggtccgaggccccagccagccccggaaagccagcgccacatgcagttcggccacagcagcagcctccagtggcctggaggagtggactagccggtccccgcggcagcggagttcagcctcgtcacctgagcaccctgagctgcatgctgaattgggcatgaagcccccttccccaggcactgttttagctcttgccaaacctccttcgccctgtgcgccaggtacaagcagtcagttctcggcaggggccgaccgggcaacttccccccttgtgtccctctaccctgctttggagtgccgggccctcattcagcagatgtccccctctgcctttggtctgaatgactgggatgatgatgagatcctagcttcggtgctggcagtgtcccaacaggaatacctagacagtatgaagaaaaacaaagtgcacagagacccgcccccagacaagagttgatggagacccagggattggacaccatctcccaaccccagtactcctgctctccggtgccacctcaccttctttggcttcttccctcttgcctccttctgttctttctgctctcccctcttttccctcctcctcacttccctctggctagcccacccctgcactctctctcattgccgctgccactatcacctgtctctctgccagctgatgtgccctgttgccccccaccccatcccgcacagaaccatccctgcattccacaggggactcgggcaagggtgccgaagatagacaagaggcacacagagacagaccaactggcagccaggcagccccagaggagagagacattcagacagaggaaagtctccctgcccctcattccttccaagatgagaaaaacttgccgccaccccccgacactttgcatccagagacactttgcatccagaggacactttgcatccagaggacactttgcatccagagacactttgcatccagagacacttgcatccggtatcctctaga

SEQ ID NO: 429399 - DNA, 3217 bp, Homo sapiens
ttgatgttttccagtcattccggctgacagcgttcaagttggaatcctggaggggaggtgtttttcctgtcgtacgtgggacaggccacgctgtccgtccgcagtaccgacgcctgcaggtcagagcttcggggagaaaagtgaagagcaagacggaactgacggggagaaaggctgggaaccagggtgtcgactttgactgaaatttgagacggagggcaccggagggcgagcactcgcctgtgattggcccgtgggcgtcgtcgaggtcccacgcagctgctcaattggttggtgttgcaattgttgtggcggcggcggcggcgattttgcccacgtacttccgagtaaggggcggggctgtgccctggcgcgcgtgcgcagcgccccggggccccacccggtagtgcaagaacctgcgagggggcggagcgaagaggtgcttgttttggttctgtttcctttgaagcagaaggccggaacaagcgtagcaataaacttgctggacttggagagaaggctaagacaaactcgccgcactgccttcatcttggactttacatccgggttctcctctcggcgtgacccgcgcgccgccaccgccgccgccgccgccgccgccgcctccgccgccgagggttctcgaaccggtgccgcgatccctttatccgggtctcgccgttcccgtcgtgcctcgcgcactacactagccccctcatccgggttctctcccggcgtgccccgcgccgggtttgttggggggtactcggcagtgcagccatgactatactccccaaaaagaagccgccgcctcccgacgccgaccccgccaacgagccgccgccgcccgggccgatgcccccggcgccgcggcgcggcggaggtgtgggcgtgggcggcggcggcacgggcgtgggcggcggcgatcgcgaccgtgactccggcgtcgtgggggcccgtccgcgagcttcgccaccgcctcaaggcccgctaccaggaccgccgggcgctcttcatcgctgggcgctggccgtgccgcctggtgcagtggcgggtccccggccacaacaggcttctccacctccttgcgggggcccaggtggtcccggcggcggtcccggcgacgcgctgggcgcagcggcggcgggtgtgggtgccgcgggcgtggtggtgggtgtgggtggtgccgtaggcgtgggcggctgctgctccgggcctgggcacagcaagcggcgacgtcaagctcccggggttggcgcggttggcgggggcagtcccgagcgtgaggaggtcggcgcaggctacaacagtgaggacgagtatgaggcggctgcagcacgcatcgaggctatggaccctgccactgtcgagcagcaggagcattggtttgaaaaggccctacgagacaagaagggcttcatcatcaagcagatgaaggaggatggcgcctgtctcttccgggctgtagctgaccaggtgtatggagaccaggacatgcatgaggttgtgcgaaagcattgcatggactatctgatgaagaatgccgactacttctccaactatgtcacagaggactttaccacctacattaacaggaagcggaaaaacaattgccatggcaaccacattgagatgcaggccatggcagagatgtacaaccgtcctgtggaggtgtaccagtacagcacagaacccatcaacacattccatgggatacatcaaaacgaggacgaacccattcgtgttagctaccatcggaatatccactataattcagtggtgaatcctaacaaggccaccattggtgtggggctgggcctgccatcattcaaaccagggtttgcagagcagtctctgatgaagaatgccataaaaacatcggaggagtcatggattgaacagcagatgctagaagacaagaaacgggccacagactgggaggccacaaatgaagccatcgaggagcaggtggctcgggaatcctacctgcagtggttgcgggatcaggagaaacaggctcgccaggtccgaggccccagccagccccggaaagccagcgccacatgcagttcggccacagcagcagcctccagtggcctggaggagtggactagccggtccccgcggcagcggagttcagcctcgtcacctgagcaccctgagctgcatgctgaattgggcatgaagcccccttccccaggcactgttttagctcttgccaaacctccttcgccctgtgcgccaggtacaagcagtcagttctcggcaggggccgaccgggcaacttccccccttgtgtccctctaccctgctttggagtgccgggccctcattcagcagatgtccccctctgcctttggtctgaatgactgggatgatgatgagatcctagcttcggtgctggcagtgtcccaacaggaatacctagacagtatgaagaaaaacaaagtgcacagagacccgcccccagacaagagttgatggagacccagggattggacaccatctcccaaccccaggactcgggcaagggtgccgaagatagacaagaggcacacagagacagaccaactggcagccaggcagccccagaggagagagacattcagacagaggaaagtctccctgcccctcattccttccaagatgagaaaaacttgccgccaccccccgacactgatgccagggaggtgggaggaagaagtgggaaatttcccttcccagtacccccaagaacgtctgagccttcaatgttgaattttttctttattaaaattacttttatcttataaaatcaactaatcaaaaatgatatagacgacagcactggctctgtgaaggtggcatctttctgggcaggcaggccatggggcatggaggagggtgcaaagatatgggttgctgtcttctggcctccagctgcatggaggccggcccagggtctagggtgtgcactgggcaagggcagggcggcaggtgtcaggccggcttggacaatgaaaccctgaccttgctgcattccttttgcttccaccaccactagcttctttggaatcttggggtgggggtcatctttggggattatggctgccacccgggatttgagtgtagggagtgtgggagcagccttggcagatggggcacccgtgccctgcaggtgttgacaagatccgccatctgtaatgtccttggcacaataaaaccaaatgtcagtttc

SEQ ID NO: 429400 - DNA, 3662 bp, Homo sapiens
ttgatgttttccagtcattccggctgacagcgttcaagttggaatcctggaggggaggtgtttttcctgtcgtacgtgggacaggccacgctgtccgtccgcagtaccgacgcctgcaggtcagagcttcggggagaaaagtgaagagcaagacggaactgacggggagaaaggctgggaaccagggtgtcgactttgactgaaatttgagacggagggcaccggagggcgagcactcgcctgtgattggcccgtgggcgtcgtcgaggtcccacgcagctgctcaattggttggtgttgcaattgttgtggcggcggcggcggcgattttgcccacgtacttccgagtaaggggcggggctgtgccctggcgcgcgtgcgcagcgccccggggccccacccggtagtgcaagaacctgcgagggggcggagcgaagaggtgcttgttttggttctgtttcctttgaagcagaaggccggaacaagcgtagcaataaacttgctggacttggagagaaggctaagacaaactcgccgcactgccttcatcttggactttacatccgggttctcctctcggcgtgacccgcgcgccgccaccgccgccgccgccgccgccgccgcctccgccgccgagggttctcgaaccggtgccgcgatccctttatccgggtctcgccgttcccgtcgtgcctcgcgcactacactagccccctcatccgggttctctcccggcgtgccccgcgccgggtttgttggggggtactcggcagtgcagccatgactatactccccaaaaagaagccgccgcctcccgacgccgaccccgccaacgagccgccgccgcccgggccgatgcccccggcgccgcggcgcggcggaggtgtgggcgtgggcggcggcggcacgggcgtgggcggcggcgatcgcgaccgtgactccggcgtcgtgggggcccgtccgcgagcttcgccaccgcctcaaggcccgctaccaggaccgccgggcgctcttcatcgctgggcgctggccgtgccgcctggtgcagtggcgggtccccggccacaacaggcttctccacctccttgcgggggcccaggtggtcccggcggcggtcccggcgacgcgctgggcgcagcggcggcgggtgtgggtgccgcgggcgtggtggtgggtgtgggtggtgccgtaggcgtgggcggctgctgctccgggcctgggcacagcaagcggcgacgtcaagctcccggggttggcgcggttggcgggggcagtcccgagcgtgaggaggtcggcgcaggctacaacagtgaggacgagtatgaggcggctgcagcacgcatcgaggctatggaccctgccactgtcgagcagcaggagcattggtttgaaaaggccctacgagacaagaagggcttcatcatcaagcagatgaaggaggatggcgcctgtctcttccgggctgtagctgaccaggtgtatggagaccaggacatgcatgaggttgtgcgaaagcattgcatggactatctgatgaagaatgccgactacttctccaactatgtcacagaggactttaccacctacattaacaggaagcggaaaaacaattgccatggcaaccacattgagatgcaggccatggcagagatgtacaaccgtcctgtggaggtgtaccagtacagcacagaacccatcaacacattccatgggatacatcaaaacgaggacgaacccattcgtgttagctaccatcggaatatccactataattcagtggtgaatcctaacaaggccaccattggtgtggggctgggcctgccatcattcaaaccagggtttgcagagcagtctctgatgaagaatgccataaaaacatcggaggagtcatggattgaacagcagatgctagaagacaagaaacgggccacagactgggaggccacaaatgaagccatcgaggagcaggtggctcgggaatcctacctgcagtggttgcgggatcaggagaaacaggctcgccaggtccgaggccccagccagccccggaaagccagcgccacatgcagttcggccacagcagcagcctccagtggcctggaggagtggactagccggtccccgcggcagcggagttcagcctcgtcacctgagcaccctgagctgcatgctgaattgggcatgaagcccccttccccaggcactgttttagctcttgccaaacctccttcgccctgtgcgccaggtacaagcagtcagttctcggcaggggccgaccgggcaacttccccccttgtgtccctctaccctgctttggagtgccgggccctcattcagcagatgtccccctctgcctttggtctgaatgactgggatgatgatgagatcctagcttcggtgctggcagtgtcccaacaggaatacctagacagtatgaagaaaaacaaagtgcacagagacccgcccccagacaagagttgatggagacccagggattggacaccatctcccaaccccagtactcctgctctccggtgccacctcaccttctttggcttcttccctcttgcctccttctgttctttctgctctcccctcttttccctcctcctcacttccctctggctagcccacccctgcactctctctcattgccgctgccactatcacctgtctctctgccagctgatgtgccctgttgccccccaccccatcccgcacagaaccatccctgcattccacaggggactcgggcaagggtgccgaagatagacaagaggcacacagagacagaccaactggcagccaggcagccccagaggagagagacattcagacagaggaaaagggtgcaaagatatgggttgctgtcttctggcctccagctgcatggaggccggcccagggtctagggtgtgcactgggcaagggcagggcggcaggtgtcaggccggcttggacaatgaaaccctgaccttgctgcattccttttgcttccaccaccactagcttctttggaatcttggggtgggggtcatctttggggattatggctgccacccgggatttgagtgtagggagtgtgggagcagccttggcagatggggcacccgtgccctgcaggtgttgacaagatccgccatctgtaatgtccttggcacaataaaaccaaatgtcagtttcaaaaaaaaaaaaaagaaaacagaaaaaaaaaaaaaaaaaaaaaaaaacggggggggacacatctataccggaggggggagaaaaaaagcggcaaagaaaagggcacacgggcaccacaaagcggacaacacggagccacaaggcttctagaacacaacaggggaaaaacacggcagagaccccaataagaggcacaggataaaatgagaagaacaccagagagatacacgcggcaataaagacgcgaggaacaaacacaccaaaaaaaagacaagcgataaacagaagaacaagagaaaaagggagacacaagaaacaagcaaaagagaagcacagagaggagaaaaaaaagaagaaaggaggaaagagaaagaagaagaagagaaaaaagaacagacgaagcagcaccaaagaaagaaaatacgagcaaggggaaagagagcgagaaagacggaagcagaagcagagaagaaaacgag

SEQ ID NO: 429401 - DNA, 3406 bp, Homo sapiens
ttgatgttttccagtcattccggctgacagcgttcaagttggaatcctggaggggaggtgtttttcctgtcgtacgtgggacaggccacgctgtccgtccgcagtaccgacgcctgcaggtcagagcttcggggagaaaagtgaagagcaagacggaactgacggggagaaaggctgggaaccagggtgtcgactttgactgaaatttgagacggagggcaccggagggcgagcactcgcctgtgattggcccgtgggcgtcgtcgaggtcccacgcagctgctcaattggttggtgttgcaattgttgtggcggcggcggcggcgattttgcccacgtacttccgagtaaggggcggggctgtgccctggcgcgcgtgcgcagcgccccggggccccacccggtagtgcaagaacctgcgagggggcggagcgaagaggtgcttgttttggttctgtttcctttgaagcagaaggccggaacaagcgtagcaataaacttgctggacttggagagaaggctaagacaaactcgccgcactgccttcatcttggactttacatccgggttctcctctcggcgtgacccgcgcgccgccaccgccgccgccgccgccgccgccgcctccgccgccgagggttctcgaaccggtgccgcgatccctttatccgggtctcgccgttcccgtcgtgcctcgcgcactacactagccccctcatccgggttctctcccggcgtgccccgcgccgggtttgttggggggtactcggcagtgcagccatgactatactccccaaaaagaagccgccgcctcccgacgccgaccccgccaacgagccgccgccgcccgggccgatgcccccggcgccgcggcgcggcggaggtgtgggcgtgggcggcggcggcacgggcgtgggcggcggcgatcgcgaccgtgactccggcgtcgtgggggcccgtccgcgagcttcgccaccgcctcaaggcccgctaccaggaccgccgggcgctcttcatcgctgggcgctggccgtgccgcctggtgcagtggcgggtccccggccacaacaggcttctccacctccttgcgggggcccaggtggtcccggcggcggtcccggcgacgcgctgggcgcagcggcggcgggtgtgggtgccgcgggcgtggtggtgggtgtgggtggtgccgtaggcgtgggcggctgctgctccgggcctgggcacagcaagcggcgacgtcaagctcccggggttggcgcggttggcgggggcagtcccgagcgtgaggaggtcggcgcaggctacaacagtgaggacgagtatgaggcggctgcagcacgcatcgaggctatggaccctgccactgtcgagcagcaggagcattggtttgaaaaggccctacgagacaagaagggcttcatcatcaagcagatgaaggaggatggcgcctgtctcttccgggctgtagctgaccaggtgtatggagaccaggacatgcatgaggttgtgcgaaagcattgcatggactatctgatgaagaatgccgactacttctccaactatgtcacagaggactttaccacctacattaacaggaagcggaaaaacaattgccatggcaaccacattgagatgcaggccatggcagagatgtacaaccgtcctgtggaggtgtaccagtacagcacagaacccatcaacacattccatgggatacatcaaaacgaggacgaacccattcgtgttagctaccatcggaatatccactataattcagtggtgaatcctaacaaggccaccattggtgtggggctgggcctgccatcattcaaaccagggtttgcagagcagtctctgatgaagaatgccataaaaacatcggaggagtcatggattgaacagcagatgctagaagacaagaaacgggccacagactgggaggccacaaatgaagccatcgaggagcaggtggctcgggaatcctacctgcagtggttgcgggatcaggagaaacaggctcgccaggtccgaggccccagccagccccggaaagccagcgccacatgcagttcggccacagcagcagcctccagtggcctggaggagtggactagccggtccccgcggcagcggagttcagcctcgtcacctgagcaccctgagctgcatgctgaattgggcatgaagcccccttccccaggcactgttttagctcttgccaaacctccttcgccctgtgcgccaggtacaagcagtcagttctcggcaggggccgaccgggcaacttccccccttgtgtccctctaccctgctttggagtgccgggccctcattcagcagatgtccccctctgcctttggtctgaatgactgggatgatgatgagatcctagcttcggtgctggcagtgtcccaacaggaatacctagacagtatgaagaaaaacaaagtgcacagagacccgcccccagacaagagttgatggagacccagggattggacaccatctcccaaccccaggactcgggcaagggtgccgaagatagacaagaggcacacagagacagaccaactggcagccaggcagccccagaggagagagacattcagacagaggaaagtctccctgcccctcattccttccaagatgagaaaaacttgccgccaccccccgacactgatgccagggaggtgggaggaagaagtgggaaatttcccttcccagtacccccaagaacgtctgagccttcaatgttgaattttttctttattaaaattacttttatcttataaaatcaactaatcaaaaatgatatagacgacagcactggctctgtgaaggtggcatctttctgggcaggcaggccatggggcatggaggagggtgcaaagatatgggttgctgtcttctggcctccagctgcatggaggccggcccagggtctagggtgtgcactgggcaagggcagggcggcaggtgtcaggccggcttggacaatgaaaccctgaccttgctgcattccttttgcttccaccaccactagcttctttggaatcttggggtgggggtcatctttggggattatggctgccacccgggatttgagtgtagggagtgtgggagcagccttggcagatggggcacccgtgccctgcaggtgttgacaagatccgccatctgtaatgtccttggcacaataaaaccaaatgtcagtttctttccctgagcgactctgttctgtgtggggcaggggttgggcgggcctctgggcagaggatgcaatggcacggaccttggcttgacctcagaggtgtgaatgctctccagcagggtctgtctgggggcctggagtttgtatttgatttgctgcttattaaacctccttctggacctattgccactggaa

SEQ ID NO: 429402 - DNA, 3781 bp, Homo sapiens
ttgatgttttccagtcattccggctgacagcgttcaagttggaatcctggaggggaggtgtttttcctgtcgtacgtgggacaggccacgctgtccgtccgcagtaccgacgcctgcaggtcagagcttcggggagaaaagtgaagagcaagacggaactgacggggagaaaggctgggaaccagggtgtcgactttgactgaaatttgagacggagggcaccggagggcgagcactcgcctgtgattggcccgtgggcgtcgtcgaggtcccacgcagctgctcaattggttggtgttgcaattgttgtggcggcggcggcggcgattttgcccacgtacttccgagtaaggggcggggctgtgccctggcgcgcgtgcgcagcgccccggggccccacccggtagtgcaagaacctgcgagggggcggagcgaagaggtgcttgttttggttctgtttcctttgaagcagaaggccggaacaagcgtagcaataaacttgctggacttggagagaaggctaagacaaactcgccgcactgccttcatcttggactttacatccgggttctcctctcggcgtgacccgcgcgccgccaccgccgccgccgccgccgccgccgcctccgccgccgagggttctcgaaccggtgccgcgatccctttatccgggtctcgccgttcccgtcgtgcctcgcgcactacactagccccctcatccgggttctctcccggcgtgccccgcgccgggtttgttggggggtactcggcagtgcagccatgactatactccccaaaaagaagccgccgcctcccgacgccgaccccgccaacgagccgccgccgcccgggccgatgcccccggcgccgcggcgcggcggaggtgtgggcgtgggcggcggcggcacgggcgtgggcggcggcgatcgcgaccgtgactccggcgtcgtgggggcccgtccgcgagcttcgccaccgcctcaaggcccgctaccaggaccgccgggcgctcttcatcgctgggcgctggccgtgccgcctggtgcagtggcgggtccccggccacaacaggcttctccacctccttgcgggggcccaggtggtcccggcggcggtcccggcgacgcgctgggcgcagcggcggcgggtgtgggtgccgcgggcgtggtggtgggtgtgggtggtgccgtaggcgtgggcggctgctgctccgggcctgggcacagcaagcggcgacgtcaagctcccggggttggcgcggttggcgggggcagtcccgagcgtgaggaggtcggcgcaggctacaacagtgaggacgagtatgaggcggctgcagcacgcatcgaggctatggaccctgccactgtcgagcagcaggagcattggtttgaaaaggccctacgagacaagaagggcttcatcatcaagcagatgaaggaggatggcgcctgtctcttccgggctgtagctgaccaggtgtatggagaccaggacatgcatgaggttgtgcgaaagcattgcatggactatctgatgaagaatgccgactacttctccaactatgtcacagaggactttaccacctacattaacaggaagcggaaaaacaattgccatggcaaccacattgagatgcaggccatggcagagatgtacaaccgtcctgtggaggtgtaccagtacagcacagaacccatcaacacattccatgggatacatcaaaacgaggacgaacccattcgtgttagctaccatcggaatatccactataattcagtggtgaatcctaacaaggccaccattggtgtggggctgggcctgccatcattcaaaccagggtttgcagagcagtctctgatgaagaatgccataaaaacatcggaggagtcatggattgaacagcagatgctagaagacaagaaacgggccacagactgggaggccacaaatgaagccatcgaggagcaggtggctcgggaatcctacctgcagtggttgcgggatcaggagaaacaggctcgccaggtccgaggccccagccagccccggaaagccagcgccacatgcagttcggccacagcagcagcctccagtggcctggaggagtggactagccggtccccgcggcagcggagttcagcctcgtcacctgagcaccctgagctgcatgctgaattgggcatgaagcccccttccccaggcactgttttagctcttgccaaacctccttcgccctgtgcgccaggtacaagcagtcagttctcggcaggggccgaccgggcaacttccccccttgtgtccctctaccctgctttggagtgccgggccctcattcagcagatgtccccctctgcctttggtaagcctcctttgtctggggggatggaggctgctaggagctgggagagactggaagaagtggcaagtcctgagaggggctttctggagcctctggccatctccccaagaaaagaagggagaggcactggaggggatttttcagatccaaggaatttgccccagaagggtctggggtctaagtggggtttcacaggcctagcagatccttctgttttgagaaaggagtgagaagggccctatgggatttctccagagccccagatgtcggcacagggtgaggagaaggcaggctgagagcgctccatcatccttttcctcttcctctcgcccagcaggtctgaatgactgggatgatgatgagatcctagcttcggtgctggcagtgtcccaacaggaatacctagacagtatgaagaaaaacaaagtgcacagagacccgcccccagacaagagttgatggagacccagggattggacaccatctcccaaccccagtactcctgctctccggtgccacctcaccttctttggcttcttccctcttgcctccttctgttctttctgctctcccctcttttccctcctcctcacttccctctggctagcccacccctgcactctctctcattgccgctgccactatcacctgtctctctgccagctgatgtgccctgttgccccccaccccatcccgcacagaaccatccctgcattccacaggggactcgggcaagggtgccgaagatagacaagaggcacacagagacagaccaactggcagccaggcagccccagaggagagagacattcagacagaggaaagtctccctgcccctcattccttccaagatgagaaaaacttgccgccaccccccgacactgatgccagggaggtgggaggaagaagtgggaaatttcccttcccagtacccccaagaacgtctgagccttcaatgttgaattttttctttattaaaattacttttatcttataaaatcaactaatcaaaaatgatatagacgacagcactggctctgtgaaggtggcatctttctgggcaggcaggccatggggcatggaggagggtgcaaagatatgggttgctgtcttctggcctccagctgcatggaggccggcccagggtctagggtgtgcactgggcaagggcagggcggcaggtgtcaggccggcttggacaatgaaaccctgaccttgctgcattccttttgcttccaccaccactagcttctttggaatcttggggtgggggtcatctttggggattatggctgccacccgggatttgagtgtagggagtgtgggagcagccttggcagatggggcacccgtgccctgcaggtgttgacaagatccgccatctgtaatgtccttggcacaataaaaccaaatgtcagtttc

SEQ ID NO: 429403 - DNA, 2797 bp, Homo sapiens
ttgatgttttccagtcattccggctgacagcgttcaagttggaatcctggaggggaggtgtttttcctgtcgtacgtgggacaggccacgctgtccgtccgcagtaccgacgcctgcaggtcagagcttcggggagaaaagtgaagagcaagacggaactgacggggagaaaggctgggaaccagggtgtcgactttgactgaaatttgagacggagggcaccggagggcgagcactcgcctgtgattggcccgtgggcgtcgtcgaggtcccacgcagctgctcaattggttggtgttgcaattgttgtggcggcggcggcggcgattttgcccacgtacttccgagtaaggggcggggctgtgccctggcgcgcgtgcgcagcgccccggggccccacccggtagtgcaagaacctgcgagggggcggagcgaagaggtgcttgttttggttctgtttcctttgaagcagaaggccggaacaagcgtagcaataaacttgctggacttggagagaaggctaagacaaactcgccgcactgccttcatcttggactttacatccgggttctcctctcggcgtgacccgcgcgccgccaccgccgccgccgccgccgccgccgcctccgccgccgagggttctcgaaccggtgccgcgatccctttatccgggtctcgccgttcccgtcgtgcctcgcgcactacactagccccctcatccgggttctctcccggcgtgccccgcgccgggtttgttggggggtactcggcagtgcagccatgactatactccccaaaaagaagccgccgcctcccgacgccgaccccgccaacgagccgccgccgcccgggccgatgcccccggcgccgcggcgcggcggaggtgtgggcgtgggcggcggcggcacgggcgtgggcggcggcgatcgcgaccgtgactccggcgtcgtgggggcccgtccgcgagcttcgccaccgcctcaaggcccgctaccaggaccgccgggcgctcttcatcgctgggcgctggccgtgccgcctggtgcagtggcgggtccccggccacaacaggcttctccacctccttgcgggggcccaggtggtcccggcggcggtcccggcgacgcgctgggcgcagcggcggcgggtgtgggtgccgcgggcgtggtggtgggtgtgggtggtgccgtaggcgtgggcggctgctgctccgggcctgggcacagcaagcggcgacgtcaagctcccggggttggcgcggttggcgggggcagtcccgagcgtgaggaggtcggcgcaggctacaacagtgaggacgagtatgaggcggctgcagcacgcatcgaggctatggaccctgccactgtcgagcagcaggagcattggtttgaaaaggccctacgagacaagaagggcttcatcatcaagcagatgaaggaggatggcgcctgtctcttccgggctgtagctgaccaggtgtatggagaccaggacatgcatgaggttgtgcgaaagcattgcatggactatctgatgaagaatgccgactacttctccaactatgtcacagaggactttaccacctacattaacaggaagcggaaaaacaattgccatggcaaccacattgagatgcaggccatggcagagatgtacaaccgtcctgtggaggtgtaccagtacagcacagaacccatcaacacattccatgggatacatcaaaacgaggacgaacccattcgtgttagctaccatcggaatatccactataattcagtggtgaatcctaacaaggccaccattggtgtggggctgggcctgccatcattcaaaccagggtttgcagagcagtctctgatgaagaatgccataaaaacatcggaggagtcatggattgaacagcagatgctagaagacaagaaacgggccacagactgggaggccacaaatgaagccatcgaggagcaggtggctcgggaatcctacctgcagtggttgcgggatcaggagaaacaggctcgccaggtccgaggccccagccagccccggaaagccagcgccacatgcagttcggccacagcagcagcctccagtggcctggaggagtggactagccggtccccgcggcagcggagttcagcctcgtcacctgagcaccctgagctgcatgctgaattgggcatgaagcccccttccccaggcactgttttagctcttgccaaacctccttcgccctgtgcgccaggtacaagcagtcagttctcggcaggggccgaccgggcaacttccccccttgtgtccctctaccctgctttggagtgccgggccctcattcagcagatgtccccctctgcctttggtctgaatgactgggatgatgatgagatcctagcttcggtgctggcagtgtcccaacaggaatacctagacagtatgaagaaaaacaaagtgcacagagacccgcccccagacaagagttgatggagacccagggattggacaccatctcccaaccccaggactcgggcaagggtgccgaagatagacaagaggcacacagagacagaccaactggcagccaggcagccccagaggagagagacattcagacagaggaaagtctccctgcccctcattccttccaagatgagaaaaacttgccgccaccccccgacactgatgccagggaggtgggaggaagaagtgggaaatttcccttcccagtacccccaagaacgtctgagccttcaatgttgaattttttctttattaaaattacttttatcttataaaatca

SEQ ID NO: 429404 - DNA, 2543 bp, Homo sapiens
  misc_feature (2481)..(2481): n is a, c, g, or t
ttgatgttttccagtcattccggctgacagcgttcaagttggaatcctggaggggaggtgtttttcctgtcgtacgtgggacaggccacgctgtccgtccgcagtaccgacgcctgcaggtcagagcttcggggagaaaagtgaagagcaagacggaactgacggggagaaaggctgggaaccagggtgtcgactttgactgaaatttgagacggagggcaccggagggcgagcactcgcctgtgattggcccgtgggcgtcgtcgaggtcccacgcagctgctcaattggttggtgttgcaattgttgtggcggcggcggcggcgattttgcccacgtacttccgagtaaggggcggggctgtgccctggcgcgcgtgcgcagcgccccggggccccacccggtagtgcaagaacctgcgagggggcggagcgaagaggtgcttgttttggttctgtttcctttgaagcagaaggccggaacaagcgtagcaataaacttgctggacttggagagaaggctaagacaaactcgccgcactgccttcatcttggactttacatccgggttctcctctcggcgtgacccgcgcgccgccaccgccgccgccgccgccgccgccgcctccgccgccgagggttctcgaaccggtgccgcgatccctttatccgggtctcgccgttcccgtcgtgcctcgcgcactacactagccccctcatccgggttctctcccggcgtgccccgcgccgggtttgttggggggtactcggcagtgcagccatgactatactccccaaaaagaagccgccgcctcccgacgccgaccccgccaacgagccgccgccgcccgggccgatgcccccggcgccgcggcgcggcggaggtgtgggcgtgggcggcggcggcacgggcgtgggcggcggcgatcgcgaccgtgactccggcgtcgtgggggcccgtccgcgagcttcgccaccgcctcaaggcccgctaccaggaccgccgggcgctcttcatcgctgggcgctggccgtgccgcctggtgcagtggcgggtccccggccacaacaggcttctccacctccttgcgggggcccaggtggtcccggcggcggtcccggcgacgcgctgggcgcagcggcggcgggtgtgggtgccgcgggcgtggtggtgggtgtgggtggtgccgtaggcgtgggcggctgctgctccgggcctgggcacagcaagcggcgacgtcaagctcccggggttggcgcggttggcgggggcagtcccgagcgtgaggaggtcggcgcaggctacaacagtgaggacgagtatgaggcggctgcagcacgcatcgaggctatggaccctgccactgtcgagcagcaggagcattggtttgaaaaggccctacgagacaagaagggcttcatcatcaagcagatgaaggaggatggcgcctgtctcttccgggctgtagctgaccaggtgtatggagaccaggacatgcatgaggttgtgcgaaagcattgcatggactatctgatgaagaatgccgactacttctccaactatgtcacagaggactttaccacctacattaacaggaagcggaaaaacaattgccatggcaaccacattgagatgcaggccatggcagagatgtacaaccgtcctgtggaggtgtaccagtacagcacagaacccatcaacacattccatgggatacatcaaaacgaggacgaacccattcgtgttagctaccatcggaatatccactataattcagtggtgaatcctaacaaggccaccattggtgtggggctgggcctgccatcattcaaaccagggtttgcagagcagtctctgatgaagaatgccataaaaacatcggaggagtcatggattgaacagcagatgctagaagacaagaaacgggccacagactgggaggccacaaatgaagccatcgaggagcaggtggctcgggaatcctacctgcagtggttgcgggatcaggagaaacaggctcgccaggtccgaggccccagccagccccggaaagccagcgccacatgcagttcggccacagcagcagcctccagtggcctggaggagtggactagccggtccccgcggcagcggagttcagcctcgtcacctgagcaccctgagctgcatgctgaattgggcatgaagcccccttccccaggcactgttttagctcttgccaaacctccttcgccctgtgcgccaggtacaagcagtcagttctcggcaggggccgaccgggcaacttccccccttgtgtccctctaccctgctttggagtgccgggccctcattcagcagatgtccccctctgcctttggtctgaatgactgggatgatgatgagatcctagcttcggtgctggcagtgtcccaacaggaatacctagacagtatgaagaaaaacaaagtgcacagagacccgcccccagaaagagtgtgngcccggtgggccttccaccgtatctgtttcggggccactttggttcccctgccttgtttggc

SEQ ID NO: 429405 - DNA, 3065 bp, Homo sapiens
ttgatgttttccagtcattccggctgacagcgttcaagttggaatcctggaggggaggtgtttttcctgtcgtacgtgggacaggccacgctgtccgtccgcagtaccgacgcctgcaggtcagagcttcggggagaaaagtgaagagcaagacggaactgacggggagaaaggctgggaaccagggtgtcgactttgactgaaatttgagacggagggcaccggagggcgagcactcgcctgtgattggcccgtgggcgtcgtcgaggtcccacgcagctgctcaattggttggtgttgcaattgttgtggcggcggcggcggcgattttgcccacgtacttccgagtaaggggcggggctgtgccctggcgcgcgtgcgcagcgccccggggccccacccggtagtgcaagaacctgcgagggggcggagcgaagaggtgcttgttttggttctgtttcctttgaagcagaaggccggaacaagcgtagcaataaacttgctggacttggagagaaggctaagacaaactcgccgcactgccttcatcttggactttacatccgggttctcctctcggcgtgacccgcgcgccgccaccgccgccgccgccgccgccgccgcctccgccgccgagggttctcgaaccggtgccgcgatccctttatccgggtctcgccgttcccgtcgtgcctcgcgcactacactagccccctcatccgggttctctcccggcgtgccccgcgccgggtttgttggggggtactcggcagtgcagccatgactatactccccaaaaagaagccgccgcctcccgacgccgaccccgccaacgagccgccgccgcccgggccgatgcccccggcgccgcggcgcggcggaggtgtgggcgtgggcggcggcggcacgggcgtgggcggcggcgatcgcgaccgtgactccggcgtcgtgggggcccgtccgcgagcttcgccaccgcctcaaggcccgctaccaggaccgccgggcgctcttcatcgctgggcgctggccgtgccgcctggtgcagtggcgggtccccggccacaacaggcttctccacctccttgcgggggcccaggtggtcccggcggcggtcccggcgacgcgctgggcgcagcggcggcgggtgtgggtgccgcgggcgtggtggtgggtgtgggtggtgccgtaggcgtgggcggctgctgctccgggcctgggcacagcaagcggcgacgtcaagctcccggggttggcgcggttggcgggggcagtcccgagcgtgaggaggtcggcgcaggctacaacagtgaggacgagtatgaggcggctgcagcacgcatcgaggctatggaccctgccactgtcgagcagcaggagcattggtttgaaaaggccctacgagacaagaagggcttcatcatcaagcagatgaaggaggatggcgcctgtctcttccgggctgtagctgaccaggtgtatggagaccaggacatgcatgaggttgtgcgaaagcattgcatggactatctgatgaagaatgccgactacttctccaactatgtcacagaggactttaccacctacattaacaggaagcggaaaaacaattgccatggcaaccacattgagatgcaggccatggcagagatgtacaaccgtcctgtggaggtgtaccagtacagcacagaacccatcaacacattccatgggatacatcaaaacgaggacgaacccattcgtgttagctaccatcggaatatccactataattcagtggtgaatcctaacaaggccaccattggtgtggggctgggcctgccatcattcaaaccagggtttgcagagcagtctctgatgaagaatgtacaagcagtcagttctcggcaggggccgaccgggcaacttccccccttgtgtccctctaccctgctttggagtgccgggccctcattcagcagatgtccccctctgcctttggtctgaatgactgggatgatgatgagatcctagcttcggtgctggcagtgtcccaacaggaatacctagacagtatgaagaaaaacaaagtgcacagagacccgcccccagacaagagttgatggagacccagggattggacaccatctcccaaccccagtactcctgctctccggtgccacctcaccttctttggcttcttccctcttgcctccttctgttctttctgctctcccctcttttccctcctcctcacttccctctggctagcccacccctgcactctctctcattgccgctgccactatcacctgtctctctgccagctgatgtgccctgttgccccccaccccatcccgcacagaaccatccctgcattccacaggggactcgggcaagggtgccgaagatagacaagaggcacacagagacagaccaactggcagccaggcagccccagaggagagagacattcagacagaggaaagtctccctgcccctcattccttccaagatgagaaaaacttgccgccaccccccgacactgatgccagggaggtgggaggaagaagtgggaaatttcccttcccagtacccccaagaacgtctgagccttcaatgttgaattttttctttattaaaattacttttatcttataaaatcaactaatcaaaaatgatatagacgacagcactggctctgtgaaggtggcatctttctgggcaggcaggccatggggcatggaggagggtgcaaagatatgggttgctgtcttctggcctccagctgcatggaggccggcccagggtctagggtgtgcactgggcaagggcagggcggcaggtgtcaggccggcttggacaatgaaaccctgaccttgctgcattccttttgcttccaccaccactagcttctttggaatcttggggtgggggtcatctttggggattatggctgccacccgggatttgagtgtagggagtgtgggagcagccttggcagatggggcacccgtgccctgcaggtgttgacaagatccgccatctgtaatgtccttggcacaataaaaccaaatgtcagtttc

SEQ ID NO: 429406 - DNA, 2638 bp, Homo sapiens
ttgatgttttccagtcattccggctgacagcgttcaagttggaatcctggaggggaggtgtttttcctgtcgtacgtgggacaggccacgctgtccgtccgcagtaccgacgcctgcaggtcagagcttcggggagaaaagtgaagagcaagacggaactgacggggagaaaggctgggaaccagggtgtcgactttgactgaaatttgagacggagggcaccggagggcgagcactcgcctgtgattggcccgtgggcgtcgtcgaggtcccacgcagctgctcaattggttggtgttgcaattgttgtggcggcggcggcggcgattttgcccacgtacttccgagtaaggggcggggctgtgccctggcgcgcgtgcgcagcgccccggggccccacccggtagtgcaagaacctgcgagggggcggagcgaagaggtgcttgttttggttctgtttcctttgaagcagaaggccggaacaagcgtagcaataaacttgctggacttggagagaaggctaagacaaactcgccgcactgccttcatcttggactttacatccgggttctcctctcggcgtgacccgcgcgccgccaccgccgccgccgccgccgccgccgcctccgccgccgagggttctcgaaccggtgccgcgatccctttatccgggtctcgccgttcccgtcgtgcctcgcgcactacactagccccctcatccgggttctctcccggcgtgccccgcgccgggtttgttggggggtactcggcagtgcagccatgactatactccccaaaaagaagccgccgcctcccgacgccgaccccgccaacgagccgccgccgcccgggccgatgcccccggcgccgcggcgcggcggaggtgtgggcgtgggcggcggcggcacgggcgtgggcggcggcgatcgcgaccgtgactccggcgtcgtgggggcccgtccgcgagcttcgccaccgcctcaaggcccgctaccaggaccgccgggcgctcttcatcgctgggcgctggccgtgccgcctggtgcagtggcgggtccccggccacaacaggcttctccacctccttgcgggggcccaggtggtcccggcggcggtcccggcgacgcgctgggcgcagcggcggcgggtgtgggtgccgcgggcgtggtggtgggtgtgggtggtgccgtaggcgtgggcggctgctgctccgggcctgggcacagcaagcggcgacgtcaagctcccggggttggcgcggttggcgggggcagtcccgagcgtgaggaggtcggcgcaggctacaacagtgaggacgagtatgaggcggctgcagcacgcatcgaggctatggaccctgccactgtcgagcagcaggagcattggtttgaaaaggccctacgagacaagaagggcttcatcatcaagcagatgaaggaggatggcgcctgtctcttccgggctgtagctgaccaggtgtatggagaccaggacatgcatgaggttgtgcgaaagcattgcatggactatctgatgaagaatgccgactacttctccaactatgtcacagaggactttaccacctacattaacaggaagcggaaaaacaattgccatggcaaccacattgagatgcaggccatggcagagatgtacaaccgtcctgtggaggtgtaccagtacagcacagaacccatcaacacattccatgggatacatcaaaacgaggacgaacccattcgtgttagctaccatcggaatatccactataattcagtggtgaatcctaacaaggccaccattggtgtggggctgggcctgccatcattcaaaccagggtttgcagagcagtctctgatgaagaatgccataaaaacatcggaggagtcatggattgaacagcagatgctagaagacaagaaacgggccacagactgggaggccacaaatgaagccatcgaggagcaggtggctcgggaatcctacctgcagtggttgcgggatcaggagaaacaggctcgccaggtccgaggccccagccagccccggaaagccagcgccacatgcagttcggccacagcagcagcctccagtggcctggaggagtggactagccggtccccgcggcagcggagttcagcctcgtcacctgagcaccctgagctgcatgctgaattgggcatgaagcccccttccccaggcactgttttagctcttgccaaacctccttcgccctgtgcgccaggtacaagcagtcagttctcggcaggggccgaccgggcaacttccccccttgtgtccctctaccctgctttggagtgccgggccctcattcagcagatgtccccctctgcctttgggactcgggcaagggtgccgaagatagacaagaggcacacagagacagaccaactggcagccaggcagccccagaggagagagacattcagacagaggaaagtctccctgcccctcattccttccaagatgagaaaaacttgccgccaccccccgacactgatgccagggaggtgggaggaagaagtgggaaatttcccttcccagtacccccaagaacgtctgagccttcaatgttgaattttttctttattaaaattacttttatcttataaaatca

SEQ ID NO: 429407 - DNA, 2946 bp, Homo sapiens
ttgatgttttccagtcattccggctgacagcgttcaagttggaatcctggaggggaggtgtttttcctgtcgtacgtgggacaggccacgctgtccgtccgcagtaccgacgcctgcaggtcagagcttcggggagaaaagtgaagagcaagacggaactgacggggagaaaggctgggaaccagggtgtcgactttgactgaaatttgagacggagggcaccggagggcgagcactcgcctgtgattggcccgtgggcgtcgtcgaggtcccacgcagctgctcaattggttggtgttgcaattgttgtggcggcggcggcggcgattttgcccacgtacttccgagtaaggggcggggctgtgccctggcgcgcgtgcgcagcgccccggggccccacccggtagtgcaagaacctgcgagggggcggagcgaagaggtgcttgttttggttctgtttcctttgaagcagaaggccggaacaagcgtagcaataaacttgctggacttggagagaaggctaagacaaactcgccgcactgccttcatcttggactttacatccgggttctcctctcggcgtgacccgcgcgccgccaccgccgccgccgccgccgccgccgcctccgccgccgagggttctcgaaccggtgccgcgatccctttatccgggtctcgccgttcccgtcgtgcctcgcgcactacactagccccctcatccgggttctctcccggcgtgccccgcgccgggtttgttggggggtactcggcagtgcagccatgactatactccccaaaaagaagccgccgcctcccgacgccgaccccgccaacgagccgccgccgcccgggccgatgcccccggcgccgcggcgcggcggaggtgtgggcgtgggcggcggcggcacgggcgtgggcggcggcgatcgcgaccgtgactccggcgtcgtgggggcccgtccgcgagcttcgccaccgcctcaaggcccgctaccaggaccgccgggcgctcttcatcgctgggcgctggccgtgccgcctggtgcagtggcgggtccccggccacaacaggcttctccacctccttgcgggggcccaggtggtcccggcggcggtcccggcgacgcgctgggcgcagcggcggcgggtgtgggtgccgcgggcgtggtggtgggtgtgggtggtgccgtaggcgtgggcggctgctgctccgggcctgggcacagcaagcggcgacgtcaagctcccggggttggcgcggttggcgggggcagtcccgagcgtgaggaggtcggcgcaggctacaacagtgaggacgagtatgaggcggctgcagcacgcatcgaggctatggaccctgccactgtcgagcagcaggagcattggtttgaaaaggccctacgagacaagaagggcttcatcatcaagcagatgaaggaggatggcgcctgtctcttccgggctgtagctgaccaggtgtatggagaccaggacatgcatgaggttgtgcgaaagcattgcatggactatctgatgaagaatgccgactacttctccaactatgtcacagaggactttaccacctacattaacaggaagcggaaaaacaattgccatggcaaccacattgagatgcaggccatggcagagatgtacaaccgtcctgtggaggtgtaccagtacagcacagaacccatcaacacattccatgggatacatcaaaacgaggacgaacccattcgtgttagctaccatcggaatatccactataattcagtggtgaatcctaacaaggccaccattggtgtggggctgggcctgccatcattcaaaccagggtttgcagagcagtctctgatgaagaatgccataaaaacatcggaggagtcatggattgaacagcagatgctagaagacaagaaacgggccacagactgggaggccacaaatgaagccatcgaggagcaggtggctcgggaatcctacctgcagtggttgcgggatcaggagaaacaggctcgccaggtccgaggccccagccagccccggaaagccagcgccacatgcagttcggccacagcagcagcctccagtggcctggaggagtggactagccggtccccgcggcagcggagttcagcctcgtcacctgagcaccctgagctgcatgctgaattgggcatgaagcccccttccccaggcactgttttagctcttgccaaacctccttcgccctgtgcgccaggtacaagcagtcagttctcggcaggggccgaccgggcaacttccccccttgtgtccctctaccctgctttggagtgccgggccctcattcagcagatgtccccctctgcctttggtaagcctcctttgtctggggggatggaggctgctaggagctgggagagactggaagaagtggcaagtcctgagaggggctttctggagcctctggccatctccccaagaaaagaagggagaggcactggaggggatttttcagatccaaggaatttgccccagaagggtctggggtctaagtggggtttcacaggcctagcagatccttctgttttgagaaaggagtgagaagggccctatgggatttctccagagccccagatgtcggcacagggtgaggagaaggcaggctgagagcgctccatcatccttttcctcttcctctcgcccagcaggtctgaatgactgggatgatgatgagatcctagcttcggtgctggcagtgtcccaacaggaatacctagacagtatgaagaaaaacaaaatatcttttcatagtccaatgtcaatatacttgagacccattaccttttatatccctaaacagtatcctattagactgcctattaagaattatttcattaccctacatataaataaagttatcaaatttcctaagcgtgaatcagcagtccgtccgactat

SEQ ID NO: 429408 - DNA, 1849 bp, Homo sapiens
gttgctctttgggagtacctgctttcctgtctccttttttttctggggcctgtgggcctacctcgctgagcctgttctggctcttgggcaggttcagtgtgttattgcacatccctgttcctctccctccttgcagtttgcagagcagtctctgatgaagaatgccataaaaacatcggaggagtcatggattgaacagcagatgctagaagacaagaaacgggccacagactgggaggccacaaatgaagccatcgaggagcaggtggctcgggaatcctacctgcagtggttgcgggatcaggagaaacaggctcgccaggtccgaggccccagccagccccggaaagccagcgccacatgcagttcggccacagcagcagcctccagtggcctggaggagtggactagccggtccccgcggcagcggagttcagcctcgtcacctgagcaccctgagctgcatgctgaattgggcatgaagcccccttccccaggcactgttttagctcttgccaaacctccttcgccctgtgcgccaggtcagtgacttgcccacagggaatgtgctgggagttaggaggcacgtcctgggtcctgggtcctggatcctgggtccctacctttgactgtccgtctgcttcaggtacgtacaagcagtcagttctcggcaggggccgaccgggcaacttccccccttgtgtccctctaccctgctttggagtgccgggccctcattcagcagatgtccccctctgcctttggtctgaatgactgggatgatgatgagatcctagcttcggtgctggcagtgtcccaacaggaatacctagacagtatgaagaaaaacaaagtgcacagagacccgcccccagacaagagttgatggagacccagggattggacaccatctcccaaccccagtactcctgctctccggtgccacctcaccttctttggcttcttccctcttgcctccttctgttctttctgctctcccctcttttccctcctcctcacttccctctggctagcccacccctgcactctctctcattgccgctgccactatcacctgtctctctgccagctgatgtgccctgttgccccccaccccatcccgcacagaaccatccctgcattccacaggggactcgggcaagggtgccgaagatagacaagaggcacacagagacagaccaactggcagccaggcagccccagaggagagagacattcagacagaggaaagtctccctgcccctcattccttccaagatgagaaaaacttgccgccaccccccgacactgatgccagggaggtgggaggaagaagtgggaaatttcccttcccagtacccccaagaacgtctgagccttcaatgttgaattttttctttattaaaattacttttatcttataaaatcaactaatcaaaaatgatatagacgacagcactggctctgtgaaggtggcatctttctgggcaggcaggccatggggcatggaggagggtgcaaagatatgggttgctgtcttctggcctccagctgcatggaggccggcccagggtctagggtgtgcactgggcaagggcagggcggcaggtgtcaggccggcttggacaatgaaaccctgaccttgctgcattccttttgcttccaccaccactagcttctttggaatcttggggtgggggtcatctttggggattatggctgccacccgggatttgagtgtagggagtgtgggagcagccttggcagatggggcacccgtgccctgcaggtgttgacaagatccgccatctgtaatgtccttggcacaataaaaccaaatgtcagtttc

SEQ ID NO: 429409 - DNA, 1860 bp, Homo sapiens
gctcagaacacttgggtcacttgcctctggtcactcaactctctagtatctggcagaactgggcttggagcccatttttttttctttcctttttttgtctttgttcccttttttttcagcctacaaaggccatgttgacttgtaggagtcaggaaaactgaattcagagttgactctgtcacagactgactctttgtgaccttggacaaaccacaaactccccctgaacctcagtttcctcatgtggaaagcaaagggggtgtgggaatcaatagcatttgaggccaacctgtggaacttagaatgttgttgatttctctgagtggccacgtgtaccctagacaaagtcatctgcccaagaggcctgtggatgtgttcctctcacctgcactctcttgttcttcaagtctggccctgcctgccatatttttccatgaccccgttctagcctacaagggcaagaactctccaggccttggggtagaaaagggaatttccctggtcccccagttcctcctccccaaaggatgttctatgattcagagctcttctctggcatctctgaccctagctgctgctttcttctgcccccacagctgaccaggtgtatggagaccaggacatgcatgaggttgtgcgaaagcattgcatggactatctggtacaagcagtcagttctcggcaggggccgaccgggcaacttccccccttgtgtccctctaccctgctttggagtgccgggccctcattcagcagatgtccccctctgcctttggtctgaatgactgggatgatgatgagatcctagcttcggtgctggcagtgtcccaacaggaatacctagacagtatgaagaaaaacaaagtgcacagagacccgcccccagacaagagttgatggagacccagggattggacaccatctcccaaccccagtactcctgctctccggtgccacctcaccttctttggcttcttccctcttgcctccttctgttctttctgctctcccctcttttccctcctcctcacttccctctggctagcccacccctgcactctctctcattgccgctgccactatcacctgtctctctgccagctgatgtgccctgttgccccccaccccatcccgcacagaaccatccctgcattccacaggggactcgggcaagggtgccgaagatagacaagaggcacacagagacagaccaactggcagccaggcagccccagaggagagagacattcagacagaggaaagtctccctgcccctcattccttccaagatgagaaaaacttgccgccaccccccgacactgatgccagggaggtgggaggaagaagtgggaaatttcccttcccagtacccccaagaacgtctgagccttcaatgttgaattttttctttattaaaattacttttatcttataaaatcaactaatcaaaaatgatatagacgacagcactggctctgtgaaggtggcatctttctgggcaggcaggccatggggcatggaggagggtgcaaagatatgggttgctgtcttctggcctccagctgcatggaggccggcccagggtctagggtgtgcactgggcaagggcagggcggcaggtgtcaggccggcttggacaatgaaaccctgaccttgctgcattccttttgcttccaccaccactagcttctttggaatcttggggtgggggtcatctttggggattatggctgccacccgggatttgagtgtagggagtgtgggagcagccttggcagatggggcacccgtgccctgcaggtgttgacaagatccgccatctgtaatgtccttggcacaataaaaccaaatgtcagtttc

SEQ ID NO: 429410 - DNA, 1060 bp, Homo sapiens
tagcggatccctcttcgactagcctgacagccccgactagccgttgccccgactagccctgacaggccccgactagcccgactgagacaagagttgatggagacccagggattggacaccatctcccaaccccagtactcctgctctccggtgccacctcaccttctttggcttcttccctcttgcctccttctgttctttctgctctcccctcttttccctcctcctcacttccctctggctagcccacccctgcactctctctcattgccgctgccactatcacctgtctctctgccagctgatgtgccctgttgccccccaccccatcccgcacagaaccatccctgcattccacaggggactcgggcaagggtgccgaagatagacaagaggcacacagagacagaccaactggcagccaggcagccccagaggagagagacattcagacagaggaaagtctccctgcccctcattccttccaagatgagaaaaacttgccgccaccccccgacactgatgccagggaggtgggaggaagaagtgggaaatttcccttcccagtacccccaagaacgtctgagccttcaatgttgaattttttctttattaaaattacttttatcttataaaatcaactaatcaaaaatgatatagacgacagcactggctctgtgaaggtggcatctttctgggcaggcaggccatggggcatggaggagggtgcaaagatatgggttgctgtcttctggcctccagctgcatggaggccggcccagggtctagggtgtgcactgggcaagggcagggcggcaggtgtcaggccggcttggacaatgaaaccctgaccttgctgcattccttttgcttccaccaccactagcttctttggaatcttggggtgggggtcatctttggggattatggctgccacccgggatttgagtgtagggagtgtgggagcagccttggcagatggggcacccgtgccctgcaggtgttgacaagatccgccatctgtaatgtccttggcacaataaaaccaaatgtcagtttc

SEQ ID NO: 429411 - DNA, 2064 bp, Homo sapiens
ttgatgttttccagtcattccggctgacagcgttcaagttggaatcctggaggggaggtgtttttcctgtcgtacgtgggacaggccacgctgtccgtccgcagtaccgacgcctgcaggtcagagcttcggggagaaaagtgaagagcaagacggaactgacggggagaaaggctgggaaccagggtgtcgactttgactgaaatttgagacggagggcaccggagggcgagcactcgcctgtgattggcccgtgggcgtcgtcgaggtcccacgcagctgctcaattggttggtgttgcaattgttgtggcggcggcggcggcgattttgcccacgtacttccgagtaaggggcggggctgtgccctggcgcgcgtgcgcagcgccccggggccccacccggtagtgcaagaacctgcgagggggcggagcgaagaggtgcttgttttggttctgtttcctttgaagcagaaggccggaacaagcgtagcaataaacttgctggacttggagagaaggctaagacaaactcgccgcactgccttcatcttggactttacatccgggttctcctctcggcgtgacccgcgcgccgccaccgccgccgccgccgccgccgccgcctccgccgccgagggttctcgaaccggtgccgcgatccctttatccgggtctcgccgttcccgtcgtgcctcgcgcactacactagccccctcatccgggttctctcccggcgtgccccgcgccgggtttgttggggggtactcggcagtgcagccatgactatactccccaaaaagaagccgccgcctcccgacgccgaccccgccaacgagccgccgccgcccgggccgatgcccccggcgccgcggcgcggcggaggtgtgggcgtgggcggcggcggcacgggcgtgggcggcggcgatcgcgaccgtgactccggcgtcgtgggggcccgtccgcgagcttcgccaccgcctcaaggcccgctaccaggaccgccgggcgctcttcatcgctgggcgctggccgtgccgcctggtgcagtggcgggtccccggccacaacaggcttctccacctccttgcgggggcccaggtggtcccggcggcggtcccggcgacgcgctgggcgcagcggcggcgggtgtgggtgccgcgggcgtggtggtgggtgtgggtggtgccgtaggcgtgggcggctgctgctccgggcctgggcacagcaagcggcgacgtcaagctcccggggttggcgcggttggcgggggcagtcccgagcgtgaggaggtcggcgcaggctacaacagtgaggacgagtatgaggcggctgcagcacgcatcgaggctatggaccctgccactgtcgagcagcaggagcattggtttgaaaaggccctacgagacaagaagggcttcatcatcaagcagatgaaggaggatggcgcctgtctcttccgggctgtagctgaccaggtgtatggagaccaggacatgcatgaggttgtgcgaaagcattgcatggactatctgatgaagaatgccgactacttctccaactatgtcacagaggactttaccacctacattaacaggaagcggaaaaacaattgccatggcaaccacattgagatgcaggccatggcagagatgtacaaccgtcctgtggaggtgtaccagtacagcacagacttctgcagtgggtaggtgagggaaagatggtgcctcattcgagcctgcccaacctggcctgctgtggatgctccctccttctctttctctgcagaacccatcaacacattccatgggatacatcaaaacgaggacgaacccattcgtgttagctaccatcggaatatccactataattcagtggtgaatcctaacaaggccaccattggtgtggggctgggcctgccatcattcaaaccaggggtgagtgggtccctgtgcccagaatggctgctggatatagaggtcagaaacctctgttggagtctgttttgcccctaactcacaaaaatatcctgtctcctctctcccctgaggtctcacccttacaaa

SEQ ID NO: 429412 - DNA, 4600 bp, Homo sapiens
atgcagaagagcgtgcgctacaacgaggggcacgccctgtacctggcctttctggcgcgcaaggagggcaccaagcgcggcttcctgagtaagaagacggccgaggcgagccgctggcacgagaagtggttcgccctctaccagaatgtgctcttctacttcgagggcgagcagagctgccgcccggcgggcatgtacctcctggagggctgcagctgcgaacgaacgcccgcgccacccagggccggcgccgggcagggaggcgtccgagacgcgctggacaagcagtattactttactgttctttttggccatgaaggtcagaagccactggagctgcgctgtgaggaggagcaggatggtaaagagtggatggaggccattcaccaagccagttatgcagacattttgattgagagggaagtattaatgcagaagtacattcatctagttcagatcgtagagacagaaaaaattgcagctaaccaactccgacatcaacttgaagatcaagacacagaaatcgaaaggcttaaatcagagattattgctcttaataaaaccaaagaacgaatgcgaccttaccaaagcaaccaagaagacgaagatccagacatcaagaagattaaaaaggttcagagcttcatgcgaggatggttgtgcagaaggaaatggaagaccatcgtgcaggattacatttgttctcctcatgctgaaagtatgaggaagagaaaccagattgtgttcaccatggtggaggcagagtcagagtacgttcaccagctctacatcctggtcaatggctttctccggcccctgcgtatggccgccagctccaagaagccccccatcagccacgacgacgtcagcagtatttttcttaacagtgaaacaatcatgtttcttcatgaaatatttcatcaaggactaaaggcaaggatagcaaactggcccactttaattttagctgatctgtttgatattttgctccccatgctgaacatttatcaagaatttgtgcgtaatcaccagtacagcctgcaagttctcgccaattgtaagcaaaacagagattttgacaaactcttaaaacagtatgaagccaatccagcctgtgaggggaggatgctggagacattcttgacctatcccatgtttcagatccccagatatatcatcacactccatgagctccttgctcacacaccccatgagcatgtggaaaggaaaagcctggagtttgccaaatcaaagctagaggaactatccagagtaatgcacgatgaagtcagcgacactgaaaacataaggaaaaaccttgccatcgaaagaatgatcgtggagggctgtgacatcttgctggacaccagccaaacgttcatccgccaaggttctcttattcaagtaccttccgttgagagggggaaacttagtaaagttcgcctgggttcgttgtctttgaaaaaggaaggagagagacaatgcttcttatttacaaaacactttttaatatgtacaagaagttcaggagggaagcttcatctgctcaagacaggtggggttctgtctctaatagactgcacattgattgaggagccagatgcaagcgatgatgactctaaaggttctgggcaagtgtttgggcacctggattttaaaatagtggtggagcctcctgacgctgccgccttcactgttgtcttgttagcaccctcacgccaggagaaagctgcctggatgagtgacatcagtcagtgtgtggacaatatacgatgtaatggtttaatgactatagtgtttgaagagaattccaaagtcactgtgccacatatgattaagtctgatgcccgtcttcataaagacgacactgacatttgcttcagtaaaacactcaactcctgcaaagtgccccagatccgttatgccagcgtggagcgcctcttggaacgactgacagacttgcggtttcttagtattgatttcctcaacacctttctgcacacctatcgtattttcactactgccgctgtggtgctggggaaactctccgacatatacaagaggcctttcacctccatccctgtcaggtcattggaattgttttttgctaccagccagaacaacagaggtgaacatttggtggatggcaaatccccacgtctgtgtcgcaaattctcttccccgccaccactggctgtgtccagaacatcttccccagtgagggccagaaagctgtctttgacttctcccttgaactcaaagataggagcattggacctgacaacttccagcagtcccaccaccaccacccagagtcccgctgcgtctccaccaccacacactggtcagataccactggatctcagcagaggcctctcttctccagagcaaagcccgggaacggtagaagagaatgtcgataacccacgcgtggatctgtgtaacaagctaaaacgaagtattcaaaaagcagtcctagagtctgcaccagcggaccgagcaggagtggaaagctcccctgcagcggacaccacagaactttcaccttgcagatccccctcaactcctcggcacctccgctatcgacagcctggaggacagacggcggacaatgcccactgctctgtttcaccggcttctgcttttgcaatagccacagctgcagcaggacatgggagtccaccaggctttaacaacaccgagagaacatgtgataaagagtttattatacggagaacggctaccaatcgagttctgaacgtcctccgtcactgggtctcaaagcacgcacaggatttcgaactcaacaatgaactaaagatgaatgtcctaaatttgctagaagaagttttgcgagacccagaccttcttccccaagaaaggaaagccgccgcgaatatcctcagggccctttcacaagatgaccaagatgacatccacctaaaattagaggatataattcaaatgactgactgcatgaaggccgaatgctttgagtccttgtcggccatggagctggcagaacagatcaccctcctggaccatgtcattttcagaagcattccctacgaggagtttcttgggcaggggtggatgaagctggataaaaacgaaagaactccttacattatgaaaaccagccaacacttcaatgacatgagtaacctggtggcctcccagataatgaactatgctgatgtcagctcccgtgccaacgccatcgagaaatgggtggcagtggcggacatctgccgatgcctgcacaactacaacggcgtgctggagatcacctcggccttaaacagaagtgccatctacaggctgaagaaaacctgggccaaggtctctaagcagacaaaagctctaatggacaaacttcaaaagactgtttcctctgaaggaagatttaaaaatcttagagaaacccttaaaaattgtaaccctcctgcagttccttatcttgggatgtacttgacagacctggcatttattgaagaaggaacaccaaactttactgaggaaggccttgtcaatttctccaaaatgagaatgatatcacacatcatcagagagatacgccagttccagcagacttcctacagaatagatcatcagccaaaggtcgcacagtacttgcttgacaaagaccttatcatagatgaagatacgctatatgagctgtcactaaaaattgaacctcgactccctgcttgaagatctggccttgcccctgagtccacgggatgttcatggaaagcaggacagacagaattgtgtatgccttgcctatcacggtacagcacgaagccaggctcctttctccaccaaagaagatggaaccagactggaattctgtctccagagagaaacccagctgtttgggtcaaagacagatgcttcagacttgggtgggaaggtgaaagatggctatttagaaagctggtggcacgttttacataagggaatgtcagatgggagatgctagttgccattttaacaaagcaggtaaatcggtaaattttaaactctgtccatgttctgttagaactcagggacaaggatccatgaaaaagacctgtgatgtttctctggcgctttactggcctgggcacacctaccaatcttctaggatttgactggttccattacatttccttttggtataagcttcacagaaaagctgacacttcctctacagagatggaccaaaacataagcaatttcagtctacagcatgtgcatggttgtcagtgcattctaaatatttctatgtgaggaatggtaccttctgaaactgcctttccagtctttaggcaatgggataggaaagaaagaatgaaacacaaatggatttgtatgtaacatttccttaattaaatgcagtaggctgtgccccagaggattccagacagtggctggctgaggtgggtggggagcttttccttgagactgttggtcctaagaagccagcccttttggagaggcagctgcaaaaaggtgcacgcccatctcaccgacaaaactgtggaacagaaggccaccaagtgctgtggggaatcatgggtttcagtgctgagtgaaaatctatacctaaaaatca

SEQ ID NO: 429413 - DNA, 3773 bp, Homo sapiens
atgcagaagagcgtgcgctacaacgaggggcacgccctgtacctggcctttctggcgcgcaaggagggcaccaagcgcggcttcctgagtaagaagacggccgaggcgagccgctggcacgagaagtggttcgccctctaccagaatgtgctcttctacttcgagggcgagcagagctgccgcccggcgggcatgtacctcctggagggctgcagctgcgaacgaacgcccgcgccacccagggccggcgccgggcagggaggcgtccgagacgcgctggacaagcagtattactttactgttctttttggccatgaaggtcagaagccactggagctgcgctgtgaggaggagcaggatggtaaagagtggatggaggccattcaccaagccagttatgcagacattttgattgagagggaagtattaatgcagaagtacattcatctagttcagatcgtagagacagaaaaaattgcagctaaccaactccgacatcaacttgaagatcaagacacagaaatcgaaaggcttaaatcagagattattgctcttaataaaaccaaagaacgaatgcgaccttaccaaagcaaccaagaagacgaagatccagacatcaagaagattaaaaaggttcagagcttcatgcgaggatggttgtgcagaaggaaatggaagaccatcgtgcaggattacatttgttctcctcatgctgaaagtatgaggaagagaaaccagattgtgttcaccatggtggaggcagagtcagagtacgttcaccagctctacatcctggtcaatggctttctccggcccctgcgtatggccgccagctccaagaagccccccatcagccacgacgacgtcagcagtatttttcttaacagtgaaacaatcatgtttcttcatgaaatatttcatcaaggactaaaggcaaggatagcaaactggcccactttaattttagctgatctgtttgatattttgctccccatgctgaacatttatcaagaatttgtgcgtaatcaccagtacagcctgcaagttctcgccaattgtaagcaaaacagagattttgacaaactcttaaaacagtatgaagccaatccagcctgtgaggggaggatgctggagacattcttgacctatcccatgtttcagatccccagatatatcatcacactccatgagctccttgctcacacaccccatgagcatgtggaaaggaaaagcctggagtttgccaaatcaaagctagaggaactatccagagtaatgcacgatgaagtcagcgacactgaaaacataaggaaaaaccttgccatcgaaagaatgatcgtggagggctgtgacatcttgctggacaccagccaaacgttcatccgccaaggttctcttattcaagtaccttccgttgagagggggaaacttagtaaagttcgcctgggttcgttgtctttgaaaaaggaaggagagagacaatgcttcttatttacaaaacactttttaatatgtacaagaagttcaggagggaagcttcatctgctcaagacaggtggggttctgtctctaatagactgcacattgattgaggagccagatgcaagcgatgatgactctaaaggttctgggcaagtgtttgggcacctggattttaaaatagtggtggagcctcctgacgctgccgccttcactgttgtcttgttagcaccctcacgccaggagaaagctgcctggatgagtgacatcagtcagtgtgtggacaatatacgatgtaatggtttaatgactatagtgtttgaagagaattccaaagtcactgtgccacatatgattaagtctgatgcccgtcttcataaagacgacactgacatttgcttcagtaaaacactcaactcctgcaaagtgccccagatccgttatgccagcgtggagcgcctcttggaacgactgacagacttgcggtttcttagtattgatttcctcaacacctttctgcacacctatcgtattttcactactgccgctgtggtgctggggaaactctccgacatatacaagaggcctttcacctccatccctgtcaggtcattggaattgttttttgctaccagccagaacaacagaggtgaacatttggtggatggcaaatccccacgtctgtgtcgcaaattctcttccccgccaccactggctgtgtccagaacatcttccccagtgagggccagaaagctgtctttgacttctcccttgaactcaaagataggagcattggacctgacaacttccagcagtcccaccaccaccacccagagtcccgctgcgtctccaccaccacacactggtcagataccactggatctcagcagaggcctctcttctccagagcaaagcccgggaacggtagaagagaatgtcgataacccacgcgtggatctgtgtaacaagctaaaacgaagtattcaaaaagcagtcctagagtctgcaccagcggaccgagcaggagtggaaagctcccctgcagcggacaccacagaactttcaccttgcagatccccctcaactcctcggcacctccgctatcgacagcctggaggacagacggcggacaatgcccactgctctgtttcaccggcttctgcttttgcaatagccacagctgcagcaggacatgggagtccaccaggctttaacaacaccgagagaacatgtgataaagagtttattatacggagaacggctaccaatcgagttctgaacgtcctccgtcactgggtctcaaagcacgcacaggatttcgaactcaacaatgaactaaagatgaatgtcctaaatttgctagaagaagttttgcgagacccagaccttcttccccaagaaaggaaagccgccgcgaatatcctcagggccctttcacaagatgaccaagatgacatccacctaaaattagaggatataattcaaatgactgactgcatgaaggccgaatgctttgagtccttgtcggccatggagctggcagaacagatcaccctcctggaccatgtcattttcagaagcattccctacgaggagtttcttgggcaggggtggatgaagctggataaaaacgaaagaactccttacattatgaaaaccagccaacacttcaatgacatgagtaacctggtggcctcccagataatgaactatgctgatgtcagctcccgtgccaacgccatcgagaaatgggtggcagtggcggacatctgccgatgcctgcacaactacaacggcgtgctggagatcacctcggccttaaacagaagtgccatctacaggctgaagaaaacctgggccaaggtctctaagcagacaaaagctctaatggacaaacttcaaaagactgtttcctctgaaggaagatttaaaaatcttagagaaacccttaaaaagtatgtctatcttaattattaaattattcataattcagaaatatatttacataatgtatatagtatacaaacagtgacctaccacctactttgctttgaaaagaaaaataaatgggaaacaacttgtatcatctaggtatttttctgattgtccttattatttggaatactgtgcatacagtaattgtcttatggatatactcatggcatgcagattaagaattaagaaggtaataccaccataataaatcggactatcttttactgtaaaaatgttcttgattcagttatttcctaatctaagcacaattatttcctgtgagttttatttaaatattc

SEQ ID NO: 429414 - DNA, 2065 bp, Homo sapiens
atgcagaagagcgtgcgctacaacgaggggcacgccctgtacctggcctttctggcgcgcaaggagggcaccaagcgcggcttcctgagtaagaagacggccgaggcgagccgctggcacgagaagtggttcgccctctaccagaatgtgctcttctacttcgagggcgagcagagctgccgcccggcgggcatgtacctcctggagggctgcagctgcgaacgaacgcccgcgccacccagggccggcgccgggcagggaggcgtccgagacgcgctggacaagcagtattactttactgttctttttggccatgaaggtcagaagccactggagctgcgctgtgaggaggagcaggatggtaaagagtggatggaggccattcaccaagccagttatgcagacattttgattgagagggaagtattaatgcagaagtacattcatctagttcagatcgtagagacagaaaaaattgcagctaaccaactccgacatcaacttgaagatcaagacacagaaatcgaaaggcttaaatcagagattattgctcttaataaaaccaaagaacgaatgcgaccttaccaaagcaaccaagaagacgaagatccagacatcaagaagattaaaaaggttcagagcttcatgcgaggatggttgtgcagaaggaaatggaagaccatcgtgcaggattacatttgttctcctcatgctgaaagtatgaggaagagaaaccagattgtgttcaccatggtggaggcagagtcagagtacgttcaccagctctacatcctggtcaatggctttctccggcccctgcgtatggccgccagctccaagaagccccccatcagccacgacgacgtcagcagtatttttcttaacagtgaaacaatcatgtttcttcatgaaatatttcatcaaggactaaaggcaaggatagcaaactggcccactttaattttagctgatctgtttgatattttgctccccatgctgaacatttatcaagaatttgtgcgtaatcaccagtacagcctgcaagttctcgccaattgtaagcaaaacagagattttgacaaactcttaaaacagtatgaagccaatccagcctgtgaggggaggatgctggagacattcttgacctatcccatgtttcagatccccagatatatcatcacactccatgagctccttgctcacacaccccatgagcatgtggaaaggaaaagcctggagtttgccaaatcaaagctagaggaactatccagagtaatgcacgatgaagtcagcgacactgaaaacataaggaaaaaccttgccatcgaaagaatgatcgtggagggctgtgacatcttgctggacaccagccaaacgttcatccgccaagggaccatgaaaaacagcaacacaatcatagtaaagcacgagtggggcaggcagttacattctgactggacgctcctcctcagcggcccggacattctctgcagctccaaggaggaccggtcggcctggcccacggccgtggcagtgccaagtgctgacgatacccaggccaaggcccaggagaaacttgcgttgctcaaagccctttcacataagactggggaccatgtccgaagtgaaaacagctgtctgttgttcccatttttcatcagcacttccggatccgccccacacgatataatttgattcaactggtaactcccgttgccagatgaaatgtctctgatggacacttgccacgctttggtaatgcagaagctgtcgtgtttgcgaagtgtgctttgggggcatcactcgataaattaagcttttgaagagttgaagatatttgtgccggaaactgtggagaagcaacagcctgacagtgcctatttctcctcggctgttatttcaaaatgcaagacgtaaaccacatcccaagttatttttttagtgcttaggtcctctgggggaggggagaatgccccaggcaattgatttgagacaatatattgcacacatttataattttgaatttggtgaggagtggaatataaatttggaactcaaattaatc

SEQ ID NO: 429415 - DNA, 1831 bp, Homo sapiens
atgcagaagagcgtgcgctacaacgaggggcacgccctgtacctggcctttctggcgcgcaaggagggcaccaagcgcggcttcctgagtaagaagacggccgaggcgagccgctggcacgagaagtggttcgccctctaccagaatgtgctcttctacttcgagggcgagcagagctgccgcccggcgggcatgtacctcctggagggctgcagctgcgaacgaacgcccgcgccacccagggccggcgccgggcagggaggcgtccgagacgcgctggacaagcagtattactttactgttctttttggccatgaaggtcagaagccactggagctgcgctgtgaggaggagcaggatggtaaagagtggatggaggccattcaccaagccagttatgcagacattttgattgagagggaagtattaatgcagaagtacattcatctagttcagatcgtagagacagaaaaaattgcagctaaccaactccgacatcaacttgaagatcaagacacagaaatcgaaaggcttaaatcagagattattgctcttaataaaaccaaagaacgaatgcgaccttaccaaagcaaccaagaagacgaagatccagacatcaagaagattaaaaaggttcagagcttcatgcgaggatggttgtgcagaaggaaatggaagaccatcgtgcaggattacatttgttctcctcatgctgaaagtatgaggaagagaaaccagattgtgttcaccatggtggaggcagagtcagagtacgttcaccagctctacatcctggtcaatggctttctccggcccctgcgtatggccgccagctccaagaagccccccatcagccacgacgacgtcagcagtatttttcttaacagtgaaacaatcatgtttcttcatgaaatatttcatcaaggactaaaggcaaggatagcaaactggcccactttaattttagctgatctgtttgatattttgctccccatgctgaacatttatcaagaatttgtgcgtaatcaccagtacagcctgcaagttctcgccaattgtaagcaaaacagagattttgacaaactcttaaaacagtatgaagccaatccagcctgtgaggggaggatgctggagacattcttgacctatcccatgtttcagatccccagatatatcatcacactccatgagctccttgctcacacaccccatgagcatgtggaaaggaaaagcctggagtttgccaaatcaaagctagaggaactatccagagtaatgcacgatgaagtcagcgacactgaaaacataaggaaaaaccttgccatcgaaagaatgatcgtggagggctgtgacatcttgctggacaccagccaaacgttcatccgccaaggttctcttattcaagtaccttccgttgagagggggaaacttagtaaagttcgcctgggttcgttgtctttgaaaaaggaaggagagagacaatgcttcttatttacaaaacactttttaatatgtacaagaagttcaggagggaagcttcatctgctcaagacaggtggggttctgtctctaatagactgcacattgattgaggagccagatgcaagcgatgatgactctaaaggttctgggcaagtgtttgggcacctggattttaaaatagtggtggagcctcctgacgctgccgccttcactgttgtcttgttagcaccctcacgccaggagaaagctgcctggatgagtgacatcagtcagcgctctaaacatcctctacaagagtgccttatgctggacttttacttatataccctcaggatggcttcaatggcaa

SEQ ID NO: 429416 - DNA, 2355 bp, Homo sapiens
ttcattcactcattcattcattcatcatttatttttttaaaagatatttattgagagctgaataacatgtatgagattcagggccaaaagtgtctgaggaaagtccatctggaatgcaagggggaagaagctatctgctggctcctgcctggcattgttcagagtcttgccacataggaaccccctgtgcttctggtcaacgtaagcttgaaaaaggggtggccctgcgtctcctgcctctgtgagggcagggaaagcccacggtaggggatagaggtgtggggaggagggcactcaggcctaggagtccaactggctgatagcattagaggatgctccattttacattatggatggtaactcagagctcacccagctcaccctcagactcactgtgacggtggttgtttcatttacaaccttgtatgtaacaggttgcctttttgttctaaatcagctgtcctgatgattctctcatgccttgagcatgttttctgtttggggattgctcatctccagctcagcagttggttgtgctgcatggccttgtagacccaaatcctcagacctcccatccagggaaaaccaaactgcatttgtagttttgttcctaggtcgtctattttttctttcatggaggataatttgatatctttttcagggccctttcacaagatgaccaagatgacatccacctaaaattagaggatataattcaaatgactgactgcatgaaggccgaatgctttgagtccttgtcggccatggagctggcagaacagatcaccctcctggaccatgtcattttcagaagcattccctacgaggagtttcttgggcaggggtggatgaagctggataaaaacgaaagaactccttacattatgaaaaccagccaacacttcaatgacatgagtaacctggtggcctcccagataatgaactatgctgatgtcagctcccgtgccaacgccatcgagaaatgggtggcagtggcggacatctgccgatgcctgcacaactacaacggcgtgctggagatcacctcggccttaaacagaagtgccatctacaggctgaagaaaacctgggccaaggtctctaagcagacaaaagctctaatggacaaacttcaaaagactgtttcctctgaaggaagatttaaaaatcttagagaaacccttaaaaattgtaaccctcctgcagttccttatcttgggatgtacttgacagacctggcatttattgaagaaggaacaccaaactttactgaggaaggccttgtcaatttctccaaaatgagaatgatatcacacatcatcagagagatacgccagttccagcagacttcctacagaatagatcatcagccaaaggtcgcacagtacttgcttgacaaagaccttatcatagatgaagatacgctatatgagctgtcactaaaaattgaacctcgactccctgcttgaagatctggccttgcccctgagtccacgggatgttcatggaaagcaggacagacagaattgtgtatgccttgcctatcacggtacagcacgaagccaggctcctttctccaccaaagaagatggaaccagactggaattctgtctccagagagaaacccagctgtttgggtcaaagacagatgcttcagacttgggtgggaaggtgaaagatggctatttagaaagctggtggcacgttttacataagggaatgtcagatgggagatgctagttgccattttaacaaagcaggtaaatcggtaaattttaaactctgtccatgttctgttagaactcagggacaaggatccatgaaaaagacctgtgatgtttctctggcgctttactggcctgggcacacctaccaatcttctaggatttgactggttccattacatttccttttggtataagcttcacagaaaagctgacacttcctctacagagatggaccaaaacataagcaatttcagtctacagcatgtgcatggttgtcagtgcattctaaatatttctatgtgaggaatggtaccttctgaaactgcctttccagtctttaggcaatgggataggaaagaaagaatgaaacacaaatggatttgtatgtaacatttccttaattaaatgcagtaggctgtgccccagaggattccagacagtggctggctgaggtgggtggggagcttttccttgagactgttggtcctaagaagccagcccttttggagaggcagctgcaaaaaggtgcacgcccatctcaccgacaaaactgtggaacagaaggccaccaagtgctgtggggaatcatgggtttcagtgctgagtgaaaatctatacctaaaaatca

SEQ ID NO: 429417 - DNA, 1473 bp, Homo sapiens
gtttacaagtattgcaaacaattactgctagcaaatgctttgtatttgtctctaagatatcctgttgtttgaatatgccattttttttcaaacacgtagtaaagcaggggctgtcattttgtattatattctactgtgaaatgtgtttaaaattctgcgtattatgaatatgcttctgaaactgaaataaaaaggttttgctcttcagtaccaaaggaggatactttaatcctcctttgtttaatttggggagggaaatagacatttattcaaatgagtctcagaacagtgcctcttggtcttgcagttgtaaccctcctgcagttccttatcttgggatgtacttgacagacctggcatttattgaagaaggaacaccaaactttactgaggaaggccttgtcaatttctccaaaatgagaatgatatcacacatcatcagagagatacgccagttccagcagacttcctacagaatagatcatcagccaaaggtcgcacagtacttgcttgacaaagaccttatcatagatgaagatacgctatatgagctgtcactaaaaattgaacctcgactccctgcttgaagatctggccttgcccctgagtccacgggatgttcatggaaagcaggacagacagaattgtgtatgccttgcctatcacggtacagcacgaagccaggctcctttctccaccaaagaagatggaaccagactggaattctgtctccagagagaaacccagctgtttgggtcaaagacagatgcttcagacttgggtgggaaggtgaaagatggctatttagaaagctggtggcacgttttacataagggaatgtcagatgggagatgctagttgccattttaacaaagcaggtaaatcggtaaattttaaactctgtccatgttctgttagaactcagggacaaggatccatgaaaaagacctgtgatgtttctctggcgctttactggcctgggcacacctaccaatcttctaggatttgactggttccattacatttccttttggtataagcttcacagaaaagctgacacttcctctacagagatggaccaaaacataagcaatttcagtctacagcatgtgcatggttgtcagtgcattctaaatatttctatgtgaggaatggtaccttctgaaactgcctttccagtctttaggcaatgggataggaaagaaagaatgaaacacaaatggatttgtatgtaacatttccttaattaaatgcagtaggctgtgccccagaggattccagacagtggctggctgaggtgggtggggagcttttccttgagactgttggtcctaagaagccagcccttttggagaggcagctgcaaaaaggtgcacgcccatctcaccgacaaaactgtggaacagaaggccaccaagtgctgtggggaatcatgggtttcagtgctgagtgaaaatctatacctaaaaatca

SEQ ID NO: 429418 - DNA, 877 bp, Homo sapiens
atgcagaagagcgtgcgctacaacgaggggcacgccctgtacctggcctttctggcgcgcaaggagggcaccaagcgcggcttcctgagtaagaagacggccgaggcgagccgctggcacgagaagtggttcgccctctaccagaatgtgctcttctacttcgagggcgagcagagctgccgcccggcgggcatgtacctcctggagggctgcagctgcgaacgaacgcccgcgccacccagggccggcgccgggcagggaggcgtccgagacgcgctggacaagcagtattactttactgttctttttggccatgaaggtcagaagccactggagctgcgctgtgaggaggagcaggatggtaaagagtggatggaggccattcaccaagccagttatgcagacattttgattgagagggaagtattaatgcagaagtacattcatctagttcagatcgtagagacagaaaaaattgcagctaaccaactccgacatcaacttgaagatcaagacacagaaatcgaaaggcttaaatcagaggtatttcccagtcaatagattccttctcattgtttcacgtttaccgtcatttcctcatgattacttaaggcctattcagggcaacattttaatcccaggctgacttcctctgacatcaacacatacgtggctgggcctgacctagacatgaatctaatgtctatattaggattaagtaaatgtgctacaggaacatatcaggataatgtgcttttttttttttttggtggggggtggttatttgttctcctgatacccttcattagctcagaaattcaagaattgattatagcatttaactgttttcagataccctacagtaatgataattatg

SEQ ID NO: 429419 - DNA, 531 bp, Homo sapiens
taagctgaaagttaacatttatgtcaagtagagatagctgaacaaacaatgctcataacttctttttcaaatgtagcatattatattctatatggaactctatatagtagaacaatatctcaatgactaactgtgtaattttctctcaagttatgcagacattttgattgagagggaagtattaatgcagaagtacattcatctagttcagatcgtagagacagaaaaaattgcagctaaccaactccgacatcaacttgaagatcaagacacagaaatcgaaaggcttaaatcagaggtatttcccagtcaatagattccttctcattgtttcacgtttaccgtcatttcctcatgattacttaaggcctattcagggcaacattttaatcccaggctgacttcctctgacatcaacacatacgtggctgggcctgacctagacatgaatctaatgtctatattaggattaagtaaatgtgctacaggaacatatcaggataatgtgcttttttttttttttggtggggg

SEQ ID NO: 429420 - DNA, 3592 bp, Homo sapiens
  misc_feature (669)..(669): n is a, c, g, or t
  misc_feature (1769)..(1769): n is a, c, g, or t
  misc_feature (2739)..(2739): n is a, c, g, or t
  misc_feature (3101)..(3101): n is a, c, g, or t
aaggacagagatttccatctgttttgttcaatgctatgtctctagggcctagaacagagcctgggaccccataaggtgctgaataaataggggttcagtgaattcattaattacatttctgcaagatggggtggcatgttgtcatcttcagccattttttttttcttcgattgcattatatttggaacaggcacgatggtgacatctgtaatcccaactacttgggaggctgaggctagaggattccttgagcccaggaattcaaggctaaagtgtgctatgatcacacctgtgaatagcactgcactccagcctgggcaacacataagacctctctctttaaatgtaaaaaaaaaagtctgcgtgcagtggcttatgcctgtaatcccagcactttgggaggctgaggcaggtggatcacctgaggtcaggagttcaagaccagcctggcgaacacagtgaaaccctgtctctactacaaatataaaaaaaagaaaaaacattagctggatgtggtggtgcatgcctgtaatcccagctacttgggaggctgaggcaggagaatcgcttgaatctgggaggcagaggttgcagtgagccaagatcgcaccattgcactccagcctgggtgatagaatgagactctgtctcaaaaaaaaaaaaaaaaanaaaaaaagatttgatggagctgtctccaaaattaagaagaggatgaaaggagctgacccagacactcaagcagggctaattattccccttttacagatgtggaagactgaggcctgttgaaagtgcagagctcagccctggcaccctctgttcccaagagctccatgcaggtgccacaggatggagaagaccttgctggccaaccttggtaccacggcctcctgtcccgccagaaggctgaagctcttcttcagcaaaatggcgacttcctggttcgcgcctctgggtcccgtgggggcaaccccgtgatctcctgccgctggcggggctcagccctccattttgaggtgttccgtgtggccctgcgtccccggccaggccgacccacagccctctttcaactggaggatgagcaattccccagcataccggctctggttcacagttatatgacaggcaggcgcccactgtcccaggccacaggggctgtggtctccaggcctgtgacttggcaggggcctctgcgacgcagctttagcgaggacaccctgatggatggcccagctcggatagagcctctcagggcaaggaagtggagcaacagtcagcctgcagatttggcacatatggggcggtcaagagaagaccccgctgggatgggtaagtgtctgctagaatggcctgtggctcagggattggctctgccactcaccacctaagagatcttggtcaggtgcaggcacctcttcgagcctcaatttcttgctttagaaaatgatgacaatcacgatgacttaaaacatgcagggactttgtgggtgcttaaaatgtgtgtttacaaggctgagcgcggtggctcatgcctgtaatcccagcactttgggaggccgaggccggtggatcacttgaggtcaggaattcgagaccagccttgccaacatggtgaaaccccatctccactaaaaacacaaaattagccgagcgtggtggcacgcacctgtaatcccagctactctggaggctgcggcaggagaatcgcttgaacctgggaggtggaggttgcagtgagccgagatggcgctaccgcactccagactggntgacagaacaaaactccatctcaaaaaaaaaaaaagtgtttacaattattccaaggagctgtacctgttctgaccacagcttaccttgctaacaacttctgctacgtaccctcctcatgctggtcacacagccctccttgcagttgttcgaaccctcaggcttttattcccgcctcggggcctttgcattttacatttccaccagtgacgggaacattctcattcccctaattttttcctgagtggctcctctccatccagggtaagttcctcaaagcagttgagtctgacggtcttacctaaaggaggactcacctgaatgccccctcatgccccttttttcccatccttctcccaaccccattcaacatgagccgtccctgcatcccaggccctgcacggagtgctaggatacatcaacaaaccagaaagagacaaagatccctgcccgatgggagccaacagtccacgagaggacaacaaaccatgaaccacaaaaataaggcaattttgtttgcttcaagatgaaaattaaaacacaggaagggaaggccaggcacagtggctcaggcctgtaatcccagcactttggaaggccaaggcgggcggatcacctaaagtcaggagttcgagaccagcctggccaacatggcgaaaccccgtctctactaaaactacaaaaattagccgggcgtggtggtacacacctgtaatcccagctactcgggagactcgggaggctgaggcacgagaattgcttgaacccgggaggcagaggttgccgtgagccaagattgcaccactgcactccagcctggacaacagagtgagactctgtctcaaaaaacaaacaaacaaacaaaaaacagtaagggaagggtgaggtggctcaggtctgtaatcctagcactttgggaggccaaggtgggcggatcacttgaggtcaggagttcgagaccagcctggccancatggtgaaaacccatctctactaaaaaaaaataaaataaaataaaatacaaaaattagccaggtgtagtggcatatgcctgtaatccaagctacttgggacagagtgagactgtctcaaaaaaaccgaaaaaacaaaaacaaaacaaaacaaaaaaaacagagtaagggagatagagactataaagatggagatgtatattgcaattttattttatttctatttatttatttatttttgagatagagttttgctcttgttgcccaggatggagtgcaatggcgtgataccggctcactgcaacctccacctcctgggttcaagtgattctcctgcctcagcctcccgagtagctgggattncaggcatgtgcaccacgccctgctaattttgtatttttagtggagatggggtttccccatgttggtcaggctggtctcgaactcctgacctcaggtgatccacccacctcaacctcccaaagtgctgggattacaggcgtgagccattgtacccaagcaagcaattttaagtggtagtcaggaaaggccccattgcagaaaaaaataaaattgaaggaaatgagggagggaacaggtggataactgggggataagcaggcaggaggaagaggcagtgcaaaggctcttgggtcagaacaagaatttaagctgttcattcaaccaaaaaatgagtgggtagctgggtgtggtgttgcacgcctgtggtcctagccacttgggaggttgaagcaggaggactccttgaacccagaaagtcaaggctgcagtgagccgtgatcgcaccattgcactccagcctgggccacagagtgagaccctgactcaaattt

SEQ ID NO: 429421 - DNA, 1918 bp, Homo sapiens
  misc_feature (1065)..(1065): n is a, c, g, or t
  misc_feature (1427)..(1427): n is a, c, g, or t
cctgggaggctgagctaggaggatcatttgtagtccaggaggttacggctgcagatgagccgtgatatgcactattgcacttcaacctgggcaacacaagccagaccatagtctcttaaaaaaaaaaaaagtgtttacaattattccaaggagctgtacctgttctgaccacagcttaccttgctaacaacttctgctacgtaccctcctcatgctggtcacacagccctccttgcagttgttcgaaccctcaggcttttattcccgcctcggggcctttgcattttacatttccaccagtgacgggaacattctcattcccctaattttttcctgagtggctcctctccatccagggtaagttcctcaaagcagttgagtctgacggtcttacctaaaggaggactcacctgaatgccccctcatgccccttttttcccatccttctcccaaccccattcaacatgagccgtccctgcatcccaggccctgcacggagtgctaggatacatcaacaaaccagaaagagacaaagatccctgcccgatgggagccaacagtccacgagaggacaacaaaccatgaaccacaaaaataaggcaattttgtttgcttcaagatgaaaattaaaacacaggaagggaaggccaggcacagtggctcaggcctgtaatcccagcactttggaaggccaaggcgggcggatcacctaaagtcaggagttcgagaccagcctggccaacatggcgaaaccccgtctctactaaaactacaaaaattagccgggcgtggtggtacacacctgtaatcccagctactcgggagactcgggaggctgaggcacgagaattgcttgaacccgggaggcagaggttgccgtgagccaagattgcaccactgcactccagcctggacaacagagtgagactctgtctcaaaaaacaaacaaacaaacaaaaaacagtaagggaagggtgaggtggctcaggtctgtaatcctagcactttgggaggccaaggtgggcggatcacttgaggtcaggagttcgagaccagcctggccancatggtgaaaacccatctctactaaaaaaaaataaaataaaataaaatacaaaaattagccaggtgtagtggcatatgcctgtaatccaagctacttgggacagagtgagactgtctcaaaaaaaccgaaaaaacaaaaacaaaacaaaacaaaaaaaacagagtaagggagatagagactataaagatggagatgtatattgcaattttattttatttctatttatttatttatttttgagatagagttttgctcttgttgcccaggatggagtgcaatggcgtgataccggctcactgcaacctccacctcctgggttcaagtgattctcctgcctcagcctcccgagtagctgggattncaggcatgtgcaccacgccctgctaattttgtatttttagtggagatggggtttccccatgttggtcaggctggtctcgaactcctgacctcaggtgatccacccacctcaacctcccaaagtgctgggattacaggcgtgagccattgtacccaagcaagcaattttaagtggtagtcaggaaaggccccattgcagaaaaaaataaaattgaaggaaatgagggagggaacaggtggataactgggggataagcaggcaggaggaagaggcagtgcaaaggctcttgggtcagaacaagaatttaagctgttcattcaaccaaaaaatgagtgggtagctgggtgtggtgttgcacgcctgtggtcctagccacttgggaggttgaagcaggaggactccttgaacccagaaagtcaaggctgcagtgagccgtgatcgcaccattgcactccagcctgggccacagagtgagaccctgactcaaattt

SEQ ID NO: 429422 - DNA, 2371 bp, Homo sapiens
cgggggtgacagcagcccggagccgcggagcctcagcttccgcctggacccagcctcgtgggagccccgcgggtcctgcccagatgtggaagactgaggcctgttgaaagtgcagagctcagccctggcaccctctgttcccaagagctccatgcaggtgccacaggatggagaagaccttgctggccaaccttggtaccacggcctcctgtcccgccagaaggctgaagctcttcttcagcaaaatggcgacttcctggttcgcgcctctgggtcccgtgggggcaaccccgtgatctcctgccgctggcggggctcagccctccattttgaggtgttccgtgtggccctgcgtccccggccaggccgacccacagccctctttcaactggaggatgagcaattccccagcataccggctctggttcacagttatatgacaggcaggcgcccactgtcccaggccacaggggctgtggtctccaggcctgtgacttggcaggggcctctgcgacgcagctttagcgaggacaccctgatggatggcccagctcggatagagcctctcagggcaaggaagtggagcaacagtcagcctgcagatttggcacatatggggcggtcaagagaagaccccgctgggatggaagcctccaccatgcccatatctgccttgccccgaacgagcagtgacccggtgttgctgaaggcccctgctcccctgggaactgttgccgacagtctcagggcctccgatgggcagcttcaagccaaggcaccaacgaagcccccccggacaccctccttcgaactgcctgatgcctctgaacgtcccccgacgtactgcgagctggtgccccgagtgcccagtgtccagggaacatccccgagccaaagctgcccagagccagaggccccatggtgggaggccgaggaggatgaggaggaagagaatagatgttttacaagaccacaggctgagatctctttctgcccccatgatgccccctcctgcctgctgggcccccagaatcggcccctggaaccccaagtcctgcataccctccgtggcctgttcctggagcaccatcctgggagcaccgcccttcacctgctattggtagactgccaggccacaggcctcctgggagtgaccagagatcagcggggcaacatgggagtctcatctggcctggagctgctcactcttccccatggacaccacttgaggttggaactgctggagaggcatcagacactggcgctggccggggcgctggcggtgctgggctgctcggggccgctggaggagcgcgcagccgcactgaggggactggtagagctggcgctggcgctgcggccaggggcggcgggggacctgcccgggctggctgcagtcatgggcgccctgctcatgccccaggtgtcccggttggagcacacgtggcgccagctccgaaggagccacacggaggctgcgctggcctttgagcaggagctgaagccgctgatgcgggctctggatgagggcgctggaccctgcgaccccggcgaggtggcgctgccgcacgtggcacccatggttcgcctactggagggcgaggaagtcgcggggccgctggacgagagctgtgagcggctgttgcgcaccctgcacggggcgcgtcacatggtccgggacgcacccaaattccgcaaggtggcagcccagcgcctgcgaggtgagcgttccctctgcgctggactgcagacttcagagcaccctgcaggattccggcctaacccggagctgagggaggccctgaccaccggcttcgtgcggaggctgctctggggtagccggggcgcgggagctccgcgcgctgaacgctttgagaagttccagcgcgtcctcggcgtcctgtcgcagcgcctggagcctgaccgctgagagcgcagacacccttcttcacacccgggacccccaggtttttgcgaaccccagaagagaccaaaggagtcgtcccaggctcctcgcgcctcaggtggaatcctgccctgtgcctcacagaagaggtggggaccgcagtcagggtcacctggaccatggtgaacatgtgacctgcagatctggcatcagaggccagagttcaaatgtgactccacctcttaaaagccgtgatttctagcagttgacttcacctctgtgtcggcctttaacaaaatcatagccatacagcagctcaggcctgtaatctcagcactttgggaggccgaggcggaaggaaggcttgaggccaggagttcaagaccagccagggcaacatggtgagacctcatctctacaaaaactgaaaaataaaaaacttttaaaaaatgtaaaaaaaaaaac

SEQ ID NO: 429423 - DNA, 2980 bp, Homo sapiens
  misc_feature (669)..(669): n is a, c, g, or t
aaggacagagatttccatctgttttgttcaatgctatgtctctagggcctagaacagagcctgggaccccataaggtgctgaataaataggggttcagtgaattcattaattacatttctgcaagatggggtggcatgttgtcatcttcagccattttttttttcttcgattgcattatatttggaacaggcacgatggtgacatctgtaatcccaactacttgggaggctgaggctagaggattccttgagcccaggaattcaaggctaaagtgtgctatgatcacacctgtgaatagcactgcactccagcctgggcaacacataagacctctctctttaaatgtaaaaaaaaaagtctgcgtgcagtggcttatgcctgtaatcccagcactttgggaggctgaggcaggtggatcacctgaggtcaggagttcaagaccagcctggcgaacacagtgaaaccctgtctctactacaaatataaaaaaaagaaaaaacattagctggatgtggtggtgcatgcctgtaatcccagctacttgggaggctgaggcaggagaatcgcttgaatctgggaggcagaggttgcagtgagccaagatcgcaccattgcactccagcctgggtgatagaatgagactctgtctcaaaaaaaaaaaaaaaaanaaaaaaagatttgatggagctgtctccaaaattaagaagaggatgaaaggagctgacccagacactcaagcagggctaattattccccttttacagatgtggaagactgaggcctgttgaaagtgcagagctcagccctggcaccctctgttcccaagagctccatgcaggtgccacaggatggagaagaccttgctggccaaccttgaaggctgaagctcttcttcagcaaaatggcgacttcctggttcgcgcctctgggtcccgtgggggcaaccccgtgatctcctgccgctggcggggctcagccctccattttgaggtgttccgtgtggccctgcgtccccggccaggccgacccacagccctctttcaactggaggatgagcaattccccagcataccggctctggttcacagttatatgacaggcaggcgcccactgtcccaggccacaggggctgtggtctccaggcctgtgacttggcaggggcctctgcgacgcagctttagcgaggacaccctgatggatggcccagctcggatagagcctctcagggcaaggaagtggagcaacagtcagcctgcagatttggcacatatggggcggtcaagagaagaccccgctgggatggaagcctccaccatgcccatatctgccttgccccgaacgagcagtgacccggtgttgctgaaggcccctgctcccctgggaactgttgccgacagtctcagggcctccgatgggcagcttcaagccaaggcaccaacgaagcccccccggacaccctccttcgaactgcctgatgcctctgaacgtcccccgacgtactgcgagctggtgccccgagtgcccagtgtccagggaacatccccgagccaaagctgcccagagccagaggccccatggtgggaggccgaggaggatgaggaggaagagaatagatgttttacaagaccacaggctgagatctctttctgcccccatgatgccccctcctgcctgctgggcccccagaatcggcccctggaaccccaagtcctgcataccctccgtggcctgttcctggagcaccatcctgggagcaccgcccttcacctgctattggtagactgccaggccacaggcctcctgggagtgaccagagatcagcggggcaacatgggagtctcatctggcctggagctgctcactcttccccatggacaccacttgaggttggaactgctggagaggcatcagacactggcgctggccggggcgctggcggtgctgggctgctcggggccgctggaggagcgcgcagccgcactgaggggactggtagagctggcgctggcgctgcggccaggggcggcgggggacctgcccgggctggctgcagtcatgggcgccctgctcatgccccaggtgtcccggttggagcacacgtggcgccagctccgaaggagccacacggaggctgcgctggcctttgagcaggagctgaagccgctgatgcgggctctggatgagggcgctggaccctgcgaccccggcgaggtggcgctgccgcacgtggcacccatggttcgcctactggagggcgaggaagtcgcggggccgctggacgagagctgtgagcggctgttgcgcaccctgcacggggcgcgtcacatggtccgggacgcacccaaattccgcaaggtggcagcccagcgcctgcgaggattccggcctaacccggagctgagggaggccctgaccaccggcttcgtgcggaggctgctctggggtagccggggcgcgggagctccgcgcgctgaacgctttgagaagttccagcgcgtcctcggcgtcctgtcgcagcgcctggagcctgaccgctgagagcgcagacacccttcttcacacccgggacccccaggtttttgcgaaccccagaagagaccaaaggagtcgtcccaggctcctcgcgcctcaggtggaatcctgccctgtgcctcacagaagaggtggggaccgcagtcagggtcacctggaccatggtgaacatgtgacctgcagatctggcatcagaggccagagttcaaatgtgactccacctcttaaaagccgtgatttctagcagttgacttcacctctgtgtcggcctttaacaaaatcatagccatacagcagctcaggcctgtaatctcagcactttgggaggccgaggcggaaggaaggcttgaggccaggagttcaagaccagccagggcaacatggtgagacctcatctctacaaaaactgaaaaataaaaaacttttaaaaaatgtaaaaaaaaaaac

SEQ ID NO: 429424 - DNA, 798 bp, Homo sapiens
gtaagtgaaggtctggggcttagcatcccctgggggcccagaccaaatttaacaggactcaatctagtcctatgcccagtccctgcatctgttctaggcccggtcccttcaccataggccccgccctccacatgagggttggtcctggccctttccctaggccccgccctccacacgagacttgttcctaggccacgcccccaccagccttggtcccagcccctttccctaggctacgccccttcgccataggccccgccctccatacggggcgtgtggtcctggcccctctccacagaccccgctgtcgctcagtcctaagccccgcccctgcatttgtcctaggttccacctctgccctatgccccatctacagccccaaaccctgatcagaccctccccctccgcaggaccctgcgaccccggcgaggtggcgctgccgcacgtggcacccatggttcgcctactggagggcgaggaagtcgcggggccgctggacgagagctgtgagcggctgttgcgcaccctgcacggggcgcgtcacatggtccgggacgcacccaaattccgcaaggtggcagcccagcgcctgcgaggtgagcgttccctctgcgctggactgcagacttcagagcaccctgcaggttctaaccggatcccccaaacccagcctgtcccaggaggggagcctctcgccacgcctcccggagccccacccaaactgggacggctccactccaggaaggttctcaccccaagcaaacgctgcatccagcggtattgataggaacagggccg

SEQ ID NO: 429425 - DNA, 2323 bp, Homo sapiens
cgggggtgacagcagcccggagccgcggagcctcagcttccgcctggacccagcctcgtgggagccccgcgggtcctgcccagatgtggaagactgaggcctgttgaaagtgcagagctcagccctggcaccctctgttcccaagagctccatgcaggtgccacaggatggagaagaccttgctggccaaccttggtaccacggcctcctgtcccgccagaaggctgaagctcttcttcagcaaaatggcgacttcctggttcgcgcctctgggtcccgtgggggcaaccccgtgatctcctgccgctggcggggctcagccctccattttgaggtgttccgtgtggccctgcgtccccggccaggccgacccacagccctctttcaactggaggatgagcaattccccagcataccggctctggttcacagttatatgacaggcaggcgcccactgtcccaggccacaggggctgtggtctccaggcctgtgacttggcaggggcctctgcgacgcagctttagcgaggacaccctgatggatggcccagctcggatagagcctctcagggcaaggaagtggagcaacagtcagcctgcagatttggcacatatggggcggtcaagagaagaccccgctgggatggaagcctccaccatgcccatatctgccttgccccgaacgagcagtgacccggtgttgctgaaggcccctgctcccctgggaactgttgccgacagtctcagggcctccgatgggcagcttcaagccaaggcaccaacgaagcccccccggacaccctccttcgaactgcctgatgcctctgaacgtcccccgacgtactgcgagctggtgccccgagtgcccagtgtccagggaacatccccgagccaaagctgcccagagccagaggccccatggtgggaggccgaggaggatgaggaggaagagaatagatgttttacaagaccacaggctgagatctctttctgcccccatgatgccccctcctgcctgctgggcccccagaatcggcccctggaaccccaagtcctgcataccctccgtggcctgttcctggagcaccatcctgggagcaccgcccttcacctgctattggtagactgccaggccacaggcctcctgggagtgaccagagatcagcggggcaacatgggagtctcatctggcctggagctgctcactcttccccatggacaccacttgaggttggaactgctggagaggcatcagacactggcgctggccggggcgctggcggtgctgggctgctcggggccgctggaggagcgcgcagccgcactgaggggactggtagagctggcgctggcgctgcggccaggggcggcgggggacctgcccgggctggctgcagtcatgggcgccctgctcatgccccaggtgtcccggttggagcacacgtggcgccagctccgaaggagccacacggaggctgcgctggcctttgagcaggagctgaagccgctgatgcgggctctggatgagggcgctggaccctgcgaccccggcgaggtggcgctgccgcacgtggcacccatggttcgcctactggagggcgaggaagtcgcggggccgctggacgagagctgtgagcggctgttgcgcaccctgcacggggcgcgtcacatggtccgggacgcacccaaattccgcaaggtggcagcccagcgcctgcgaggattccggcctaacccggagctgagggaggccctgaccaccggcttcgtgcggaggctgctctggggtagccggggcgcgggagctccgcgcgctgaacgctttgagaagttccagcgcgtcctcggcgtcctgtcgcagcgcctggagcctgaccgctgagagcgcagacacccttcttcacacccgggacccccaggtttttgcgaaccccagaagagaccaaaggagtcgtcccaggctcctcgcgcctcaggtggaatcctgccctgtgcctcacagaagaggtggggaccgcagtcagggtcacctggaccatggtgaacatgtgacctgcagatctggcatcagaggccagagttcaaatgtgactccacctcttaaaagccgtgatttctagcagttgacttcacctctgtgtcggcctttaacaaaatcatagccatacagcagctcaggcctgtaatctcagcactttgggaggccgaggcggaaggaaggcttgaggccaggagttcaagaccagccagggcaacatggtgagacctcatctctacaaaaactgaaaaataaaaaacttttaaaaaatgtaaaaaaaaaaac

SEQ ID NO: 429426 - DNA, 1963 bp, Homo sapiens
cgggggtgacagcagcccggagccgcggagcctcagcttccgcctggacccagcctcgtgggagccccgcgggtcctgcccagatgtggaagactgaggcctgttgaaagtgcagagctcagccctggcaccctctgttcccaagagctccatgcaggtgccacaggatggagaagaccttgctggccaaccttggtaccacggcctcctgtcccgccagaaggctgaagctcttcttcagcaaaatggcgacttcctggttcgcgcctctgggtcccgtgggggcaaccccgtgatctcctgccgctggcggggctcagccctccattttgaggtgttccgtgtggccctgcgtccccggccaggccgacccacagccctctttcaactggaggatgagcaattccccagcataccggctctggttcacagttatatgacaggcaggcgcccactgtcccaggccacaggggctgtggtctccaggcctgtgacttggcaggggcctctgcgacgcagctttagcgaggacaccctgatggatggcccagctcggatagagcctctcagggcaaggaagtggagcaacagtcagcctgcagatttggcacatatggggcggtcaagagaagaccccgctgggatggaatcggcccctggaaccccaagtcctgcataccctccgtggcctgttcctggagcaccatcctgggagcaccgcccttcacctgctattggtagactgccaggccacaggcctcctgggagtgaccagagatcagcggggcaacatgggagtctcatctggcctggagctgctcactcttccccatggacaccacttgaggttggaactgctggagagacccttgccctccacctctgcaggcatcagacactggcgctggccggggcgctggcggtgctgggctgctcggggccgctggaggagcgcgcagccgcactgaggggactggtagagctggcgctggcgctgcggccaggggcggcgggggacctgcccgggctggctgcagtcatgggcgccctgctcatgccccaggtgtcccggttggagcacacgtggcgccagctccgaaggagccacacggaggctgcgctggcctttgagcaggagctgaagccgctgatgcgggctctggatgagggcgctggaccctgcgaccccggcgaggtggcgctgccgcacgtggcacccatggttcgcctactggagggcgaggaagtcgcggggccgctggacgagagctgtgagcggctgttgcgcaccctgcacggggcgcgtcacatggtccgggacgcacccaaattccgcaaggtggcagcccagcgcctgcgaggattccggcctaacccggagctgagggaggccctgaccaccggcttcgtgcggaggctgctctggggtagccggggcgcgggagctccgcgcgctgaacgctttgagaagttccagcgcgtcctcggcgtcctgtcgcagcgcctggagcctgaccgctgagagcgcagacacccttcttcacacccgggacccccaggtttttgcgaaccccagaagagaccaaaggagtcgtcccaggctcctcgcgcctcaggtggaatcctgccctgtgcctcacagaagaggtggggaccgcagtcagggtcacctggaccatggtgaacatgtgacctgcagatctggcatcagaggccagagttcaaatgtgactccacctcttaaaagccgtgatttctagcagttgacttcacctctgtgtcggcctttaacaaaatcatagccatacagcagctcaggcctgtaatctcagcactttgggaggccgaggcggaaggaaggcttgaggccaggagttcaagaccagccagggcaacatggtgagacctcatctctacaaaaactgaaaaataaaaaacttttaaaaaatgtaaaaaaaaaaac

SEQ ID NO: 429427 - DNA, 1833 bp, Homo sapiens
tggttgaaattcaaaactgcacccggataggttgttataccccattattggaatgagtggatggatcaggtgggtggtagccgatgaagctctcacccccgcccattcagcaatcttccctgtgtattcccattgacccctcttgtatgacctctagaagcctccaccatgcccatatctgccttgccccgaacgagcagtgacccggtgttgctgaaggcccctgctcccctgggaactgttgccgacagtctcagggcctccgatgggcagcttcaagccaaggcaccaacgaagcccccccggacaccctccttcgaactgcctgatgcctctgaacgtcccccgacgtactgcgagctggtgccccgagtgcccagtgtccagggaacatccccgagccaaagctgcccagagccagaggccccatggtgggaggccgaggaggatgaggaggaagagaatagatgttttacaagaccacaggctgagatctctttctgcccccatgatgccccctcctgcctgctgggcccccagaatcggcccctggaaccccaagtcctgcataccctccgtggcctgttcctggagcaccatcctgggagcaccgcccttcacctgctattggtagactgccaggccacaggcctcctgggagtgaccagagatcagcggggcaacatgggagtctcatctggcctggagctgctcactcttccccatggacaccacttgaggttggaactgctggagaggcatcagacactggcgctggccggggcgctggcggtgctgggctgctcggggccgctggaggagcgcgcagccgcactgaggggactggtagagctggcgctggcgctgcggccaggggcggcgggggacctgcccgggctggctgcagtcatgggcgccctgctcatgccccaggtgtcccggttggagcacacgtggcgccagctccgaaggagccacacggaggctgcgctggcctttgagcaggagctgaagccgctgatgcgggctctggatgagggcgctggaccctgcgaccccggcgaggtggcgctgccgcacgtggcacccatggttcgcctactggagggcgaggaagtcgcggggccgctggacgagagctgtgagcggctgttgcgcaccctgcacggggcgcgtcacatggtccgggacgcacccaaattccgcaaggtggcagcccagcgcctgcgaggattccggcctaacccggagctgagggaggccctgaccaccggcttcgtgcggaggctgctctggggtagccggggcgcgggagctccgcgcgctgaacgctttgagaagttccagcgcgtcctcggcgtcctgtcgcagcgcctggagcctgaccgctgagagcgcagacacccttcttcacacccgggacccccaggtttttgcgaaccccagaagagaccaaaggagtcgtcccaggctcctcgcgcctcaggtggaatcctgccctgtgcctcacagaagaggtggggaccgcagtcagggtcacctggaccatggtgaacatgtgacctgcagatctggcatcagaggccagagttcaaatgtgactccacctcttaaaagccgtgatttctagcagttgacttcacctctgtgtcggcctttaacaaaatcatagccatacagcagctcaggcctgtaatctcagcactttgggaggccgaggcggaaggaaggcttgaggccaggagttcaagaccagccagggcaacatggtgagacctcatctctacaaaaactgaaaaataaaaaacttttaaaaaatgtaaaaaaaaaaac

SEQ ID NO: 429428 - DNA, 1020 bp, Homo sapiens
gagctgtggggcagaggcgctgctgtggttggtcagtccagtaagaagccagcagggctggtgctggggcttcttctcctgaaggggctgcaagagggaaggcttagccatgtcgtccttgatcagaagggtgatcagcaccgcgaaagccccaggggccattggaccctacagtcaagctgtattagtcgacaggaccatttacatttcaggacagataggcatggacccttcaagtggacagcttgtgtcaggaggggtagcagaagaagctaaacaagctcttaaaaacatgggtgaaattctgaaagctgcaggctgtgacttcactaacgtggtgaaaacaactgttcttctggctgacataaatgacttcaatactgtcaatgaaatctacaaacagtatttcaagagtaattttcctgctagagctgcttaccaagttgctgctttacccaaaggcagccgaattgaaattgaagcagtagctatccaaggaccactgacaacggcatcactataagtgggcccagtgctgtgtagtctggaattgttaacattttaatttttacaattgatgtaacatcttaattaaccttttaattttcacaattgatgacagtgtgagtttgatgaaaatatctgaagctattatggaaataccatgtaatagggagagttgaacatgaatattagagaaggaatccagttacttttttaaattacacctgtgtgcacctgtattactgaatataggaaagagatacccattacatagttactcagtaaacaaaagagaaataccaggtaggaaagaagagttactattcctgagaaataatcaagaacatatttaatttaaactaatgatgtgaactatttagttttgatgtccgttatgtgattctgcttttacttgagtaaaattaaagtgtttaaatttgagatcaaggagaagatagtggaacaaaatgttatatagataatatttttctaatggaaataaaataggcagatttc

SEQ ID NO: 429429 - DNA, 1054 bp, Homo sapiens
gagctgtggggcagaggcgctgctgtggttggtcagtccagtaagaagccagcagggctggtgctggggcttcttctcctgaaggggctgcaagagggaaggcttagccatgtcgtccttgatcagaagggtgatcagcaccgcgaaagccccaggggccattggaccctacagtcaagctgtattagtcgacaggaccatttacatttcaggacagataggcatggacccttcaagtggacagcttgtgtcaggaggggtagcagaagaagctaaacaagctcttaaaaacatgggtgaaattctgaaagctgcaggctgtgacttcactaacgtggtgaaaacaactgttcttctggctgacataaatgacttcaatactgtcaatgaaatctacaaacagtatttcaagagtaattttcctgctagagctgcttaccaagttgctgctttacccaaaggcagccgaattgaaattgaagcagtagctatccaaggaccactgacaacggcatcactataagtgggcccagtgctgtgtagtctggaattgttaacattttaatttttacaattgatgtaacatcttaattaaccttttaattttcacaattgatgacagtgtgagtttgatgaaaatatctgaagctattatggaaataccatgtaatagggagagttgaacatgaatattagagaaggaatccagttacttttttaaattacacctgtgtgcacctgtattactgaatataggaaagagatacccattacatagttactcagtaaacaaaagagaaataccaggtaggaaagaagagttactattcctgagaaataatcaagaacatatttaatttaaactaatgatgtgaactatttagttttgatgtccgttatgtgattctgcttttacttgagtaaaattaaagtgtttaaatttgagatcaaggagaagatagtggaacaaaatgttatatagataatatttttctaatggaaataaaataggcagatttcaaaaaaaaaaaaacatatggccttgatggcctca

SEQ ID NO: 429430 - DNA, 966 bp, Homo sapiens
gagctgtggggcagaggcgctgctgtggttggtcagtccagtaagaagccagcagggctggtgctggggcttcttctcctgaaggggctgcaagagggaaggcttagccatgtcgtccttgatcagaagggtgatcagcaccgcgaaagccccaggggccattggaccctacagtcaagctgtattagtcgacaggaccatttacatttcaggacagataggcatggacccttcaagtggacagcttgtgtcaggaggggtagcagaagaagctaaacaagctcttaaaaacatgggtgaaattctgaaagctgcaggctgtgacttcactaacgtggtgaaaacaactgttcttctggctgacataaatgacttcaatactgtcaatgaaatctacaaacagtatttcaagagtaattttcctgctagagctgcttaccaagttgctgctttacccaaaggcagccgaattgaaattgaagcagtagctatccaaggaccactgacaacggcatcactataagtgggcccagtgctgtgtagtctggaattgttaacattttaatttttacaattgatgtaacatcttaattaaccttttaattttcacaattgatgacagtgtgagtttgatgatattagagaaggaatccagttacttttttaaattacacctgtgtgcacctgtattactgaatataggaaagagatacccattacatagttactcagtaaacaaaagagaaataccaggtaggaaagaagagttactattcctgagaaataatcaagaacatatttaatttaaactaatgatgtgaactatttagttttgatgtccgttatgtgattctgcttttacttgagtaaaattaaagtgtttaaatttgagatcaaggagaagatagtggaacaaaatgttatatagataatatttttctaatggaaataaaataggcagatttc

SEQ ID NO: 429431 - DNA, 951 bp, Homo sapiens
gagctgtggggcagaggcgctgctgtggttggtcagtccagtaagaagccagcagggctggtgctggggcttcttctcctgaaggggctgcaagagggaaggcttagccatgtcgtccttgatcagaagggtgatcagcaccgcgaaagccccaggggccattggaccctacagtcaagctgtattagtcgacaggaccatttacatttcaggacagataggcatggacccttcaagtggacagcttgtgtcaggaggggtagcagaagaagctaaacaagctcttaaaaacatgggtgaaattctgaaagctgcaggctgtgacttcactaacgatttcaagagtaattttcctgctagagctgcttaccaagttgctgctttacccaaaggcagccgaattgaaattgaagcagtagctatccaaggaccactgacaacggcatcactataagtgggcccagtgctgtgtagtctggaattgttaacattttaatttttacaattgatgtaacatcttaattaaccttttaattttcacaattgatgacagtgtgagtttgatgaaaatatctgaagctattatggaaataccatgtaatagggagagttgaacatgaatattagagaaggaatccagttacttttttaaattacacctgtgtgcacctgtattactgaatataggaaagagatacccattacatagttactcagtaaacaaaagagaaataccaggtaggaaagaagagttactattcctgagaaataatcaagaacatatttaatttaaactaatgatgtgaactatttagttttgatgtccgttatgtgattctgcttttacttgagtaaaattaaagtgtttaaatttgagatcaaggagaagatagtggaacaaaatgttatatagataatatttttctaatggaaataaaataggcagatttc

SEQ ID NO: 429432 - DNA, 982 bp, Homo sapiens
gagctgtggggcagaggcgctgctgtggttggtcagtccagtaagaagccagcagggctggtgctggggcttcttctcctgaaggggctgcaagagggaaggcttagccatgtcgtccttgatcagaagggtgatcagcaccgcgaaagccccaggggccattggaccctacaggacagataggcatggacccttcaagtggacagcttgtgtcaggaggggtagcagaagaagctaaacaagctcttaaaaacatgggtgaaattctgaaagctgcaggctgtgacttcactaacgtggtgaaaacaactgttcttctggctgacataaatgacttcaatactgtcaatgaaatctacaaacagtatttcaagagtaattttcctgctagagctgcttaccaagttgctgctttacccaaaggcagccgaattgaaattgaagcagtagctatccaaggaccactgacaacggcatcactataagtgggcccagtgctgtgtagtctggaattgttaacattttaatttttacaattgatgtaacatcttaattaaccttttaattttcacaattgatgacagtgtgagtttgatgaaaatatctgaagctattatggaaataccatgtaatagggagagttgaacatgaatattagagaaggaatccagttacttttttaaattacacctgtgtgcacctgtattactgaatataggaaagagatacccattacatagttactcagtaaacaaaagagaaataccaggtaggaaagaagagttactattcctgagaaataatcaagaacatatttaatttaaactaatgatgtgaactatttagttttgatgtccgttatgtgattctgcttttacttgagtaaaattaaagtgtttaaatttgagatcaaggagaagatagtggaacaaaatgttatatagataatatttttctaatggaaataaaataggcagatttc

SEQ ID NO: 429433 - DNA, 1045 bp, Homo sapiens
atcgaatgaagaacaccagaaattatttctgtggacattggctgaacaattaacacattttagcactgaagaaggaacttcaacctagtctttttacgcacaaaaggagacaacattttcaccatatttcagaaagactcattctattaaaggaaagccaagaaacacacttgtaagcgagtagggaggatttttctgcaacataagctatttaaggaggtattagtaaaagatgattaattgaatttaattaaagctttaaatctaacatcagtgacttaggcctttcttggcttggttcacaggctcttaaaaacatgggtgaaattctgaaagctgcaggctgtgacttcactaacgtggtgaaaacaactgttcttctggctgacataaatgacttcaatactgtcaatgaaatctacaaacagtatttcaagagtaattttcctgctagagctgcttaccaagttgctgctttacccaaaggcagccgaattgaaattgaagcagtagctatccaaggaccactgacaacggcatcactataagtgggcccagtgctgtgtagtctggaattgttaacattttaatttttacaattgatgtaacatcttaattaaccttttaattttcacaattgatgacagtgtgagtttgatgaaaatatctgaagctattatggaaataccatgtaatagggagagttgaacatgaatattagagaaggaatccagttacttttttaaattacacctgtgtgcacctgtattactgaatataggaaagagatacccattacatagttactcagtaaacaaaagagaaataccaggtaggaaagaagagttactattcctgagaaataatcaagaacatatttaatttaaactaatgatgtgaactatttagttttgatgtccgttatgtgattctgcttttacttgagtaaaattaaagtgtttaaatttgagatcaaggagaagatagtggaacaaaatgttatatagataatatttttctaatggaaataaaataggcagatttc

SEQ ID NO: 429434 - DNA, 914 bp, Homo sapiens
gagctgtggggcagaggcgctgctgtggttggtcagtccagtaagaagccagcagggctggtgctggggcttcttctcctgaaggggctgcaagagggaaggcttagccatgtcgtccttgatcagaagggtgatcagcaccgcgaaagccccaggggccattggaccctacaggctcttaaaaacatgggtgaaattctgaaagctgcaggctgtgacttcactaacgtggtgaaaacaactgttcttctggctgacataaatgacttcaatactgtcaatgaaatctacaaacagtatttcaagagtaattttcctgctagagctgcttaccaagttgctgctttacccaaaggcagccgaattgaaattgaagcagtagctatccaaggaccactgacaacggcatcactataagtgggcccagtgctgtgtagtctggaattgttaacattttaatttttacaattgatgtaacatcttaattaaccttttaattttcacaattgatgacagtgtgagtttgatgaaaatatctgaagctattatggaaataccatgtaatagggagagttgaacatgaatattagagaaggaatccagttacttttttaaattacacctgtgtgcacctgtattactgaatataggaaagagatacccattacatagttactcagtaaacaaaagagaaataccaggtaggaaagaagagttactattcctgagaaataatcaagaacatatttaatttaaactaatgatgtgaactatttagttttgatgtccgttatgtgattctgcttttacttgagtaaaattaaagtgtttaaatttgagatcaaggagaagatagtggaacaaaatgttatatagataatatttttctaatggaaataaaataggcagatttc

SEQ ID NO: 429435 - DNA, 913 bp, Homo sapiens
gagctgtggggcagaggcgctgctgtggttggtcagtccagtaagaagccagcagggctggtgctggggcttcttctcctgaaggggctgcaagagggaaggcttagccatgtcgtccttgatcagaagggtgatcagcaccgcgaaagccccaggggccattggaccctacaggacagataggcatggacccttcaagtggacagcttgtgtcaggaggggtagcagaagaagctaaacaagctcttaaaaacatgggtgaaattctgaaagctgcaggctgtgacttcactaacgatttcaagagtaattttcctgctagagctgcttaccaagttgctgctttacccaaaggcagccgaattgaaattgaagcagtagctatccaaggaccactgacaacggcatcactataagtgggcccagtgctgtgtagtctggaattgttaacattttaatttttacaattgatgtaacatcttaattaaccttttaattttcacaattgatgacagtgtgagtttgatgaaaatatctgaagctattatggaaataccatgtaatagggagagttgaacatgaatattagagaaggaatccagttacttttttaaattacacctgtgtgcacctgtattactgaatataggaaagagatacccattacatagttactcagtaaacaaaagagaaataccaggtaggaaagaagagttactattcctgagaaataatcaagaacatatttaatttaaactaatgatgtgaactatttagttttgatgtccgttatgtgattctgcttttacttgagtaaaattaaagtgtttaaatttgagatcaaggagaagatagtggaacaaaatgttatatagataatatttttctaatggaaataaaataggcagatttc

SEQ ID NO: 429436 - DNA, 431 bp, Homo sapiens
gagctgtggggcagaggcgctgctgtggttggtcagtccagtaagaagccagcagggctggtgctggggcttcttctcctgaaggggctgcaagagggaaggcttagccatgtcgtccttgatcagaagggtgatcagcaccgcgaaagccccaggggccattggaccctacagtcaagctgtattagtcgacaggaccatttacatttcaggacagataggcatggacccttcaagtggacagcttgtgtcaggaggggtagcagaagaagctaaacaagtaagttattttccacatttaaggttcccttttctactacctttttaatgttgaagagcattaagaatccacttgcctgatttgttttatagagattaacagataaatgttttttaaactacttactgcttgatttaacatagtttttgat

SEQ ID NO: 429437 - DNA, 1106 bp, Homo sapiens
aagtcacgtgctgtgacagtagctggggtgaggccgtcgtcgccgcacgggctggttggggctgtgtctgtgggaggcgccggggtgatggcggtggagactctgtccccggactgggagtttgaccgcgttgacgacggctcgcagaaaattcatgccgaagtccaacttaagaattatgggaaatttcttgaggagtatacctctcaactgagaagaattgaggacgctctggatgactcaattggagatgtttgggatttcaatcttgatcctatagcattaaagcttttgccttatgaacagtcctctcttttggaactcataaagactgaaaacaaggtcttaaacaaagtcatcactgtttatgctgcactttgttgtgaaatcaagaaattaaaatatgaggctgaaactaaattttacaatggtctcttgttttatggagaaggagctacagatgccagcatggtggaaggtgattgccaaattcaaatggggagatttatttcattcttacaggaactgtcttgctttgttacgaggtgctatgaagtggtgatgaacgtagtccaccagttggctgccctctatatcagtaacaagattgcacccaaaattatagagacaactggagttcattttcagactatgtatgagcacttgggagaactgctaacagttttgctcaccctggatgaaattattgataatcatatcacactgaaagaccactggactatgtacaaaagtgctggattcgtcattacaatcttcaaattggaaaaaaaaaaaaaaaaaaaaaaaaaaaaaaaaaaaaaaaagggggggggggaaaaaaaaatcccccgggggggccatgttttacgtgatcaccggttttttgtgaaaaggggggcccatatagggagcacgattataaaaggcaggacaggggcgcgttatacaaggcgtgagggaaagggcagattggggacttggggaaggaccctactctgtggggtgggcaattgggacactacttagaaagaataagtcatagtaatataattaggggtaagtggtcaccaccgcattgtggacgaaagtggtgggtaatatagatg

SEQ ID NO: 429438 - DNA, 544 bp, Homo sapiens
attataatcaatgttttcctttacagggcttcttgtatgcatatagtattagtaccattattaaaaccacaatgaatctctacatgtccatgcaaaagccaatgaccaaaacctcagttaaggcattgtgcaggcttgttgaacttctcaagcttaccaaatatggatgaatcaataaagcattaatcgttatatatgtttttgaagtttatattagtggagcagtattttatgtattttttgatccatttttttattcaacattttgttttttactcagcattttgtatttgagggtatccatgttgggatgagtagcacatctattttcattgttgtgtagtggatagacttcgggttgtttccggtttttgtatcataaacaatgttgccatccttgtatgtgtttcttggtgtacttgtgcaggagtttttgtaaggaattatatacctaaagttggttactggattatgtgttacgtatatgttcaccttttcaagatgatgtcacattgtctctatagacagactatatatatgtgtg

SEQ ID NO: 429439 - DNA, 5811 bp, Homo sapiens
  misc_feature (965)..(965): n is a, c, g, or t
aagtcacgtgctgtgacagtagctggggtgaggccgtcgtcgccgcacgggctggttggggctgtgtctgtgggaggcgccggggtgatggcggtggagactctgtccccggactgggagtttgaccgcgttgacgacggctcgcagaaaattcatgccgaagtccaacttaagaattatgggaaatttcttgaggagtatacctctcaactgagaagaattgaggacgctctggatgactcaattggagatgtttgggatttcaatcttgatcctatagcattaaagcttttgccttatgaacagtcctctcttttggaactcataaagactgaaaacaaggtcttaaacaaagtcatcactgtttatgctgcactttgttgtgaaatcaagaaattaaaatatgaggctgaaactaaattttacaatggtctcttgttttatggagaaggagctacagatgccagcatggtggaaggtgattgccaaattcaaatggggagatttatttcattcttacaggaactgtcttgctttgttacgaggtgctatgaagtggtgatgaacgtagtccaccagttggctgccctctatatcagtaacaagattgcacccaaaattatagagacaactggagttcattttcagactatgtatgagcacttgggagaactgctaacagttttgctcaccctggatgaaattattgataatcatatcacactgaaagaccactggactatgtacaaaaggttactgaaatctgtccatcacaatccttcaaaatttggaattcaggaagaaaaattaaagccatttgaaaagttcttgctgaagctagaagggcaattactggatggaatgatattccaggcctgtatagaacaacaatttgattctctcaatggaggagtatctgtgtcaaaaaatagtacttttgctgaggaatttgcacatagtattcngtcaatttttgcaaatgtagaagccaaacttggagaaccttctgaaattgaccagagagacaagtatgttggaatttgtggactctttgtattgcactttcagatttttcgaactattgataaaaagttttataagtctttattggacatttgtaagaaggtaccagccatcactctaactgctaatattatttggtttcctgataattttctgatccagaaaataccagcagctgccaaactgctagacagaaaaagtcttcaagccattaaaatacacagggatacttttctacaacagaaagctcaatcacttaccaaagatgtacagtcttactacgtctttgtgagctcatggatgatgaaaatggaatctattttgtctaaagagcagagaatggataaatttgctgaagatctcaccaatagatgtaatgtttttatacagggcttcttgtatgcatatagtattagtaccattattaaaaccacaatgaatctctacatgtccatgcaaaagccaatgaccaaaacctcagttaaggcattgtgcaggcttgttgaacttctcaaggcaatagagcatatgttctacaggagaagcatggttgtggctgattcagtttcacatataacacagcaccttcaacatcaggctcttcattctatttctgtggccaagaaaagagtgatttctgacaaaaaatacagcgaacagcgtcttgatgtgctctctgctctagttttggctgaaaacactctaaatggaccaagcacaaagcaacggcgacttattgtttctttggcactaagtgttggcacacaaatgaaaacatttaaagatgaagaactctttccacttcaagtagtcatgaaaaaactggatcttattagtgaacttagagaacgagtccaaacacaatgtgactgttgttttttatactggcatcgagctgtcttcccaatttatttagatgatgtatatgaaaatgctgttgatgcagccagattacattacatgttcagtgctttgcgcgactgtgtacctgctatgatgcatgcaaggcatttagagtcctatgagatacttctggattgctatgacaaggaaattatggaaattttaaatgagcatttgctggacaaattatgcaaagaaatagagaaagatctgcgactttctgtgcatactcatttaaagctggatgaccgaaaccctttcaaagttggcatgaaagacctggctctttttttctctctgaatccaattcggtttttcaatcgtttcattgacattcgggcttacgtaactcactacctagacaagactttctacaatctaacaactgtagcccttcatgactgggccacttatagtgagatgagaaacttagctactcagcgttatggactggttatgacagaggcacatcttcccagtcagactttggaacagggccttgatgttttagaaattatgagaaacattcatatatttgtgtcccgatacctctataatctcaacaatcagatttttattgaacgaacaagcaataacaagcatttgaatactattaatattcggcatattgctaattcaattcgaacacatggcacgggaattatgaatacaactgttaatttcacctaccagtttttgaaaaagaagttctatatatttagccaatttatgtatgatgaacacatcaaatccagattgattaaagatattcgatttttcagggaaattaaggaccaaaatgatcataagtatccttttgatagagcagaaaaattcaatcgaggcatcagaaaacttggaataacacctgagggacagagctaccttgatcaattcaggcaactcatcagccagattggtaatgctatgggctatgtacgaatgataagatctggtggtcttcattgtagcagcaatgccattagatttgttcctgatcttgaagatattgtaaattttgaagaactagtaaaagaagaaggtcttgcagaagaaacattaaaagcagcaaggcatttggattcagtcctcagtgatcacacacgaaattctgccgaaggcacagaatatttcaaaatgcttgtagacgtttttgctccagaatttcgaaggccaaagaatatacatctccgaaatttctatataattgttccccctctgaccctcaactttgtagagcattccattagttgcaaggaaaaattaaataaaaaaaataaaattggagctgcctttactgatgatggctttgccatgggtgtggcttacattctaaagcttttggatcagtatcgggagtttgattcacttcactggttccagtctgttagagagaaatacctgaaggagataagagcagttgctaagcaacagaatgtacagtcagccagtcaagatgaaaaactcttacaaaccatgaatctcactcagaagcgactggatgtctatctacaggaatttgaattgctgtatttctcactgagcagtgcaagaattttcttcagagcagacaagactgcggctgaagaaaaccaagaaaagaaagagaaggaagaagaaactaaaacaagcaatggagacctgtctgacagcactgtgtctgctgatcctgttgtgaaatgatacggatggtattcactgcacatatgatgaaatcatcagaattgttaaaacttttgccagtggaatggataaactattgatgaattgtttcctgggtcacatctctggaaaatagatgttacagttcttaaaggcagtgctttaaagtgaagttcattctgtttccaaaggctctactttcaaaggttaagaatgagattttaaaattggatttttgcctggacttgagggtacaagatgtttctatttgaagtgaagttataaaagggcaaatccagattcataaactatcacctcggatttcttgtaatctacatgtttgtaatttgtatttgcatagatctttgatctatagttatttcaagtcatgggaaattcaatgcatatactatatacagccagtaaatacatgcttaacaaaaggaatgagcctgaagttcataaagaatacatatcaatattcttataaaaggaatatatgaagatggctttgatactagaggtgaggcacaagtgttttatgtactctcagtgtacagtataactgatgatccttctttcattgttaatttcatgtgactcacaagagctgctgatgtctttgatgagacattttataactagtttacattgctttgagaacatttaacctccaacagctgctttaaatttaagatttacttaatactcagaaaattcagataaagccatagagtcctgtttgaagcttcacttctattttggttgaaggcatgatgtatgatgtcagaaaaaaaattgaatgaattatttctacatccaaactcaggtttcttctacattagattgaattgaaattttggtgatggtttgggtagactttttttttatatcaagtataatttaaaacatcagattaaataattacactgttcaggcttttaaaaaaataccactgtgagaataaagcgctagtaagatacatcacttactgattttaaaaatacagaaagattttgagtaaattttgtgcccagcaagctgttagttttatttttgtaaaggtatgtaagttattaaatggttaatcatggccttttaaaaataaaataaagtgatacctttacaatgaagacaaaagtttaaaactttctaatacaaacaccattttgggaaatgcttgatttttttctattgcatttgtctgctaaacatttctttggataaatcctgcaaatacttctaacattattctttgattccagcttttagaatgggtgtacaatgccctgtttgtacttactggttagggtcagggtaacttgccagcccaagataaatactttaatcgttaaaagtcagaagagacagaatatgtaggaaatgttttttgtttattatgtaaacatggcttacagaattatgaacagtggatagattaaaggcatttaatatttgtaattcataataactgtagaaatggccctaaagcatgctgcataattaataatttatattttcattattataagtgtttatattaatgatcttgcatttgattatatcaaattcgtcatttcatagcaacagtattgttttctctgtttttcttctctaacttctctgaaatcatctcctattaagggatagaaattgttactagaagagaatcacatgttctgtgttcattatccctacacatgtaaattaattattttatcaatactagatagagttcacatgctgactccctggatacctacagttgagaagaaaatgacagacaattatttttcctttaggtcaaaataatgtcactgctatctggataaattataagttcatatatttgaaataagatcctggaaacgaatttaaatggtgtcaaactgcagagcaacagggcttcagtatattcacatctaataggttaatatgtacatttggatgatgatttttcttgataacattaacattaattttattttttcagacatactgtaatttaaaaattaatgtgagcgtttgttttaagttcacagaaaacttaataattcaaattctcaggaattaaggactcaccataacattgtcagttctaatgaaattttgtaaaagatggcaagtttgttacctcacttgagtggggttttccttttcccccaattctaagagaatataatgtgtatactaaaacattaataaacataattttgaaaattt

SEQ ID NO: 429440 - DNA, 6132 bp, Homo sapiens
  misc_feature (965)..(965): n is a, c, g, or t
aagtcacgtgctgtgacagtagctggggtgaggccgtcgtcgccgcacgggctggttggggctgtgtctgtgggaggcgccggggtgatggcggtggagactctgtccccggactgggagtttgaccgcgttgacgacggctcgcagaaaattcatgccgaagtccaacttaagaattatgggaaatttcttgaggagtatacctctcaactgagaagaattgaggacgctctggatgactcaattggagatgtttgggatttcaatcttgatcctatagcattaaagcttttgccttatgaacagtcctctcttttggaactcataaagactgaaaacaaggtcttaaacaaagtcatcactgtttatgctgcactttgttgtgaaatcaagaaattaaaatatgaggctgaaactaaattttacaatggtctcttgttttatggagaaggagctacagatgccagcatggtggaaggtgattgccaaattcaaatggggagatttatttcattcttacaggaactgtcttgctttgttacgaggtgctatgaagtggtgatgaacgtagtccaccagttggctgccctctatatcagtaacaagattgcacccaaaattatagagacaactggagttcattttcagactatgtatgagcacttgggagaactgctaacagttttgctcaccctggatgaaattattgataatcatatcacactgaaagaccactggactatgtacaaaaggttactgaaatctgtccatcacaatccttcaaaatttggaattcaggaagaaaaattaaagccatttgaaaagttcttgctgaagctagaagggcaattactggatggaatgatattccaggcctgtatagaacaacaatttgattctctcaatggaggagtatctgtgtcaaaaaatagtacttttgctgaggaatttgcacatagtattcngtcaatttttgcaaatgtagaagccaaacttggagaaccttctgaaattgaccagagagacaagtatgttggaatttgtggactctttgtattgcactttcagatttttcgaactattgataaaaagttttataagtctttattggacatttgtaagaaggtaccagccatcactctaactgctaatattatttggtttcctgataattttctgatccagaaaataccagcagctgccaaactgctagacagaaaaagtcttcaagccattaaaatacacagggatacttttctacaacagaaagctcaatcacttaccaaagatgtacagtcttactacgtctttgtgagctcatggatgatgaaaatggaatctattttgtctaaagagcagagaatggataaatttgctgaagatctcaccaatagatgtaatgtttttatacagggcttcttgtatgcatatagtattagtaccattattaaaaccacaatgaatctctacatgtccatgcaaaagccaatgaccaaaacctcagttaaggcattgtgcaggcttgttgaacttctcaaggcaatagagcatatgttctacaggagaagcatggttgtggctgattcagtttcacatataacacagcaccttcaacatcaggctcttcattctatttctgtggccaagaaaagagtgatttctgacaaaaaatacagcgaacagcgtcttgatgtgctctctgctctagttttggctgaaaacactctaaatggaccaagcacaaagcaacggcgacttattgtttctttggcactaagtgttggcacacaaatgaaaacatttaaagatgaagaactctttccacttcaagtagtcatgaaaaaactggatcttattagtgaacttagagaacgagtccaaacacaatgtgactgttgttttttatactggcatcgagctgtcttcccaatttatttagatgatgtatatgaaaatgctgttgatgcagccagattacattacatgttcagtgctttgcgcgactgtgtacctgctatgatgcatgcaaggcatttagagtcctatgagatacttctggattgctatgacaaggaaattatggaaattttaaatgagcatttgctggacaaattatgcaaagaaatagagaaagatctgcgactttctgtgcatactcatttaaagctggatgaccgaaaccctttcaaagttggcatgaaagacctggctctttttttctctctgaatccaattcggtttttcaatcgtttcattgacattcgggcttacgtaactcactacctagacaagactttctacaatctaacaactgtagcccttcatgactgggccacttatagtgagatgagaaacttagctactcagcgttatggactggttatgacagaggcacatcttcccagtcagactttggaacagggccttgatgttttagaaattatgagaaacattcatatatttgtgtcccgatacctctataatctcaacaatcagatttttattgaacgaacaagcaataacaagcatttgaatactattaatattcggcatattgctaattcaattcgaacacatggcacgggaattatgaatacaactgttaatttcacctaccagtttttgaaaaagaagttctatatatttagccaatttatgtatgatgaacacatcaaatccagattgattaaagatattcgatttttcagggaaattaaggaccaaaatgatcataagtatccttttgatagagcagaaaaattcaatcgaggcatcagaaaacttggaataacacctgagggacagagctaccttgatcaattcaggcaactcatcagccagattggtaatgctatgggctatgtacgaatgataagatctggtggtcttcattgtagcagcaatgccattagatttgttcctgatcttgaagatattgtaaattttgaagaactagtaaaagaagaaggtcttgcagaagaaacattaaaagcagcaaggcatttggattcagtcctcagtgatcacacacgaaattctgccgaaggcacagaatatttcaaaatgcttgtagacgtttttgctccagaatttcgaaggccaaagaatatacatctccgaaatttctatataattgttccccctctgaccctcaactttgtagagcattccattagttgcaaggaaaaattaaataaaaaaaataaaattggagctgcctttactgatgatggctttgccatgggtgtggcttacattctaaagcttttggatcagtatcgggagtttgattcacttcactggttccagtctgttagagagaaatacctgaaggagataagagcagttgctaagcaacagaatgtacagtcagccagtcaagatgaaaaactcttacaaaccatgaatctcactcagaagcgactggatgtctatctacaggaatttgaattgctgtatttctcactgagcagtgcaagaattttcttcagagcagacaagactgcggctgaagaaaaccaagaaaagaaagagaaggaagaagaaactaaaacaagcaatggagacctgtctgacagcactgtgtctgctgatcctgttgtgaaatgatacggatggtattcactgcacatatgatgaaatcatcagaattgttaaaacttttgccagtggaatggataaactattgatgaattgtttcctgggtcacatctctggaaaatagatgttacagttcttaaaggcagtgctttaaagtgaagttcattctgtttccaaaggctctactttcaaaggttaagaatgagattttaaaattggatttttgcctggacttgagggtacaagatgtttctatttgaagtgaagttataaaagggcaaatccagattcataaactatcacctcggatttcttgtaatctacatgtttgtaatttgtatttgcatagatctttgatctatagttatttcaagtcatgggaaattcaatgcatatactatatacagccagtaaatacatgcttaacaaaaggaatgagcctgaagttcataaagaatacatatcaatattcttataaaaggaatatatgaagatggctttgatactagaggtgaggcacaagtgttttatgtactctcagtgtacagtataactgatgatccttctttcattgttaatttcatgtgactcacaagagctgctgatgtctttgatgagacattttataactagtttacattgctttgagaacatttaacctccaacagctgctttaaatttaagatttacttaatactcagaaaattcagataaagccatagagtcctgtttgaagcttcacttctattttggttgaaggcatgatgtatgatgtcagaaaaaaaattgaatgaattatttctacatccaaactcaggtttcttctacattagattgaattgaaattttggtgatggtttgggtagactttttttttatatcaagtataatttaaaacatcagattaaataattacactgttcaggcttttaaaaaaataccactgtgagaataaagcgctagtaagatacatcacttactgattttaaaaatacagaaagattttgagtaaattttgtgcccagcaagctgttagttttatttttgtaaaggtatgtaagttattaaatggttaatcatggccttttaaaaataaaataaagtgatacctttacaatgaagacaaaagtttaaaactttctaatacaaacaccattttgggaaatgcttgatttttttctattgcatttgtctgctaaacatttctttggataaatcctgcaaatacttctaacattattctttgattccagcttttagaatgggtgtacaatgccctgtttgtacttactggttagggtcagggtaacttgccagcccaagataaatactttaatcgttaaaagtcagaagagacagaatatgtaggaaatgttttttgtttattatgtaaacatggcttacagaattatgaacagtggatagattaaaggcatttaatatttgtaattcataataactgtagaaatggccctaaagcatgctgcataattaataatttatattttcattattataagtgtttatattaatgatcttgcatttgattatatcaaattcgtcatttcatagcaacagtattgttttctctgtttttcttctctaacttctctgaaatcatctcctattaagggatagaaattgttactagaagagaatcacatgttctgtgttcattatccctacacatgtaaattaattattttatcaatactagatagagttcacatgctgactccctggatacctacagttgagaagaaaatgacagacaattatttttcctttaggtcaaaataatgtcactgctatctggataaattataagttcatatatttgaaataagatcctggaaacgaatttaaatggtgtcaaactgcagagcaacagggcttcagtatattcacatctaataggttaatatgtacatttggatgatgatttttcttgataacattaacattaattttattttttcagacatactgtaatttaaaaattaatgtgagcgtttgttttaagttcacagaaaacttaataattcaaattctcaggaattaaggactcaccataacattgtcagttctaatgaaattttgtaaaagatggcaagtttgttacctcacttgagtggggttttccttttcccccaattctaagagaatataatgtgtatactaaaacattaataaacataattttgaaaatttaaaaaaaaaaaaaaaaaaaaaaaaaaaaaaaaaaaaaaagggggggggggaaaaaaaaatcccccgggggggccatgttttacgtgatcaccggttttttgtgaaaaggggggcccatatagggagcacgattataaaaggcaggacaggggcgcgttatacaaggcgtgagggaaagggcagattggggacttggggaaggaccctactctgtggggtgggcaattgggacactacttagaaagaataagtcatagtaatataattaggggtaagtggtcaccaccgcattgtggacgaaagtggtgggtaatatagatg

SEQ ID NO: 429441 - DNA, 5671 bp, Homo sapiens
  misc_feature (825)..(825): n is a, c, g, or t
aagtcacgtgctgtgacagtagctggggtgaggccgtcgtcgccgcacgggctggttggggctgtgtctgtgggaggcgccggggtgatggcggtggagactctgtccccggactgggagtttgaccgcgttgacgacggctcgcagacttttgccttatgaacagtcctctcttttggaactcataaagactgaaaacaaggtcttaaacaaagtcatcactgtttatgctgcactttgttgtgaaatcaagaaattaaaatatgaggctgaaactaaattttacaatggtctcttgttttatggagaaggagctacagatgccagcatggtggaaggtgattgccaaattcaaatggggagatttatttcattcttacaggaactgtcttgctttgttacgaggtgctatgaagtggtgatgaacgtagtccaccagttggctgccctctatatcagtaacaagattgcacccaaaattatagagacaactggagttcattttcagactatgtatgagcacttgggagaactgctaacagttttgctcaccctggatgaaattattgataatcatatcacactgaaagaccactggactatgtacaaaaggttactgaaatctgtccatcacaatccttcaaaatttggaattcaggaagaaaaattaaagccatttgaaaagttcttgctgaagctagaagggcaattactggatggaatgatattccaggcctgtatagaacaacaatttgattctctcaatggaggagtatctgtgtcaaaaaatagtacttttgctgaggaatttgcacatagtattcngtcaatttttgcaaatgtagaagccaaacttggagaaccttctgaaattgaccagagagacaagtatgttggaatttgtggactctttgtattgcactttcagatttttcgaactattgataaaaagttttataagtctttattggacatttgtaagaaggtaccagccatcactctaactgctaatattatttggtttcctgataattttctgatccagaaaataccagcagctgccaaactgctagacagaaaaagtcttcaagccattaaaatacacagggatacttttctacaacagaaagctcaatcacttaccaaagatgtacagtcttactacgtctttgtgagctcatggatgatgaaaatggaatctattttgtctaaagagcagagaatggataaatttgctgaagatctcaccaatagatgtaatgtttttatacagggcttcttgtatgcatatagtattagtaccattattaaaaccacaatgaatctctacatgtccatgcaaaagccaatgaccaaaacctcagttaaggcattgtgcaggcttgttgaacttctcaaggcaatagagcatatgttctacaggagaagcatggttgtggctgattcagtttcacatataacacagcaccttcaacatcaggctcttcattctatttctgtggccaagaaaagagtgatttctgacaaaaaatacagcgaacagcgtcttgatgtgctctctgctctagttttggctgaaaacactctaaatggaccaagcacaaagcaacggcgacttattgtttctttggcactaagtgttggcacacaaatgaaaacatttaaagatgaagaactctttccacttcaagtagtcatgaaaaaactggatcttattagtgaacttagagaacgagtccaaacacaatgtgactgttgttttttatactggcatcgagctgtcttcccaatttatttagatgatgtatatgaaaatgctgttgatgcagccagattacattacatgttcagtgctttgcgcgactgtgtacctgctatgatgcatgcaaggcatttagagtcctatgagatacttctggattgctatgacaaggaaattatggaaattttaaatgagcatttgctggacaaattatgcaaagaaatagagaaagatctgcgactttctgtgcatactcatttaaagctggatgaccgaaaccctttcaaagttggcatgaaagacctggctctttttttctctctgaatccaattcggtttttcaatcgtttcattgacattcgggcttacgtaactcactacctagacaagactttctacaatctaacaactgtagcccttcatgactgggccacttatagtgagatgagaaacttagctactcagcgttatggactggttatgacagaggcacatcttcccagtcagactttggaacagggccttgatgttttagaaattatgagaaacattcatatatttgtgtcccgatacctctataatctcaacaatcagatttttattgaacgaacaagcaataacaagcatttgaatactattaatattcggcatattgctaattcaattcgaacacatggcacgggaattatgaatacaactgttaatttcacctaccagtttttgaaaaagaagttctatatatttagccaatttatgtatgatgaacacatcaaatccagattgattaaagatattcgatttttcagggaaattaaggaccaaaatgatcataagtatccttttgatagagcagaaaaattcaatcgaggcatcagaaaacttggaataacacctgagggacagagctaccttgatcaattcaggcaactcatcagccagattggtaatgctatgggctatgtacgaatgataagatctggtggtcttcattgtagcagcaatgccattagatttgttcctgatcttgaagatattgtaaattttgaagaactagtaaaagaagaaggtcttgcagaagaaacattaaaagcagcaaggcatttggattcagtcctcagtgatcacacacgaaattctgccgaaggcacagaatatttcaaaatgcttgtagacgtttttgctccagaatttcgaaggccaaagaatatacatctccgaaatttctatataattgttccccctctgaccctcaactttgtagagcattccattagttgcaaggaaaaattaaataaaaaaaataaaattggagctgcctttactgatgatggctttgccatgggtgtggcttacattctaaagcttttggatcagtatcgggagtttgattcacttcactggttccagtctgttagagagaaatacctgaaggagataagagcagttgctaagcaacagaatgtacagtcagccagtcaagatgaaaaactcttacaaaccatgaatctcactcagaagcgactggatgtctatctacaggaatttgaattgctgtatttctcactgagcagtgcaagaattttcttcagagcagacaagactgcggctgaagaaaaccaagaaaagaaagagaaggaagaagaaactaaaacaagcaatggagacctgtctgacagcactgtgtctgctgatcctgttgtgaaatgatacggatggtattcactgcacatatgatgaaatcatcagaattgttaaaacttttgccagtggaatggataaactattgatgaattgtttcctgggtcacatctctggaaaatagatgttacagttcttaaaggcagtgctttaaagtgaagttcattctgtttccaaaggctctactttcaaaggttaagaatgagattttaaaattggatttttgcctggacttgagggtacaagatgtttctatttgaagtgaagttataaaagggcaaatccagattcataaactatcacctcggatttcttgtaatctacatgtttgtaatttgtatttgcatagatctttgatctatagttatttcaagtcatgggaaattcaatgcatatactatatacagccagtaaatacatgcttaacaaaaggaatgagcctgaagttcataaagaatacatatcaatattcttataaaaggaatatatgaagatggctttgatactagaggtgaggcacaagtgttttatgtactctcagtgtacagtataactgatgatccttctttcattgttaatttcatgtgactcacaagagctgctgatgtctttgatgagacattttataactagtttacattgctttgagaacatttaacctccaacagctgctttaaatttaagatttacttaatactcagaaaattcagataaagccatagagtcctgtttgaagcttcacttctattttggttgaaggcatgatgtatgatgtcagaaaaaaaattgaatgaattatttctacatccaaactcaggtttcttctacattagattgaattgaaattttggtgatggtttgggtagactttttttttatatcaagtataatttaaaacatcagattaaataattacactgttcaggcttttaaaaaaataccactgtgagaataaagcgctagtaagatacatcacttactgattttaaaaatacagaaagattttgagtaaattttgtgcccagcaagctgttagttttatttttgtaaaggtatgtaagttattaaatggttaatcatggccttttaaaaataaaataaagtgatacctttacaatgaagacaaaagtttaaaactttctaatacaaacaccattttgggaaatgcttgatttttttctattgcatttgtctgctaaacatttctttggataaatcctgcaaatacttctaacattattctttgattccagcttttagaatgggtgtacaatgccctgtttgtacttactggttagggtcagggtaacttgccagcccaagataaatactttaatcgttaaaagtcagaagagacagaatatgtaggaaatgttttttgtttattatgtaaacatggcttacagaattatgaacagtggatagattaaaggcatttaatatttgtaattcataataactgtagaaatggccctaaagcatgctgcataattaataatttatattttcattattataagtgtttatattaatgatcttgcatttgattatatcaaattcgtcatttcatagcaacagtattgttttctctgtttttcttctctaacttctctgaaatcatctcctattaagggatagaaattgttactagaagagaatcacatgttctgtgttcattatccctacacatgtaaattaattattttatcaatactagatagagttcacatgctgactccctggatacctacagttgagaagaaaatgacagacaattatttttcctttaggtcaaaataatgtcactgctatctggataaattataagttcatatatttgaaataagatcctggaaacgaatttaaatggtgtcaaactgcagagcaacagggcttcagtatattcacatctaataggttaatatgtacatttggatgatgatttttcttgataacattaacattaattttattttttcagacatactgtaatttaaaaattaatgtgagcgtttgttttaagttcacagaaaacttaataattcaaattctcaggaattaaggactcaccataacattgtcagttctaatgaaattttgtaaaagatggcaagtttgttacctcacttgagtggggttttccttttcccccaattctaagagaatataatgtgtatactaaaacattaataaacataattttgaaaattt

SEQ ID NO: 429442 - DNA, 5779 bp, Homo sapiens
  misc_feature (965)..(965): n is a, c, g, or t
aagtcacgtgctgtgacagtagctggggtgaggccgtcgtcgccgcacgggctggttggggctgtgtctgtgggaggcgccggggtgatggcggtggagactctgtccccggactgggagtttgaccgcgttgacgacggctcgcagaaaattcatgccgaagtccaacttaagaattatgggaaatttcttgaggagtatacctctcaactgagaagaattgaggacgctctggatgactcaattggagatgtttgggatttcaatcttgatcctatagcattaaagcttttgccttatgaacagtcctctcttttggaactcataaagactgaaaacaaggtcttaaacaaagtcatcactgtttatgctgcactttgttgtgaaatcaagaaattaaaatatgaggctgaaactaaattttacaatggtctcttgttttatggagaaggagctacagatgccagcatggtggaaggtgattgccaaattcaaatggggagatttatttcattcttacaggaactgtcttgctttgttacgaggtgctatgaagtggtgatgaacgtagtccaccagttggctgccctctatatcagtaacaagattgcacccaaaattatagagacaactggagttcattttcagactatgtatgagcacttgggagaactgctaacagttttgctcaccctggatgaaattattgataatcatatcacactgaaagaccactggactatgtacaaaaggttactgaaatctgtccatcacaatccttcaaaatttggaattcaggaagaaaaattaaagccatttgaaaagttcttgctgaagctagaagggcaattactggatggaatgatattccaggcctgtatagaacaacaatttgattctctcaatggaggagtatctgtgtcaaaaaatagtacttttgctgaggaatttgcacatagtattcngtcaatttttgcaaatgtagaagccaaacttggagaaccttctgaaattgaccagagagacaagtatgttggaatttgtggactctttgtattgcactttcagatttttcgaactattgataaaaagttttataagtctttattggacatttgtaagaaggtaccagccatcactctaactgctaatattatttggtttcctgataattttctgatccagaaaataccagcagctgccaaactgctagacagaaaaagtcttcaagccattaaaatacacagggatacttttctacaacagaaagctcaatcacttaccaaagatgtacagtcttactacgtctttgtgagctcatggatgatgaaaatggaatctattttgtctaaagagcagagaatggataaatttgctgaagatctcaccaatagatgtaatgtttttatacagggcttcttgtatgcatatagtattagtaccattattaaaaccacaatgaatctctacatgtccatgcaaaagccaatgaccaaaacctcagttaaggcattgtgcaggcttgttgaacttctcaaggcaatagagcatatgttctacaggagaagcatggttgtggctgattcagtttcacatataacacagcaccttcaacatcaggctcttcattctatttctgtggccaagaaaagagtgatttctgacaaaaaatacagcgaacagcgtcttgatgtgctctctgctctagttttggctgaaaacactctaaatggaccaagcacaaagcaacggcgacttattgtttctttggcactaagtgttggcacacaaatgaaaacatttaaagatgaagaactctttccacttcaagtagtcatgaaaaaactggatcttattagtgaacttagagaacgagtccaaacacaatgtgactgttgttttttatactggcatcgagctgtcttcccaatttatttagatgatgtatatgaaaatgctgttgatgcagccagattacattacatgttcagtgctttgcgcgactgtgtacctgctatgatgcatgcaaggcatttagagtcctatgagatacttctggattgctatgacaaggaaattatggaaattttaaatgagcatttgctggacaaattatgcaaagaaatagagaaagatctgcgactttctgtgcatactcatttaaagctggatgaccgaaaccctttcaaagttggcatgaaagacctggctctttttttctctctgaatccaattcggtttttcaatcgtttcattgacattcgggcttacgtaactcactacctagacaagactttctacaatctaacaactgtagcccttcatgactgggccacttatagtgagatgagaaacttagctactcagcgttatggactggttatgacagaggcacatcttcccagtcagactttggaacagggccttgatgttttagaaattatgagaaacattcatatatttgtgtcccgatacctctataatctcaacaatcagatttttattgaacgaacaagcaataacaagcatttgaatactattaatattcggcatattgctaattcaattcgaacacatggcacgggaattatgaatacaactgttaatttcacctaccagtttttgaaaaagaagttctatatatttagccaatttatgtatgatgaacacatcaaatccagattgattaaagatattcgatttttcagggaaattaaggaccaaaatgatcataagtatccttttgatagagcagaaaaattcaatcgaggcatcagaaaacttggaataacacctgagggacagagctaccttgatcaattcaggcaactcatcagccagattggtaatgctatgggctatgtacgaatgataagatctggtggtcttcattgtagcagcaatgccattagatttgttcctgatcttgaagatattgtaaattttgaagaactagtaaaagaagaaggtcttgcagaagaaacattaaaagcagcaaggcatttggattcagtcctcagtgatcacacacgaaattctgccgaaggcacagaatatttcaaaatgcttgtagacgtttttgctccagaatttcgaaggccaaagaatatacatctccgaaatttctatataattgttccccctctgaccctcaactttgtagagcattccattagttgcaaggaaaaattaaataaaaaaaataaaattggagctgcctttactgatgatggctttgccatgggtgtggcttacattctaaagcttttggatcagtatcgggagtttgattcacttcactggttccagtctgttagagagaaatacctgaaggagataagagcagttgctaagcaacagaatgtacagtcagccagtcaagatgaaaaactcttacaaaccatgaatctcactcagaagcgactggatgtctatctacagtgcaagaattttcttcagagcagacaagactgcggctgaagaaaaccaagaaaagaaagagaaggaagaagaaactaaaacaagcaatggagacctgtctgacagcactgtgtctgctgatcctgttgtgaaatgatacggatggtattcactgcacatatgatgaaatcatcagaattgttaaaacttttgccagtggaatggataaactattgatgaattgtttcctgggtcacatctctggaaaatagatgttacagttcttaaaggcagtgctttaaagtgaagttcattctgtttccaaaggctctactttcaaaggttaagaatgagattttaaaattggatttttgcctggacttgagggtacaagatgtttctatttgaagtgaagttataaaagggcaaatccagattcataaactatcacctcggatttcttgtaatctacatgtttgtaatttgtatttgcatagatctttgatctatagttatttcaagtcatgggaaattcaatgcatatactatatacagccagtaaatacatgcttaacaaaaggaatgagcctgaagttcataaagaatacatatcaatattcttataaaaggaatatatgaagatggctttgatactagaggtgaggcacaagtgttttatgtactctcagtgtacagtataactgatgatccttctttcattgttaatttcatgtgactcacaagagctgctgatgtctttgatgagacattttataactagtttacattgctttgagaacatttaacctccaacagctgctttaaatttaagatttacttaatactcagaaaattcagataaagccatagagtcctgtttgaagcttcacttctattttggttgaaggcatgatgtatgatgtcagaaaaaaaattgaatgaattatttctacatccaaactcaggtttcttctacattagattgaattgaaattttggtgatggtttgggtagactttttttttatatcaagtataatttaaaacatcagattaaataattacactgttcaggcttttaaaaaaataccactgtgagaataaagcgctagtaagatacatcacttactgattttaaaaatacagaaagattttgagtaaattttgtgcccagcaagctgttagttttatttttgtaaaggtatgtaagttattaaatggttaatcatggccttttaaaaataaaataaagtgatacctttacaatgaagacaaaagtttaaaactttctaatacaaacaccattttgggaaatgcttgatttttttctattgcatttgtctgctaaacatttctttggataaatcctgcaaatacttctaacattattctttgattccagcttttagaatgggtgtacaatgccctgtttgtacttactggttagggtcagggtaacttgccagcccaagataaatactttaatcgttaaaagtcagaagagacagaatatgtaggaaatgttttttgtttattatgtaaacatggcttacagaattatgaacagtggatagattaaaggcatttaatatttgtaattcataataactgtagaaatggccctaaagcatgctgcataattaataatttatattttcattattataagtgtttatattaatgatcttgcatttgattatatcaaattcgtcatttcatagcaacagtattgttttctctgtttttcttctctaacttctctgaaatcatctcctattaagggatagaaattgttactagaagagaatcacatgttctgtgttcattatccctacacatgtaaattaattattttatcaatactagatagagttcacatgctgactccctggatacctacagttgagaagaaaatgacagacaattatttttcctttaggtcaaaataatgtcactgctatctggataaattataagttcatatatttgaaataagatcctggaaacgaatttaaatggtgtcaaactgcagagcaacagggcttcagtatattcacatctaataggttaatatgtacatttggatgatgatttttcttgataacattaacattaattttattttttcagacatactgtaatttaaaaattaatgtgagcgtttgttttaagttcacagaaaacttaataattcaaattctcaggaattaaggactcaccataacattgtcagttctaatgaaattttgtaaaagatggcaagtttgttacctcacttgagtggggttttccttttcccccaattctaagagaatataatgtgtatactaaaacattaataaacataattttgaaaattt

SEQ ID NO: 429443 - DNA, 5757 bp, Homo sapiens
  misc_feature (965)..(965): n is a, c, g, or t
aagtcacgtgctgtgacagtagctggggtgaggccgtcgtcgccgcacgggctggttggggctgtgtctgtgggaggcgccggggtgatggcggtggagactctgtccccggactgggagtttgaccgcgttgacgacggctcgcagaaaattcatgccgaagtccaacttaagaattatgggaaatttcttgaggagtatacctctcaactgagaagaattgaggacgctctggatgactcaattggagatgtttgggatttcaatcttgatcctatagcattaaagcttttgccttatgaacagtcctctcttttggaactcataaagactgaaaacaaggtcttaaacaaagtcatcactgtttatgctgcactttgttgtgaaatcaagaaattaaaatatgaggctgaaactaaattttacaatggtctcttgttttatggagaaggagctacagatgccagcatggtggaaggtgattgccaaattcaaatggggagatttatttcattcttacaggaactgtcttgctttgttacgaggtgctatgaagtggtgatgaacgtagtccaccagttggctgccctctatatcagtaacaagattgcacccaaaattatagagacaactggagttcattttcagactatgtatgagcacttgggagaactgctaacagttttgctcaccctggatgaaattattgataatcatatcacactgaaagaccactggactatgtacaaaaggttactgaaatctgtccatcacaatccttcaaaatttggaattcaggaagaaaaattaaagccatttgaaaagttcttgctgaagctagaagggcaattactggatggaatgatattccaggcctgtatagaacaacaatttgattctctcaatggaggagtatctgtgtcaaaaaatagtacttttgctgaggaatttgcacatagtattcngtcaatttttgcaaatgtagaagccaaacttggagaaccttctgaaattgaccagagagacaagtatgttggaatttgtggactctttgtattgcactttcagatttttcgaactattgataaaaagttttataagtctttattggacatttgtaagaaggtaccagccatcactctaactgctaatattatttggtttcctgataattttctgatccagaaaataccagcagctgccaaactgctagacagaaaaagtcttcaagccattaaaatacacagggatacttttctacaacagaaagctcaatcacttaccaaagatgtacagtcttactacgtctttgtgagctcatggatgatgaaaatggaatctattttgtctaaagagcagagaatggataaatttgctgaagatctcaccaatagatgtaatgtttttatacagggcttcttgtatgcatatagtattagtaccattattaaaaccacaatgaatctctacatgtccatgcaaaagccaatgaccaaaacctcagttaaggcattgtgcaggcttgttgaacttctcaaggcaatagagcatatgttctacaggagaagcatggttgtggctgattcagtttcacatataacacagcaccttcaacatcaggctcttcattctatttctgtggccaagaaaagagtgatttctgacaaaaaatacagcgaacagcgtcttgatgtgctctctgctctagttttggctgaaaacactctaaatggaccaagcacaaagcaacggcgacttattgtttctttggcactaagtgttggcacacaaatgaaaacatttaaagatgaagaactctttccacttcaagtagtcatgaaaaaactggatcttattagtgaacttagagaacgagtccaaacacaatgtgactgttgttttttatactggcatcgagctgtcttcccaatttatttagatgatgtatatgaaaatgctgttgatgcagccagattacattacatgttcagtgctttgcgcgactgtgtacctgctatgatgcatgcaaggcatttagagtcctatgagatacttctggattgctatgacaaggaaattatggaaattttaaatgagcatttgctggacaaattatgcaaagaaatagagaaagatctgcgactttctgtgcatactcatttaaagctggatgaccgaaaccctttcaaagttggcatgaaagacctggctctttttttctctctgaatccaattcggtttttcaatcgtttcattgacattcgggcttacgtaactcactacctagacaagactttctacaatctaacaactgtagcccttcatgactgggccacttatagtgagatgagaaacttagctactcagcgttatggactggttatgacagaggcacatcttcccagtcagactttggaacagggccttgatgttttagaaattatgagaaacattcatatatttgtgtcccgatacctctataatctcaacaatcagatttttattgaacgaacaagcaataacaagcatttgaatactattaatattcggcatattgctaattcaattcgaacacatggcacgggaattatgaatacaactgttaatttcacctaccagtttttgaaaaagaagttctatatatttagccaatttatgtatgatgaacacatcaaatccagattgattaaagatattcgatttttcagggaaattaaggaccaaaatgatcataagtatccttttgatagagcagaaaaattcaatcgaggcatcagaaaacttggaataacacctgagggacagagctaccttgatcaattcaggcaactcatcagccagattggtaatgctatgggctatgtacgaatgataagatctggtggtcttcattgtagcagcaatgccattagatttgttcctgatcttgaagatattgtaaattttgaagaactagtaaaagaagaaggtcttgcagaagaaacattaaaagcagcaaggcatttggattcagtcctcagtgatcacacacgaaattctgccgaaggcacagaatatttcaaaatgcttgtagacgtttttgctccagaatttcgaaggccaaagaatatacatctccgaaatttctatataattgttccccctctgaccctcaactttgtagagcattccattagttgcaaggaaaaattaaataaaaaaaataaaattggagctgcctttactgatgatggctttgccatgggtgtggcttacattctaaagcttttggatcagtatcgggagtttgattcacttcactggttccagtctgttagagagaaatacctgaaggagataagagcagttgctaagcaacagaatgtacagtcagccagtcaagatgaaaaactcttacaaaccatgaatctcactcagaagcgactggatgtctatctacaggaatttgaattgctgtatttctcactgagcagtgcaagaattttcttcagagcagacaagactgcggctgaagaaaaccaagaaaagaaagagaaggaagaagaaactaaaacaagcaatggagacctgtctgacagcactgtgtctgctgatcctgttgtgaaatgatacggatggtattcactgcacatatgatgaaatcatcagaattgttaaaacttttgccagtggaatggataaactattgatgaattgtttcctgggtcacatctctggaaaatagatgttacagttcttaaaggcagtgctttaaagtgaagttcattctgtttccaaaggctctactttcaaaggttaagaatgagattttaaaattggatttttgcctggacttgagggtacaagatgtttctatttgaagtgaagttataaaagggcaaatccagattcataaactatcacctcggatttcttgtaatctacatgtttgtaatttgtatttgcatagatctttgatctatagttatttcaagtcatgggaaattcaatgcatatactatatacagccagtaaatacatgcttaacaaaaggaatgagcctgaagttcataaagaatacatatcaatattcttataaaaggaatatatgaagatggctttgatactagaggtgaggcacaagtgttttatgtactctcagtgtacagtataactgatgatccttctttcattgttaatttcatgtgactcacaagagctgctgatgtctttgatgagacattttataactagtttacattgctttgagaacatttaacctccaacagctgctttaaatttaagatttacttaatactcagaaaattcagataaagccatagagtcctgtttgaagcttcacttctattttggttgaaggcatgatgtatgatgtcagaaaaaaaattgaatgaattatttctacatccaaactcaggtttcttctacattagattgaattgaaattttggtgatggtttgggtagactttttttttatatcaagtataatttaaaacatcagattaaataattacactgttcaggcttttaaaaaaataccactgtgagaataaagcgctagtaagatacatcacttactgattttaaaaatacagaaagattttgagtaaattttgtgcccagcaagctgttagttttatttttgtaaaggtatgtaagttattaaatggttaatcatggccttttaaaaataaaataaagtgatacctttacaatgaagacaaaagtttatttgtctgctaaacatttctttggataaatcctgcaaatacttctaacattattctttgattccagcttttagaatgggtgtacaatgccctgtttgtacttactggttagggtcagggtaacttgccagcccaagataaatactttaatcgttaaaagtcagaagagacagaatatgtaggaaatgttttttgtttattatgtaaacatggcttacagaattatgaacagtggatagattaaaggcatttaatatttgtaattcataataactgtagaaatggccctaaagcatgctgcataattaataatttatattttcattattataagtgtttatattaatgatcttgcatttgattatatcaaattcgtcatttcatagcaacagtattgttttctctgtttttcttctctaacttctctgaaatcatctcctattaagggatagaaattgttactagaagagaatcacatgttctgtgttcattatccctacacatgtaaattaattattttatcaatactagatagagttcacatgctgactccctggatacctacagttgagaagaaaatgacagacaattatttttcctttaggtcaaaataatgtcactgctatctggataaattataagttcatatatttgaaataagatcctggaaacgaatttaaatggtgtcaaactgcagagcaacagggcttcagtatattcacatctaataggttaatatgtacatttggatgatgatttttcttgataacattaacattaattttattttttcagacatactgtaatttaaaaattaatgtgagcgtttgttttaagttcacagaaaacttaataattcaaattctcaggaattaaggactcaccataacattgtcagttctaatgaaattttgtaaaagatggcaagtttgttacctcacttgagtggggttttccttttcccccaattctaagagaatataatgtgtatactaaaacattaataaacataattttgaaaattt

SEQ ID NO: 429444 - DNA, 4732 bp, Homo sapiens
  misc_feature (965)..(965): n is a, c, g, or t
aagtcacgtgctgtgacagtagctggggtgaggccgtcgtcgccgcacgggctggttggggctgtgtctgtgggaggcgccggggtgatggcggtggagactctgtccccggactgggagtttgaccgcgttgacgacggctcgcagaaaattcatgccgaagtccaacttaagaattatgggaaatttcttgaggagtatacctctcaactgagaagaattgaggacgctctggatgactcaattggagatgtttgggatttcaatcttgatcctatagcattaaagcttttgccttatgaacagtcctctcttttggaactcataaagactgaaaacaaggtcttaaacaaagtcatcactgtttatgctgcactttgttgtgaaatcaagaaattaaaatatgaggctgaaactaaattttacaatggtctcttgttttatggagaaggagctacagatgccagcatggtggaaggtgattgccaaattcaaatggggagatttatttcattcttacaggaactgtcttgctttgttacgaggtgctatgaagtggtgatgaacgtagtccaccagttggctgccctctatatcagtaacaagattgcacccaaaattatagagacaactggagttcattttcagactatgtatgagcacttgggagaactgctaacagttttgctcaccctggatgaaattattgataatcatatcacactgaaagaccactggactatgtacaaaaggttactgaaatctgtccatcacaatccttcaaaatttggaattcaggaagaaaaattaaagccatttgaaaagttcttgctgaagctagaagggcaattactggatggaatgatattccaggcctgtatagaacaacaatttgattctctcaatggaggagtatctgtgtcaaaaaatagtacttttgctgaggaatttgcacatagtattcngtcaatttttgcaaatgtagaagccaaacttggagaaccttctgaaattgaccagagagacaagtatgttggaatttgtggactctttgtattgcactttcagatttttcgaactattgataaaaagttttataagtctttattggacatttgtaagaaggtaccagccatcactctaactgctaatattatttggtttcctgataattttctgatccagaaaataccagcagctgccaaactgctagacagaaaaagtcttcaagccattaaaatacacagggatacttttctacaacagaaagctcaatcacttaccaaagatgtacagtcttactacgtctttgtgagctcatggatgatgaaaatggaatctattttgtctaaagagcagagaatggataaatttgctgaagatctcaccaatagatgtaatgtttttatacagggcttcttgtatgcatatagtattagtaccattattaaaaccacaatgaatctctacatgtccatgcaaaagccaatgaccaaaacctcagttaaggcattgtgcaggcttgttgaacttctcaaggcaatagagcatatgttctacaggagaagcatggttgtggctgattcagtttcacatataacacagcaccttcaacatcaggctcttcattctatttctgtggccaagaaaagagtgatttctgacaaaaaatacagcgaacagcgtcttgatgtgctctctgctctagttttggctgaaaacactctaaatggaccaagcacaaagcaacggcgacttattgtttctttggcactaagtgttggcacacaaatgaaaacatttaaagatgaagaactctttccacttcaagtagtcatgaaaaaactggatcttattagtgaacttagagaacgagtccaaacacaatgtgactgttgttttttatactggcatcgagctgtcttcccaatttatttagatgatgtatatgaaaatgctgttgatgcagccagattacattacatgttcagtgctttgcgcgactgtgtacctgctatgatgcatgcaaggcatttagagtcctatgagatacttctggattgctatgacaaggaaattatggaaattttaaatgagcatttgctggacaaattatgcaaagaaatagagaaagatctgcgactttctgtgcatactcatttaaagctggatgaccgaaaccctttcaaagttggcatgaaagacctggctctttttttctctctgaatccaattcggtttttcaatcgtttcattgacattcgggcttacgtaactcactacctagacaagactttctacaatctaacaactgtagcccttcatgactgggccacttatagtgagatgagaaacttagctactcagcgttatggactggttatgacagaggcacatcttcccagtcagactttggaacagggccttgatgttttagaaattatgagaaacattcatatatttgtgtcccgatacctctataatctcaacaatcagatttttattgaacgaacaagcaataacaagcatttgaatactattaatattcggcatattgctaattcaattcgaacacatggcacgggaattatgaatacaactgttaatttcacctaccagtttttgaaaaagaagttctatatatttagccaatttatgtatgatgaacacatcaaatccagattgattaaagatattcgatttttcagggaaattaaggaccaaaatgatcataagtatccttttgatagagcagaaaaattcaatcgaggcatcagaaaacttggaataacacctgagggacagagctaccttgatcaattcaggcaactcatcagccagattggtaatgctatgggctatgtacgaatgataagatctggtggtcttcattgtagcagcaatgccattagatttgttcctgatcttgaagatattgtaaattttgaagaactagtaaaagaagaaggtcttgcagaagaaacattaaaagcagcaaggcatttggattcagtcctcagtgatcacacacgaaattctgccgaaggcacagaatatttcaaaatgcttgtagacgtttttgctccagaatttcgaaggccaaagaatatacatctccgaaatttctatataattgttccccctctgaccctcaactttgtagagcattccattagttgcaaggaaaaattaaataaaaaaaataaaattggagctgcctttactgatgatggctttgccatgggtgtggcttacattctaaagcttttggatcagtatcgggagtttgattcacttcactggttccagtctgttagagagaaatacctgaaggagataagagcagttgctaagcaacagaatgtacagtcagccagtcaagatgaaaaactcttacaaaccatgaatctcactcagaagcgactggatgtctatctacaggaatttgaattgctgtatttctcactgagcagtgcaagaattttcttcagagcagacaagactgcggctgaagaaaaccaagaaaagaaagagaaggaagaagaaactaaaacaagcaatggagacctgtctgacagcactgtgtctgctgatcctgttgtgaaatgatacggatggtattcactgcacatatgatgaaatcatcagaattgttaaaacttttgccagtggaatggataaactattgatgaattgtttcctgggtcacatctctggaaaatagatgttacagttcttaaaggcagtgctttaaagtgaagttcattctgtttccaaaggctctactttcaaaggttaagaatgagattttaaaattggatttttgcctggacttgagggtacaagatgtttctatttgaagtgaagttataaaagggcaaatccagattcataaactatcacctcggatttcttgtaatctacatgtttgtaatttgtatttgcatagatctttgatctatagttatttcaagtcatgggaaattcaatgcatatactatatacagccagtaaatacatgcttaacaaaaggaatgagcctgaagttcataaagaatacatatcaatattcttataaaaggaatatatgaagatggctttgatactagaggtgaggcacaagtgttttatgtactctcagtgtacagtataactgatgatccttctttcattgttaatttcatgtgactcacaagagctgctgatgtctttgatgagacattttataactagtttacattgctttgagaacatttaacctccaacagctgctttaaatttaagatttacttaatactcagaaaattcagataaagccatagagtcctgtttgaagcttcacttctattttggttgaaggcatgatgtatgatgtcagaaaaaaaattgaatgaattatttctacatccaaactcaggtttcttctacattagattgaattgaaattttggtgatggtttgggtagactttttttttatatcaagtataatttaaaacatcagattaaataattacactgttcaggcttttaaaaaaataccactgtgagaataaagcgctagtaagatacatcacttactgattttaaaaatacagaaagattttgagtaaattttgtgcccagcaagctgttagttttatttttgtaaaggtatgtaagttattaaatggttaatcatggccttttaaaaataaaataaagtgatacctttacaatgaagacaaaagttt

SEQ ID NO: 429445 - DNA, 5910 bp, Homo sapiens
  misc_feature (965)..(965): n is a, c, g, or t
aagtcacgtgctgtgacagtagctggggtgaggccgtcgtcgccgcacgggctggttggggctgtgtctgtgggaggcgccggggtgatggcggtggagactctgtccccggactgggagtttgaccgcgttgacgacggctcgcagaaaattcatgccgaagtccaacttaagaattatgggaaatttcttgaggagtatacctctcaactgagaagaattgaggacgctctggatgactcaattggagatgtttgggatttcaatcttgatcctatagcattaaagcttttgccttatgaacagtcctctcttttggaactcataaagactgaaaacaaggtcttaaacaaagtcatcactgtttatgctgcactttgttgtgaaatcaagaaattaaaatatgaggctgaaactaaattttacaatggtctcttgttttatggagaaggagctacagatgccagcatggtggaaggtgattgccaaattcaaatggggagatttatttcattcttacaggaactgtcttgctttgttacgaggtgctatgaagtggtgatgaacgtagtccaccagttggctgccctctatatcagtaacaagattgcacccaaaattatagagacaactggagttcattttcagactatgtatgagcacttgggagaactgctaacagttttgctcaccctggatgaaattattgataatcatatcacactgaaagaccactggactatgtacaaaaggttactgaaatctgtccatcacaatccttcaaaatttggaattcaggaagaaaaattaaagccatttgaaaagttcttgctgaagctagaagggcaattactggatggaatgatattccaggcctgtatagaacaacaatttgattctctcaatggaggagtatctgtgtcaaaaaatagtacttttgctgaggaatttgcacatagtattcngtcaatttttgcaaatgtagaagccaaacttggagaaccttctgaaattgaccagagagacaagtatgttggaatttgtggactctttgtattgcactttcagatttttcgaactattgataaaaagttttataagtctttattggacatttgtaagaaggtaccagccatcactctaactgctaatattatttggtttcctgataattttctgatccagaaaataccagcagctgccaaactgctagacagaaaaagtcttcaagccattaaaatacacagggatacttttctacaacagaaagctcaatcacttaccaaagatgtacagtcttactacgtctttgtgagctcatggatgatgaaaatggaatctattttgtctaaagagcagagaatggataaatttgctgaagatctcaccaatagatgtaatgtttttatacagggcttcttgtatgcatatagtattagtaccattattaaaaccacaatgaatctctacatgtccatgcaaaagccaatgaccaaaacctcagttaaggcattgtgcaggcttgttgaacttctcaaggcaatagagcatatgttctacaggagaagcatggttgtggctgattcagtttcacatataacacagcaccttcaacatcaggctcttcattctatttctgtggccaagaaaagagtgatttctgacaaaaaatacagcgaacagcgtcttgatgtgctctctgctctagttttggctgaaaacactctaaatggaccaagcacaaagcaacggcgacttattgtttctttggcactaagtgttggcacacaaatgaaaacatttaaagatgaagaactctttccacttcaagtagtcatgaaaaaactggatcttattagtgaacttagagaacgagtccaaacacaatgtgactgttgttttttatactggcatcgagctgtcttcccaatttatttagatgatgtatatgaaaatgctgttgatgcagccagattacattacatgttcagtgctttgcgcgactgtgtacctgctatgatgcatgcaaggcatttagagtcctatgagatacttctggattgctatgacaaggaaattatggaaattttaaatgagcatttgctggacaaattatgcaaagaaatagagaaagatctgcgactttctgtgcatactcatttaaagctggatgaccgaaaccctttcaaagttggcatgaaagacctggctctttttttctctctgaatccaattcggtttttcaatcgtttcattgacattcgggcttacgtaactcactacctagacaagactttctacaatctaacaactgtagcccttcatgactgggccacttatagtgagatgagaaacttagctactcagcgttatggactggttatgacagaggcacatcttcccagtcagactttggaacagggccttgatgttttagaaattatgagaaacattcatatatttgtgtcccgatacctctataatctcaacaatcagatttttattgaacgaacaagcaataacaagcatttgaatactattaatattcggcatattgctaattcaattcgaacacatggcacgggaattatgaatacaactgttaatttcacctaccagtttttgaaaaagaagttctatatatttagccaatttatgtatgatgaacacatcaaatccagattgattaaagatattcgatttttcagggaaattaaggaccaaaatgatcataagtatccttttgatagagcagaaaaattcaatcgaggcatcagaaaacttggaataacacctgagggacagagctaccttgatcaattcaggcaactcatcagccagattggacatgttggctctagggatggagcagtgaagaagacaaaggctgtactcatggatcttgaactctaggtgggggaagatgcagacagaaaaatacatagtaatgctatgggctatgtacgaatgataagatctggtggtcttcattgtagcagcaatgccattagatttgttcctgatcttgaagatattgtaaattttgaagaactagtaaaagaagaaggtcttgcagaagaaacattaaaagcagcaaggcatttggattcagtcctcagtgatcacacacgaaattctgccgaaggcacagaatatttcaaaatgcttgtagacgtttttgctccagaatttcgaaggccaaagaatatacatctccgaaatttctatataattgttccccctctgaccctcaactttgtagagcattccattagttgcaaggaaaaattaaataaaaaaaataaaattggagctgcctttactgatgatggctttgccatgggtgtggcttacattctaaagcttttggatcagtatcgggagtttgattcacttcactggttccagtctgttagagagaaatacctgaaggagataagagcagttgctaagcaacagaatgtacagtcagccagtcaagatgaaaaactcttacaaaccatgaatctcactcagaagcgactggatgtctatctacaggaatttgaattgctgtatttctcactgagcagtgcaagaattttcttcagagcagacaagactgcggctgaagaaaaccaagaaaagaaagagaaggaagaagaaactaaaacaagcaatggagacctgtctgacagcactgtgtctgctgatcctgttgtgaaatgatacggatggtattcactgcacatatgatgaaatcatcagaattgttaaaacttttgccagtggaatggataaactattgatgaattgtttcctgggtcacatctctggaaaatagatgttacagttcttaaaggcagtgctttaaagtgaagttcattctgtttccaaaggctctactttcaaaggttaagaatgagattttaaaattggatttttgcctggacttgagggtacaagatgtttctatttgaagtgaagttataaaagggcaaatccagattcataaactatcacctcggatttcttgtaatctacatgtttgtaatttgtatttgcatagatctttgatctatagttatttcaagtcatgggaaattcaatgcatatactatatacagccagtaaatacatgcttaacaaaaggaatgagcctgaagttcataaagaatacatatcaatattcttataaaaggaatatatgaagatggctttgatactagaggtgaggcacaagtgttttatgtactctcagtgtacagtataactgatgatccttctttcattgttaatttcatgtgactcacaagagctgctgatgtctttgatgagacattttataactagtttacattgctttgagaacatttaacctccaacagctgctttaaatttaagatttacttaatactcagaaaattcagataaagccatagagtcctgtttgaagcttcacttctattttggttgaaggcatgatgtatgatgtcagaaaaaaaattgaatgaattatttctacatccaaactcaggtttcttctacattagattgaattgaaattttggtgatggtttgggtagactttttttttatatcaagtataatttaaaacatcagattaaataattacactgttcaggcttttaaaaaaataccactgtgagaataaagcgctagtaagatacatcacttactgattttaaaaatacagaaagattttgagtaaattttgtgcccagcaagctgttagttttatttttgtaaaggtatgtaagttattaaatggttaatcatggccttttaaaaataaaataaagtgatacctttacaatgaagacaaaagtttaaaactttctaatacaaacaccattttgggaaatgcttgatttttttctattgcatttgtctgctaaacatttctttggataaatcctgcaaatacttctaacattattctttgattccagcttttagaatgggtgtacaatgccctgtttgtacttactggttagggtcagggtaacttgccagcccaagataaatactttaatcgttaaaagtcagaagagacagaatatgtaggaaatgttttttgtttattatgtaaacatggcttacagaattatgaacagtggatagattaaaggcatttaatatttgtaattcataataactgtagaaatggccctaaagcatgctgcataattaataatttatattttcattattataagtgtttatattaatgatcttgcatttgattatatcaaattcgtcatttcatagcaacagtattgttttctctgtttttcttctctaacttctctgaaatcatctcctattaagggatagaaattgttactagaagagaatcacatgttctgtgttcattatccctacacatgtaaattaattattttatcaatactagatagagttcacatgctgactccctggatacctacagttgagaagaaaatgacagacaattatttttcctttaggtcaaaataatgtcactgctatctggataaattataagttcatatatttgaaataagatcctggaaacgaatttaaatggtgtcaaactgcagagcaacagggcttcagtatattcacatctaataggttaatatgtacatttggatgatgatttttcttgataacattaacattaattttattttttcagacatactgtaatttaaaaattaatgtgagcgtttgttttaagttcacagaaaacttaataattcaaattctcaggaattaaggactcaccataacattgtcagttctaatgaaattttgtaaaagatggcaagtttgttacctcacttgagtggggttttccttttcccccaattctaagagaatataatgtgtatactaaaacattaataaacataattttgaaaattt

SEQ ID NO: 429446 - DNA, 3185 bp, Homo sapiens
atatttaatatagttatatataagtatgtatgtttatattttaagtgtagaaatatgtaacagttttactttttatgataagaactgaagtaaaatatagcaaaatattttggttcttaggagtggaaaccttgtaatttactactgtatgtaactatattcctattagaatttagagttatttatataaatatctgatttttttgtgtggtttttaaggtaatgctatgggctatgtacgaatgataagatctggtggtcttcattgtagcagcaatgccattagatttgttcctgatcttgaagatattgtaaattttgaagaactagtaaaagaagaaggtcttgcagaagaaacattaaaagcagcaaggcatttggattcagtcctcagtgatcacacacgaaattctgccgaaggcacagaatatttcaaaatgcttgtagacgtttttgctccagaatttcgaaggccaaagaatatacatctccgaaatttctatataattgttccccctctgaccctcaactttgtagagcattccattagttgcaaggaaaaattaaataaaaaaaataaaattggagctgcctttactgatgatggctttgccatgggtgtggcttacattctaaagcttttggatcagtatcgggagtttgattcacttcactggttccagtctgttagagagaaatacctgaaggagataagagcagttgctaagcaacagaatgtacagtcagccagtcaagatgaaaaactcttacaaaccatgaatctcactcagaagcgactggatgtctatctacaggaatttgaattgctgtatttctcactgagcagtgcaagaattttcttcagagcagacaagactgcggctgaagaaaaccaagaaaagaaagagaaggaagaagaaactaaaacaagcaatggagacctgtctgacagcactgtgtctgctgatcctgttgtgaaatgatacggatggtattcactgcacatatgatgaaatcatcagaattgttaaaacttttgccagtggaatggataaactattgatgaattgtttcctgggtcacatctctggaaaatagatgttacagttcttaaaggcagtgctttaaagtgaagttcattctgtttccaaaggctctactttcaaaggttaagaatgagattttaaaattggatttttgcctggacttgagggtacaagatgtttctatttgaagtgaagttataaaagggcaaatccagattcataaactatcacctcggatttcttgtaatctacatgtttgtaatttgtatttgcatagatctttgatctatagttatttcaagtcatgggaaattcaatgcatatactatatacagccagtaaatacatgcttaacaaaaggaatgagcctgaagttcataaagaatacatatcaatattcttataaaaggaatatatgaagatggctttgatactagaggtgaggcacaagtgttttatgtactctcagtgtacagtataactgatgatccttctttcattgttaatttcatgtgactcacaagagctgctgatgtctttgatgagacattttataactagtttacattgctttgagaacatttaacctccaacagctgctttaaatttaagatttacttaatactcagaaaattcagataaagccatagagtcctgtttgaagcttcacttctattttggttgaaggcatgatgtatgatgtcagaaaaaaaattgaatgaattatttctacatccaaactcaggtttcttctacattagattgaattgaaattttggtgatggtttgggtagactttttttttatatcaagtataatttaaaacatcagattaaataattacactgttcaggcttttaaaaaaataccactgtgagaataaagcgctagtaagatacatcacttactgattttaaaaatacagaaagattttgagtaaattttgtgcccagcaagctgttagttttatttttgtaaaggtatgtaagttattaaatggttaatcatggccttttaaaaataaaataaagtgatacctttacaatgaagacaaaagtttaaaactttctaatacaaacaccattttgggaaatgcttgatttttttctattgcatttgtctgctaaacatttctttggataaatcctgcaaatacttctaacattattctttgattccagcttttagaatgggtgtacaatgccctgtttgtacttactggttagggtcagggtaacttgccagcccaagataaatactttaatcgttaaaagtcagaagagacagaatatgtaggaaatgttttttgtttattatgtaaacatggcttacagaattatgaacagtggatagattaaaggcatttaatatttgtaattcataataactgtagaaatggccctaaagcatgctgcataattaataatttatattttcattattataagtgtttatattaatgatcttgcatttgattatatcaaattcgtcatttcatagcaacagtattgttttctctgtttttcttctctaacttctctgaaatcatctcctattaagggatagaaattgttactagaagagaatcacatgttctgtgttcattatccctacacatgtaaattaattattttatcaatactagatagagttcacatgctgactccctggatacctacagttgagaagaaaatgacagacaattatttttcctttaggtcaaaataatgtcactgctatctggataaattataagttcatatatttgaaataagatcctggaaacgaatttaaatggtgtcaaactgcagagcaacagggcttcagtatattcacatctaataggttaatatgtacatttggatgatgatttttcttgataacattaacattaattttattttttcagacatactgtaatttaaaaattaatgtgagcgtttgttttaagttcacagaaaacttaataattcaaattctcaggaattaaggactcaccataacattgtcagttctaatgaaattttgtaaaagatggcaagtttgttacctcacttgagtggggttttccttttcccccaattctaagagaatataatgtgtatactaaaacattaataaacataattttgaaaattt

SEQ ID NO: 429447 - DNA, 3636 bp, Homo sapiens
  misc_feature (965)..(965): n is a, c, g, or t
aagtcacgtgctgtgacagtagctggggtgaggccgtcgtcgccgcacgggctggttggggctgtgtctgtgggaggcgccggggtgatggcggtggagactctgtccccggactgggagtttgaccgcgttgacgacggctcgcagaaaattcatgccgaagtccaacttaagaattatgggaaatttcttgaggagtatacctctcaactgagaagaattgaggacgctctggatgactcaattggagatgtttgggatttcaatcttgatcctatagcattaaagcttttgccttatgaacagtcctctcttttggaactcataaagactgaaaacaaggtcttaaacaaagtcatcactgtttatgctgcactttgttgtgaaatcaagaaattaaaatatgaggctgaaactaaattttacaatggtctcttgttttatggagaaggagctacagatgccagcatggtggaaggtgattgccaaattcaaatggggagatttatttcattcttacaggaactgtcttgctttgttacgaggtgctatgaagtggtgatgaacgtagtccaccagttggctgccctctatatcagtaacaagattgcacccaaaattatagagacaactggagttcattttcagactatgtatgagcacttgggagaactgctaacagttttgctcaccctggatgaaattattgataatcatatcacactgaaagaccactggactatgtacaaaaggttactgaaatctgtccatcacaatccttcaaaatttggaattcaggaagaaaaattaaagccatttgaaaagttcttgctgaagctagaagggcaattactggatggaatgatattccaggcctgtatagaacaacaatttgattctctcaatggaggagtatctgtgtcaaaaaatagtacttttgctgaggaatttgcacatagtattcngtcaatttttgcaaatgtagaagccaaacttggagaaccttctgaaattgaccagagagacaagtatgttggaatttgtggactctttgtattgcactttcagatttttcgaactattgataaaaagttttataagtctttattggacatttgtaagaaggtaccagccatcactctaactgctaatattatttggtttcctgataattttctgatccagaaaataccagcagctgccaaactgctagacagaaaaagtcttcaagccattaaaatacacagggatacttttctacaacagaaagctcaatcacttaccaaagatgtacagtcttactacgtctttgtgagctcatggatgatgaaaatggaatctattttgtctaaagagcagagaatggataaatttgctgaagatctcaccaatagatgtaatgtttttatacagggcttcttgtatgcatatagtattagtaccattattaaaaccacaatgaatctctacatgtccatgcaaaagccaatgaccaaaacctcagttaaggcattgtgcaggcttgttgaacttctcaaggcaatagagcatatgttctacaggagaagcatggttgtggctgattcagtttcacatataacacagcaccttcaacatcaggctcttcattctatttctgtggccaagaaaagagtgatttctgacaaaaaatacagcgaacagcgtcttgatgtgctctctgctctagttttggctgaaaacactctaaatggaccaagcacaaagcaacggcgacttattgtttctttggcactaagtgttggcacacaaatgaaaacatttaaagatgaagaactctttccacttcaagtagtcatgaaaaaactggatcttattagtgaacttagagaacgagtccaaacacaatgtgactgttgttttttatactggcatcgagctgtcttcccaatttatttagatgatgtatatgaaaatgctgttgatgcagccagattacattacatgttcagtgctttgcgcgactgtgtacctgctatgatgcatgcaaggcatttagagtcctatgagatacttctggattgctatgacaaggaaattatggaaattttaaatgagcatttgctggacaaattatgcaaagaaatagagaaagatctgcgactttctgtgcatactcatttaaagctggatgaccgaaaccctttcaaagttggcatgaaagacctggctctttttttctctctgaatccaattcggtttttcaatcgtttcattgacattcgggcttacgtaactcactacctagacaagactttctacaatctaacaactgtagcccttcatgactgggccacttatagtgagatgagaaacttagctactcagcgttatggactggttatgacagaggcacatcttcccagtcagactttggaacagggccttgatgttttagaaattatgagaaacattcatatatttgtgtcccgatacctctataatctcaacaatcagatttttattgaacgaacaagcaataacaagcatttgaatactattaatattcggcatattgctaattcaattcgaacacatggcacgggaattatgaatacaactaaatgggcattcaccgcttggcgtggtggcccacgcttgtaatcccagcactttgggaggctgaagcaggaggatcacctgaggttgggagttcaagaccagcctgaccaacatggagaaaccccatctctactaaaaatacaaaattagccaggcgtggtggcgggcgcctgtaatcccagctgcttgggaggctgaggcaggagaatcgcttgaacctgggaggcagaggttgcagtgagctgagattgcgccattgcactccagcttgggcagcaagagcgaaactccatctcaaaaaaaaaaaaacaaacaaaaacgaaatgggcattcacttgaaggaattatttgaactcgtatgctatttttctgtctgtggaaaaagagaagtctttgaatttacctggttttcagagcacagttaatttctcctttaggggagaagactgaatgcttaagtagtacagtattattaaacacatttggagtagggaattgggagaaaatggaaagttaagttgggatcatttaagtatacagtgggaaagcattgaagattttgagccaatgagtgatatgattggagctccattatagtggggttatcaatatagaaatgaaacatacaattttaaattccaaatgaagagtcatccatgtaatgatcatgtttgtacctttgaggataaataaaactgaacttttgagagtaaaaaaaaaaaaaaaaaaaaaaaaaaaaaaaaaaaaaaaaaagggggggggggaaaaaaaaatcccccgggggggccatgttttacgtgatcaccggttttttgtgaaaaggggggcccatatagggagcacgattataaaaggcaggacaggggcgcgttatacaaggcgtgagggaaagggcagattggggacttggggaaggaccctactctgtggggtgggcaattgggacactacttagaaagaataagtcatagtaatataattaggggtaagtggtcaccaccgcattgtggacgaaagtggtgggtaatatagatg

SEQ ID NO: 429448 - DNA, 1251 bp, Homo sapiens
atgccgcgcgatcccgagtagattagtgagcatggtacatactgtgatgtcctatgagagtcctgggcatgaacatattagtctagagtgtgctacatccatgtacctaacagcaccgtaggcctaaccgagactatccttgaacaaatgaccgaactaggagttcaagaagtcactaatggaaactatcatttagagataccagctctgaactcgatcttatagcatttgtctgctaaacatttctttggataaatcctgcaaatacttctaacattattctttgattccagcttttagaatgggtgtacaatgccctgtttgtacttactggttagggtcagggtaacttgccagcccaagataaatactttaatcgttaaaagtcagaagagacagaatatgtaggaaatgttttttgtttattatgtaaacatggcttacagaattatgaacagtggatagattaaaggcatttaatatttgtaattcataataactgtagaaatggccctaaagcatgctgcataattaataatttatattttcattattataagtgtttatattaatgatcttgcatttgattatatcaaattcgtcatttcatagcaacagtattgttttctctgtttttcttctctaacttctctgaaatcatctcctattaagggatagaaattgttactagaagagaatcacatgttctgtgttcattatccctacacatgtaaattaattattttatcaatactagatagagttcacatgctgactccctggatacctacagttgagaagaaaatgacagacaattatttttcctttaggtcaaaataatgtcactgctatctggataaattataagttcatatatttgaaataagatcctggaaacgaatttaaatggtgtcaaactgcagagcaacagggcttcagtatattcacatctaataggttaatatgtacatttggatgatgatttttcttgataacattaacattaattttattttttcagacatactgtaatttaaaaattaatgtgagcgtttgttttaagttcacagaaaacttaataattcaaattctcaggaattaaggactcaccataacattgtcagttctaatgaaattttgtaaaagatggcaagtttgttacctcacttgagtggggttttccttttcccccaattctaagagaatataatgtgtatactaaaacattaataaacataattttgaaaattt

SEQ ID NO: 429449 - DNA, 3024 bp, Homo sapiens
  misc_feature (965)..(965): n is a, c, g, or t
aagtcacgtgctgtgacagtagctggggtgaggccgtcgtcgccgcacgggctggttggggctgtgtctgtgggaggcgccggggtgatggcggtggagactctgtccccggactgggagtttgaccgcgttgacgacggctcgcagaaaattcatgccgaagtccaacttaagaattatgggaaatttcttgaggagtatacctctcaactgagaagaattgaggacgctctggatgactcaattggagatgtttgggatttcaatcttgatcctatagcattaaagcttttgccttatgaacagtcctctcttttggaactcataaagactgaaaacaaggtcttaaacaaagtcatcactgtttatgctgcactttgttgtgaaatcaagaaattaaaatatgaggctgaaactaaattttacaatggtctcttgttttatggagaaggagctacagatgccagcatggtggaaggtgattgccaaattcaaatggggagatttatttcattcttacaggaactgtcttgctttgttacgaggtgctatgaagtggtgatgaacgtagtccaccagttggctgccctctatatcagtaacaagattgcacccaaaattatagagacaactggagttcattttcagactatgtatgagcacttgggagaactgctaacagttttgctcaccctggatgaaattattgataatcatatcacactgaaagaccactggactatgtacaaaaggttactgaaatctgtccatcacaatccttcaaaatttggaattcaggaagaaaaattaaagccatttgaaaagttcttgctgaagctagaagggcaattactggatggaatgatattccaggcctgtatagaacaacaatttgattctctcaatggaggagtatctgtgtcaaaaaatagtacttttgctgaggaatttgcacatagtattcngtcaatttttgcaaatgtagaagccaaacttggagaaccttctgaaattgaccagagagacaagtatgttggaatttgtggactctttgtattgcactttcagatttttcgaactattgataaaaagttttataagtctttattggacatttgtaagaaggtaccagccatcactctaactgctaatattatttggtttcctgataattttctgatccagaaaataccagcagctgccaaactgctagacagaaaaagtcttcaagccattaaaatacacagggatacttttctacaacagaaagctcaatcacttaccaaagatgtacagtcttactacgtctttgtgagctcatggatgatgaaaatggaatctattttgtctaaagagcagagaatggataaatttgctgaagatctcaccaatagatgtaatgtttttatacagggcttcttgtatgcatatagtattagtaccattattaaaaccacaatgaatctctacatgtccatgcaaaagccaatgaccaaaacctcagttaaggcattgtgcaggcttgttgaacttctcaaggcaatagagcatatgttctacaggagaagcatggttgtggctgattcagtttcacatataacacagcaccttcaacatcaggctcttcattctatttctgtggccaagaaaagagtgatttctgacaaaaaatacagcgaacagcgtcttgatgtgctctctgctctagttttggctgaaaacactctaaatggaccaagcacaaagcaacggcgacttattgtttctttggcactaagtgttggcacacaaatgaaaacatttaaagatgaagaactctttccacttcaagtagtcatgaaaaaactggatcttattagtgaacttagagaacgagtccaaacacaatgtgactgttgttttttatactggcatcgagctgtcttcccaatttatttagatgatgtatatgaaaatgctgttgatgcagccagattacattacatgttcagtgctttgcgcgactgtgtacctgctatgatgcatgcaaggcatttagagtcctatgagatacttctggattgctatgacaaggaaattatggaaattttaaatgagcatttgctggacaaattatgcaaagaaatagagaaagatctgcgactttctgtgcatactcatttaaagctggatgaccgaaaccctttcaaagttggcatgaaagacctggctctttttttctctctgaatccaattcggtttttcaatcgtttcattgacattcgggcttacgtaactcactacctagacaagactttctacaatctaacaactgtagcccttcatgactgggccacttatagtgagatgagaaacttagctactcagcgttatggactggttatgacagaggcacatcttcccagtcagactttggaacagggccttgatgttttagaaattatgagaaacattcatatatttgtgtcccgatacctctataatctcaacaatcagatttttattgaacgaacaagcaataacaagcatttgaatactattaatattcggcatattgctaattcaattcgaacacatggcacgggaattatgaatacaactgtaagaacttttctttgggggttgagtgggtaatagacccgtttaatagcttggaacgtggttttctcatagaatattgcggtaaacatacactactagtttatattttacatgaatttccattttttttctggttagtaattaaaatgtctggtcctaaaattgtgttggatgtgatgggagctgtgatacaaaagacactttagggtagattaccatctcagagccatcattataaatagtgctagatatttgaggacatcagcacattaatatatgtgtgtgcacacatatatatatgtttatctgtgttgatctgtgatccctgaaagtttacttttgaaagtcaacaatagatagtaatttacttaatgttatttatgccctttttggggcagggtttgctaattatttgatgtccat

SEQ ID NO: 429450 - DNA, 352 bp, Homo sapiens
gaaaaaatatttttaagaaatattcatatttttctttatggaaataagtgtgtttaaatgcacaagataggaaaggactagcgaatgtgattttttttgggtatatttagttaaagtatatgctttaggttctttttctttaggaaagttaagacagttgtggaaaatcatttttccttcagatcgaggttttgtctttcaagataattaacttttgcagtattgtttagattagagacctggtttttctaaattcatgtacattttaattttcttcttagtacatgttcagtgctttgcgcgactgtgtacctgctatgatgcatgcaaggcatttagagtcctatgagat

SEQ ID NO: 429451 - DNA, 425 bp, Homo sapiens
cattattaaaaccacaatgaatctctacatgtccatgcaaaagccaatgaccaaaacctcagttaaggcattgtgcaggcttgttgaacttctcaaggtaggttttagattattttactgctccatcataattgagaaatgacccaggcttaaattaggataatcttgtaaggtttgactacatgattatatgagaacagaaaattgtgagaaagtacttctctctcaattgaataaaggaactagccatttaaataaatttctgagtaactacttatggctggtcattatatttaaactttattaaataaagttaatatatccagtttacacagtaaaaaaaaaagttaatgtagtgagagagaaaagaaagaaaatggaaaagttaactttaatattatcagtaaagctttactcttggaagt

SEQ ID NO: 429452 - DNA, 558 bp, Homo sapiens
aatcagccaccttatgctccataggacaagtagagtcgtgattgtgtcatgttgggccatttctttccttacgtgttgtctaatgagattgttttggatgaagtagttgatatggtgctaatgttgagtacaggatctaacacaagtttaagtcgaataaagctagcctcaatttgtgtttttaaaatttcagttatttttcaaattaaaagaaatgttcttttcctttgtttctgtagcttttgccttatgaacagtcctctcttttggaactcataaagactgaaaacaaggtacagaatcctaaatctaaaaaattgttttaaaaatgttttagttatctgtaacaatttactttttattttgtttttactcatgaaactaggtcttaaacaaagtcatcactgtttatgctgcactttgttgtgaaatcaagaaattaaaatatgaggtaattatttgaattcttgtcttaaaactttaaaaacatcatttagaagcaagtatgtgtttatatatgtacagtgtgcaataaatatttattgaatgttgaatgaa

SEQ ID NO: 429453 - DNA, 636 bp, Homo sapiens
cagaaacttgcccgtgctcaagagaggtggggaaaaagagtgagaggcggccagatgaactctaccgtccgccagctccgcgttccttcgcacgtgcctctgcgggatccctcgtgggaaagtctcagaaatgtccctaaactgaagaaaagccggggaatgcaaggagagcaaggtcgtaggttgttccgactgctccttaacgacctgcctggcagggaccgactaccctgctcctacccgcagccccatgtggagcaggcatccaccagtgcctccccgcgcttgctagcagtgaacattcctgaagacactctcctctcttatcctgaatcctcgctcccactgcagagacactgcgccttccataggttctccaaggtcctcagtgagctctgtccgcgctgcctaccatccacaccctgcgccatccccttcttctttgcctggtaaaaagattcacaaaacccggcgactagaagcccatgcagtcttccttggagctttgactgtccaccagttaaactccctctctgaggagttgcagtggcccccagctgcccccaccgacagccacactccaggacccagcctagggggctgtcccctgagcaacctaagcttgtaatcccccac

SEQ ID NO: 429454 - DNA, 690 bp, Homo sapiens
cagaaacttgcccgtgctcaagagaggtggggaaaaagagtgagaggcggccagatgaactctaccgtccgccagctccgcgttccttcgcacgtgcctctgcgggatccctcgtgggaaagtctcagaaatgtccctaaactgaagaaaagccggggaatgcaaggagagcaaggtcgtaggttgttccgactgctccttaacgacctgcctggcagggaccgactaccctgctcctacccgcagccccatgtggagcaggcatccaccagtgcctccccgcgcttgctagcagtgaacattcctgaagacactctcctctcttatcctgaatcctcgctcccactgcagagacactgcgccttccataggttctccaaggtcctcagtgagctctgtccgcgctgcctaccatccacaccctgcgccatccccttcttcctggccagccccttctgcctttcacacgggctcccacaaactgtcctaagtgtttttgcctggtaaaaagattcacaaaacccggcgactagaagcccatgcagtcttccttggagctttgactgtccaccagttaaactccctctctgaggagttgcagtggcccccagctgcccccaccgacagccacactccaggacccagcctagggggctgtcccctgagcaacctaagcttgtaatcccccac

SEQ ID NO: 429455 - DNA, 5223 bp, Homo sapiens
  misc_feature (2)..(3): n is a, c, g, or t
  misc_feature (5028)..(5028): n is a, c, g, or t
cnnaaggagtcccctggaaggcctccacaacctcacgctagagtcaagaatggatatgttcagcttggatatgatcatcagtgacccagctgcagaagccagcagggctgggaagaagcagctcagaggtgttcagaacccttgcccatctgccagagccagaccccggcacaagtccctcaacataaaggacaagatatcagaatgggaagggaagaaagaggtgcccactcctgcacccagcaggagagcagacggacaggaggattatctgccgtcctctacggtggagaggaggagtagtgatggggtgagaactcaggtcacagaggctaagaatggaatgaggccaggaacagagagcacagagaaggagaggaataaaggagcagtgaacgtcgggggacaggacccagagccggggcaagacctaagccagccagaacgggaagtggatcctagctggggccgaggccgagagccaagacttggcaagctacgctttcagaacgatcacctctccgtgctgaagcaggtcaagaaactcgagcaggctttgaaggatgggtcggcagggctggatccccagttaccagggacttgttactccccacactgccctcctgacaaggcagaggcagggtccacccttcctgagaacctgggaggcgggagtggctcagaagtcagccagagggtccacccctcggacctggaaggcagggagcccacccctgagcttgtggaggacaggaaaggttcatgcagaaggccctgggaccggagccttgagaacgtgtataggggctcggagggttcccccacaaagcccttcatcaaccctctgccaaaaccccggagaacgttcaaacatgccggagaaggggacaaagatgggaagcctggcatcggcttcaggaaagagaaaagaaatctgcctcctctgccctctctacctcccccgcctctgccctcctctcccccaccttcctctgtgaacagaagactgtggaccgggagacagaaatccagtgcagaccacagaaagtcctatgagtttgaagatttactgcagtcttcctctgagagcagcagggtggactggtacgcgcagactaagctggggctgacacgcactttatcggaggagaacgtctatgaagacattctagatccgccaatgaaggagaacccttatgaggacatcgagttacatggtcgctgcctgggaaagaagtgtgtcttgaattttcctgcttctcccacctcttccatccctgacacactcaccaagcagtcattgtccaaacctgcttttttccgacaaaattcagagaggaggaacttcaagctgctggacactaggaagctgagtcgggatggaactgggtccccttccaaaatcagccctccctccactcccagcagccctgatgacattttctttaaccttggagacccacagaacggcaggaagaagagaaagatacccaagctggtgttgcgaatcaacgccatttatgaggtccggagaggaaagaaacgggtgaagaggctgtcccagtcaatggagagcaactcaggaaaagtgacagatgagaacagtgagtctgacagtgacacagaggagaagctgaaagctcacagccagcgcctggtcaacgtgaagtcccggctgaagcaggcgcctcggtacccatcacttgcccgggaactcatcgagtaccaggagaggcagctcttcgagtactttgtggttgtgtctttgcacaagaagcaggccggggctgcctacgtgccagaactcacccaacagttccctctgaagttggaaaggtctttcaagttcatgagagaagctgaggaccaactgaaggccattccccagttctgttttcccgatgccaaggattgggttcctgtccagcagttcaccagtgaaacattctcatttgtcttaactggagaagatgggagcagaaggttcggttactgccgaagactgctgcctggaggcaaagggaagcgccttcctgaagtttactgcattgtgagccgcctgggatgcttcagcctcttttcaaggatcttggatgaggtggaaaaaagacgaggcatctctcctgccctggttcagccactcatgagaagtgtcatggaagcccctttcccagccctgggcaaaaccatccttgtcaagaacttcctgccaggttcaggaactgaggtgatcgaactgtgccgcccgctggactcccggctcgagcacgtggactttgagtctctcttctcctccctcagcgtccgccacctggtctgtgtgtttgcctccctgcttctggagaggagggtcatcttcattgcagacaagctcagcatcctgtccaagtgctgccacgcgatggtggcgctgatctaccccttcgcctggcagcacacctacatcccggtgctgccacccgccatggtcgacatcgtgtgctcgccgacgcccttcctcatcgggctgctctccagctcgctgccactgctcagggagctgccgctggaagaggtccttgtggttgacctcgtcaacagccggttcctcagacagatggacgatgaggactccatcctgccccggaagcttcaggtggccctggaacacattctggaacagaggaacgagctggcttgtgagcaggacgaagggcccctagacggcaggcacggtccagagtccagccccttgaacgaggtggtgtctgaagcctttgtccgcttcttcgtggagattgtgggacactactctttgttcctgacgtcgggcgagcgtgaggagagaaccctgcagcgggaggccttccgcaaagctgtctcctccaagagcctccgccacttcctggaggtcttcatggagactcagatgtttcggggcttcatccaggagcgggagctgcgccggcaggatgccaaaggtctgtttgaggtccgagcccaagagtatctggaaacactccccagtggagagcacagcggtgtcaataagttcctgaagggactaggcaataaaatgaaatttctccacaagaaataactctcagcctcaagggaaaacttcctcctagtgcagccctatgctttaaaaacagttcctggtggcctttctgaaaggctgggtcccaggttgtcacggtgcggaactggaggccgcggtggcttctggccgaggctgggctcttccctggatgaggacctgggagccgcctgggaggacagccccagaaagggagcccgagaccaggcgtgtcgccgacatgcaaatgggttgttttggtggttgggtttttttttttatcttagatattaaaagtaagaaaaatgtgtgggttttctgtttattatgccaaggccaagaggagcctgtcctgccctacacgttcccctcgttcgtcccatccggccgctcagcaatggagctaagaggagtggtgatgggcaacagaaatgaggtgctcctcggagcgggactgacgacacatgaggactgtgaggggaggaggcggagccggtgcctcgggttcagggagtgaggcctcctagtgaaaggctgggcccttgccctagagtggaggctagggaggaacgggagctgtagacggatgtggcttcccagacacgctgctcttccagaagggacagtgatgccacctggtggccgaggccatggacgtctctcttcccaaatggacctgactcttcttgactgccttgttctcttagaagaagccatggaactgtccactgcctgagtagtccctggcttttagaggcacacacacaaaaagaggtcagtaaactgttctaggggtcttcaagtttacgacactgctcacggcccaccttccaacacatagccacaactttgaccccgttcccatctcattccaggggcccagagcagcattaatgcaatagtggatgtgcactgcctgtacacggtggggggcggggggaccttttgcggctgatggtaacaagatggagggtgagaacgctggggcggcgtcatgagccgtgtgcagccagagaggcagcttgcgttttctggaccagaagcagggagggtgtggagaaggccaaaaacctcagggcgacctaagagctgtcctgcagcggggacagtggggacagcagggacagcggggaggcaggaaaagccccgaacacagctgaggcaggttctcagagcaagcctcagggccactaccaggtgacccctgccctcagctctcaccagcgaccctcacagaaacacaaaagggaggggcgccgacctcaacaatggcccagaggggccatactgcctggcaggggttctcaacctttagggagcgggagcaaggggccttccgaggataaatagaaatgaggaaaatgaggggaggtgacctctcatccttcctcttagctggagttatggaccccctcgcccctccaagttctacccaggctttggtgtgtccattactttttcagaggtgaagatccacagtttacatcaaattctcaaagatgctcccagaatggtagaaaccaggctgtgcataaaaattaacctgcctggccgggcgcaatggctcatgcctataatcccagcactttgagaggccaaggcaggcaggtggatcacctgaggtcaggagttcaagatcagcctggccaacatggcaaaaccccatctgtactaaaaatacaagaaaaacttagccgggcatcgtggtgcgtgcctgtaatcccaactacctggaaggctgaggcagaagaatcgcttgaactggggaggagaaggttgcagtgagccgagatcatgccactgcactccagcctggacaacagagcaagactccttctcaaaaaaactctggctgggtgtgtgtgggtggggactagggggatgcctgaatgagaatccctgaatccttgagtgtgggggttcaggaatatgtatctaacaagctccttggattagtcaagtttgtgtgngggctcaggaatatatgtatctagcaagctcctcagactagtcaactttcttaatagtctgcatatttgtatattgcccagaaagggacactttttggaatatactttcttttttttaacttatttcgcattatattgtttacttaataactccaagcaaataaatgtacatctttatcaacattcccaatgact

SEQ ID NO: 429456 - DNA, 690 bp, Homo sapiens
  misc_feature (21)..(21): n is a, c, g, or t
  misc_feature (42)..(42): n is a, c, g, or t
  misc_feature (51)..(51): n is a, c, g, or t
  misc_feature (615)..(615): n is a, c, g, or t
  misc_feature (632)..(632): n is a, c, g, or t
  misc_feature (660)..(660): n is a, c, g, or t
  misc_feature (663)..(663): n is a, c, g, or t
tttaatacctttcgactaccnctactatgctgcgagaagacnacagaaggncggttactgccgaagactgctgcctggaggcaaagggaagcgccttcctgaagtttactgcattgtgagccgcctgggatgcttcagcctcttttcaaggatcttggatgaggtggaaaaaagacgaggcatctctcctgccctggttcagccactcatgagaagtgtcatggaagcccctttcccagccctgggcaaaaccatccttgtcaagaacttcctgccaggttcaggaactgaggtgatcgaactgtgccgcccgctggactcccggctcgagcacgtggactttgagtctctcttctcctccctcagcgtccgccacctggtctgtgtgtttgcctccctgcttctggagaggagggtcatcttcattgcagacaagctcagcacacctacatcccggtgctgccacccgccatggtcgacatcgtgtgctcgccgacgcccttcctcatcgggctgctctccagctcgctgccactgctcagggagctgccgctggaagagtccttgtgggttgaccctcgttaaacagccggtttccttagacaggatggaccnattaaggacttccattncttgccccccggaaaagctttaaggttnggncccttggaaacaacaattttttgggaa

SEQ ID NO: 429457 - DNA, 3366 bp, Homo sapiens
  misc_feature (2)..(3): n is a, c, g, or t
cnnaaggagtcccctggaaggcctccacaacctcacgctagagtcaagaatggatatgttcagcttggatatgatcatcagtgacccagctgcagaagccagcagggctgggaagaagcagctcagaggtgttcagaacccttgcccatctgccagagccagaccccggcacaagtccctcaacataaaggacaagatatcagaatgggaagggaagaaagaggtgcccactcctgcacccagcaggagagcagacggacaggaggattatctgccgtcctctacggtggagaggaggagtagtgatggggtgagaactcaggtcacagaggctaagaatggaatgaggccaggaacagagagcacagagaaggagaggaataaaggagcagtgaacgtcgggggacaggacccagagccggggcaagacctaagccagccagaacgggaagtggatcctagctggggccgaggccgagagccaagacttggcaagctacgctttcagaacgatcacctctccgtgctgaagcaggtcaagaaactcgagcaggctttgaaggatgggtcggcagggctggatccccagttaccagggacttgttactccccacactgccctcctgacaaggcagaggcagggtccacccttcctgagaacctgggaggcgggagtggctcagaagtcagccagagggtccacccctcggacctggaaggcagggagcccacccctgagcttgtggaggacaggaaaggttcatgcagaaggccctgggaccggagccttgagaacgtgtataggggctcggagggttcccccacaaagcccttcatcaaccctctgccaaaaccccggagaacgttcaaacatgccggagaaggggacaaagatgggaagcctggcatcggcttcaggaaagagaaaagaaatctgcctcctctgccctctctacctcccccgcctctgccctcctctcccccaccttcctctgtgaacagaagactgtggaccgggagacagaaatccagtgcagaccacagaaagtcctatgagtttgaagatttactgcagtcttcctctgagagcagcagggtggactggtacgcgcagactaagctggggctgacacgcactttatcggaggagaacgtctatgaagacattctagatccgccaatgaaggagaacccttatgaggacatcgagttacatggtcgctgcctgggaaagaagtgtgtcttgaattttcctgcttctcccacctcttccatccctgacacactcaccaagcagtcattgtccaaacctgcttttttccgacaaaattcagagaggaggaacttcaagctgctggacactaggaagctgagtcgggatggaactgggtccccttccaaaatcagccctccctccactcccagcagccctgatgacattttctttaaccttggagacccacagaacggcaggaagaagagaaagatacccaagctggtgttgcgaatcaacgccatttatgaggtccggagaggaaagaaacgggtgaagaggctgtcccagtcaatggagagcaactcaggaaaagtgacagatgagaacagtgagtctgacagtgacacagaggagaagctgaaagctcacagccagcgcctggtcaacgtgaagtcccggctgaagcaggcgcctcggtacccatcacttgcccgggaactcatcgagtaccaggagaggcagctcttcgagtactttgtggttgtgtctttgcacaagaagcaggccggggctgcctacgtgccagaactcacccaacagttccctctgaagttggaaaggtctttcaagttcatgagagaagctgaggaccaactgaaggccattccccagttctgttttcccgatgccaaggattgggttcctgtccagcagttcaccagtgaaacattctcatttgtcttaactggagaagatgggagcagaaggttcggttactgccgaagactgctgcctggaggcaaagggaagcgccttcctgaagtttactgcattgtgagccgcctgggatgcttcagcctcttttcaaggatcttggatgaggtggaaaaaagacgaggcatctctcctgccctggttcagccactcatgagaagtgtcatggaagcccctttcccagccctgggcaaaaccatccttgtcaagaacttcctgccaggttcaggaactgaggtgatcgaactgtgccgcccgctggactcccggctcgagcacgtggactttgagtctctcttctcctccctcagcgtccgccacctggtctgtgtgtttgcctccctgcttctggagaggagggtcatcttcattgcagacaagctcagcatcctgtccaagtgctgccacgcgatggtggcgctgatctaccccttcgcctggcagcacacctacatcccggtgctgccacccgccatggtcgacatcgtgtgctcgccgacgcccttcctcatcgggctgctctccagctcgctgccactgctcagggagctgccgctggaagaggtccttgtggttgacctcgtcaacagccggttcctcagacagatggacgatgaggactccatcctgccccggaagcttcaggtggccctggaacacattctggaacagaggaacgagctggcttgtgagcaggacgaagggcccctagacggcaggcacggtccagagtccagccccttgaacgaggtggtgtctgaagcctttgtccgcttcttcgtggagattgtgggacactactctttgttcctgacgtcgggcgagcgtgaggagagaaccctgcagcgggaggccttccgcaaagctgtctcctccaagagcctccgccacttcctggaggtcttcatggagactcagatgtttcggggcttcatccaggagcgggagctgcgccggcaggatgccaaaggtctgtttgaggtccgagcccaagagtatctggaaacactccccagtggagagcacagcggtgtcaataagttcctgaagggactaggcaataaaatgaaatttctccacaagaaataactctcagcctcaagggaaaacttcctcctagtgcagccctatgctttaaaaacagttcctggtggcctttctgaaaggctgggtcccaggttgtcacggtgcggaactggaggccgcggtggcttctggccgaggctgggctcttccctggatgaggacctgggagccgcctgggaggacagccccagaaagggagcccgagaccaggcgtgtcgccgacatgcaaatgggttgttttggtggttgggtttttttttttatcttagatattaaaagtaagaaaaatg

SEQ ID NO: 429458 - DNA, 1017 bp, Homo sapiens
ctctccctgttctctccccggctgcagcatcctgtccaagtgctgccacgcgatggtggcgctgatctaccccttcgcctggcagcacacctacatcccggtgctgccacccgccatggtcgacatcgtgtgctcgccgacgcccttcctcatcgggctgctctccagctcgctgccactgctcagggagctgccgctggaagaggtccttgtggttgacctcgtcaacagccggttcctcagacagatggacgatgaggactccatcctgccccggaagcttcaggtggccctggaacacattctggaacagaggaacgagctggcttgtgagcaggacgaagggcccctagacggcaggcacggtccagagtccagccccttgaacgaggtggtgtctgaagcctttgtccgcttcttcgtggagattgtgggacactactctttgttcctgacgtcgggcgagcgtgaggagagaaccctgcagcgggaggccttccgcaaagctgtctcctccaagagcctccgccacttcctggaggtcttcatggagactcagatgtttcggggcttcatccaggagcgggagctgcgccggcaggatgccaaaggtctgtttgaggtccgagcccaagagtatctggaaacactccccagtggagagcacagcggtgtcaataagttcctgaagggactaggcaataaaatgaaatttctccacaagaaataactctcagcctcaagggaaaacttcctcctagtgcagccctatgctttaaaaacagttcctggtggcctttctgaaaggctgggtcccaggttgtcacggtgcggaactggaggccgcggtggcttctggccgaggctgggctcttccctggatgaggacctgggagccgcctgggaggacagccccagaaagggagcccgagaccaggcgtgtcgccgacatgcaaatgggttgttttggtggttgggtttttttttttatcttagatattaaaagtaagaaaaatg

SEQ ID NO: 429459 - DNA, 1373 bp, Homo sapiens
  misc_feature (21)..(21): n is a, c, g, or t
  misc_feature (42)..(42): n is a, c, g, or t
  misc_feature (51)..(51): n is a, c, g, or t
tttaatacctttcgactaccnctactatgctgcgagaagacnacagaaggncggttactgccgaagactgctgcctggaggcaaagggaagcgccttcctgaagtttactgcattgtgagccgcctgggatgcttcagcctcttttcaaggatcttggatgaggtggaaaaaagacgaggcatctctcctgccctggttcagccactcatgagaagtgtcatggaagcccctttcccagccctgggcaaaaccatccttgtcaagaacttcctgccaggttcaggaactgaggtgatcgaactgtgccgcccgctggactcccggctcgagcacgtggactttgagtctctcttctcctccctcagcgtccgccacctggtctgtgtgtttgcctccctgcttctggagaggagggtcatcttcattgcagacaagctcagcacacctacatcccggtgctgccacccgccatggtcgacatcgtgtgctcgccgacgcccttcctcatcgggctgctctccagctcgctgccactgctcagggagctgccgctggaagaggtccttgtggttgacctcgtcaacagccggttcctcagacagatggacgatgaggactccatcctgccccggaagcttcaggtggccctggaacacattctggaacagaggaacgagctggcttgtgagcaggacgaagggcccctagacggcaggcacggtccagagtccagccccttgaacgaggtggtgtctgaagcctttgtccgcttcttcgtggagattgtgggacactactctttgttcctgacgtcgggcgagcgtgaggagagaaccctgcagcgggaggccttccgcaaagctgtctcctccaagagcctccgccacttcctggaggtcttcatggagactcagatgtttcggggcttcatccaggagcgggagctgcgccggcaggatgccaaaggtctgtttgaggtccgagcccaagagtatctggaaacactccccagtggagagcacagcggtgtcaataagttcctgaagggactaggcaataaaatgaaatttctccacaagaaataactctcagcctcaagggaaaacttcctcctagtgcagccctatgctttaaaaacagttcctggtggcctttctgaaaggctgggtcccaggttgtcacggtgcggaactggaggccgcggtggcttctggccgaggctgggctcttccctggatgaggacctgggagccgcctgggaggacagccccagaaagggagcccgagaccaggcgtgtcgccgacatgcaaatgggttgttttggtggttgggtttttttttttatcttagatattaaaagtaagaaaaatg

SEQ ID NO: 429460 - DNA, 2740 bp, Homo sapiens
  misc_feature (2)..(3): n is a, c, g, or t
cnnaaggagtcccctggaaggcctccacaacctcacgctagagtcaagaatggatatgttcagcttggatatgatcatcagtgacccagctgcagaagccagcagggctgggaagaagcagctcagaggtgttcagaacccttgcccatctgccagagccagaccccggcacaagtccctcaacataaaggacaagatatcagaatgggaagggaagaaagaggtgcccactcctgcacccagcaggagagcagacggacaggaggattatctgccgtcctctacggtggagaggaggagtagtgatggggtgagaactcaggtcacagaggctaagaatggaatgaggccaggaacagagagcacagagaaggagaggaataaaggagcagtgaacgtcgggggacaggacccagagccggggcaagacctaagccagccagaacgggaagtggatcctagctggggccgaggccgagagccaagacttggcaagctacgctttcagaacgatcacctctccgtgctgaagcaggtcaagaaactcgagcaggctttgaaggatgggtcggcagggctggatccccagttaccagggacttgttactccccacactgccctcctgacaaggcagaggcagggtccacccttcctgagaacctgggaggcgggagtggctcagaagtcagccagagggtccacccctcggacctggaaggcagggagcccacccctgagcttgtggaggacaggaaaggttcatgcagaaggccctgggaccggagccttgagaacgtgtataggggctcggagggttcccccacaaagcccttcatcaaccctctgccaaaaccccggagaacgttcaaacatgccggagaaggggacaaagatgggaagcctggcatcggcttcaggaaagagaaaagaaatctgcctcctctgccctctctacctcccccgcctctgccctcctctcccccaccttcctctgtgaacagaagactgtggaccgggagacagaaatccagtgcagaccacagaaagtcctatgagtttgaagatttactgcagtcttcctctgagagcagcagggtggactggtacgcgcagactaagctggggctgacacgcactttatcggaggagaacgtctatgaagacattctagatccgccaatgaaggagaacccttatgaggacatcgagttacatggtcgctgcctgggaaagaagtgtgtcttgaattttcctgcttctcccacctcttccatccctgacacactcaccaagcagtcattgtccaaacctgcttttttccgacaaaattcagagaggaggaacttcaagctgctggacactaggaagctgagtcgggatggaactgggtccccttccaaaatcagccctccctccactcccagcagccctgatgacattttctttaaccttggagacccacagaacggcaggaagaagagaaagatacccaagctggtgttgcgaatcaacgccatttatgaggtccggagaggaaagaaacgggtgaagaggctgtcccagtcaatggagagcaactcaggaaaagtgacagatgagaacagtgagtctgacagtgacacagaggagaagctgaaagctcacagccagcgcctggtcaacgtgaagtcccggctgaagcaggcgcctcggtacccatcacttgcccgggaactcatcgagtaccaggagaggcagctcttcgagtactttgtggttgtgtctttgcacaagaagcaggccggggctgcctacgtgccagaactcacccaacagttccctctgaagttggaaaggtctttcaagttcatgagagaagctgaggaccaactgaaggccattccccagttctgttttcccgatgccaaggattgggttcctgtccagcagttcaccagtgaaacattctcatttgtcttaactggagaagatgggagcagaaggttcggttactgccgaagactgctgcctggaggcaaagggaagcgccttcctgaagtttactgcattgtgagccgcctgggatgcttcagcctcttttcaaggatcttggatgaggtggaaaaaagacgaggcatctctcctgccctggttcagccactcatgagaagtgtcatggaagcccctttcccagccctgggcaaaaccatccttgtcaagaacttcctgccaggttcaggaactgaggtgatcgaactgtgccgcccgctggactcccggctcgagcacgtggactttgagtctctcttctcctccctcagcgtccgccacctggtctgtgtgtttgcctccctgcttctggagaggagggtcatcttcattgcagacaagctcaggtacccgccttggctacttctgctaaagcgtttgaatgacagtcgctcttggaccctctagtctgtagagcaggtgaccgcctagcattgaagagtaagcccttctgagataaggatggaataggctgggcgcggtgactcacacctgtaatctcagcactttgagaggctgaggtgggtggatcacttgagaccaggagttcgaggccagcctgtgcaacatggtgaaactccgtctctactaaaaatagaaaaattagccagccatggtggcccacgcttgttatcccagctacttgggaggctgaggcacgggaatcgattgaacctgggaggtggacattgcagtgagctgagatctcac

SEQ ID NO: 429461 - DNA, 396 bp, Homo sapiens
cactccagcctgggtgacagagcaagactccatctcaaaaaaaaaaagaggcaactcaacatcccctctgaattagaacatttgatctgtgctaccacatagaaagagtttcctacatgagaagaactcacatttgcaattttcttccttgttcttttcttctagtgacagatgagaacagtgagtctgacagtgacacagaggagaagctgaaaggtgaggagagccactactgtgcaggactcaggcaggtgacttggaagctgcaaaggtggcccctcctccttagtatgagggacagaagcgtcctgccggagcttgcttggcaaggcgtggacatctcgggagacagtggggccacagggtgctccagagccggtccgtcatgggcatgat

SEQ ID NO: 429462 - DNA, 303 bp, Homo sapiens
gttcccccacaaagcccttcatcaaccctctgccaaaaccccggagaacgttcaaacatgccggagaaggggacaaagatgggaagcctggcatcggcttcaggaaagagaaaagaaatctgcctcctctgccctctctacctcccccgcctctgccctcctctcccccaccttcctctgtgaacagaagactgtggaccgggagacagaaatccagtgcagaccacaggtaggtgccggtgtggccaggcagagtgtcgccacctgactctctcagtggtttgtgtcccatcataaccgtct

SEQ ID NO: 429463 - DNA, 196 bp, Homo sapiens
gttggctgtaattaaatgaatgttggagttaatgctgtttccaacctatgatgggtttttcaggactgacaccatcataagttgaggagcatctgtattttgtcattcaactcctgagccaagacatcaagattagtgtttgcatgagtagcaaatattcccaaggaagagacagcacagcaccacaccatggttc

SEQ ID NO: 429464 - DNA, 1845 bp, Homo sapiens
gggcgacactggcttcccttttgggatttcccagaagatccagattttcttaagtccccttggaacagactaagaaaggatcaccttagaaatcacctggtcctattgtcccccccgtacatgagtaactgaggcccacagagagcaaatcgcctgcctgagtcacacagcagtgagtggcagacctaggctaggaactaggactggggattgctattccagtgctccccatcctcacacagactgcacagtccgcctggacacaccccagctgacagtggtacctcccagtcagccaggagaatggattccttctcctgcagtaggggccccctggctgagtggcctgattgactaaaacatatgtctttgaaggagagtgcatcacaagcacctttctttggggtagatttttctctgggtctagagggacagctcaggcttgggactgggcctcagaacctacgacagaccgtgagagcagacccaccttatccatctggtgccagctccccaggtcagctacagcgacccccggacttcatagagtacaatccacagtaatagcacacagctctgtacctatctagctccatgcctatctatctgcctacctttcacaaaataattcttagcaaccctgctacagccaatgattctaatacgttctgttctattgcatgttataaaatgctggtcacgatccactaaattgatgtctctacctgctaatggtttaatacctgcagattgaaatatactggagaaataaagagagtgggagtagggacactttctcccagtgcccacaccgcccctcgttacccgcataggtcaactgaaagatacagagagggaagctttgatggggggttcagagttcaaaggaagaaatgatggcacctgcactccctgcccccagaggcaggacacagccagccctcctgtgacagcactcctggcagctccttgttggcctgcagccctcagggggcttagttgccattgactcacccactcctaaggccaccacatcaaaatctgaggcttactgccctgtcccacctgcctctgtctttcttaaaacagctaaatgcaacaatagcagaaattagcttgtttttgaggttggcaatgaccagttcaaggtgactcttattttcttaagcagtgcttgcaggacataaatgtgatgacacttgccctcctttctttatcgcctgggacagactttacaaacagacctgggagaagtcccctaaggggctgcatttatccccatctccctaggggtgatcagcattgtgacagctgggcagagcagtggtgaactgcacccatgtccctgctcacatctcctaagatctcagaattgcctgaggttctagcgtgggctccttctctccagatgatgccatccccacccccctcatttccacacagcatctgaggcatcctgcactaaaagatatatgtacagcaaaacaaaaatagaaaaccagcacagcagagtggaggtggggtataaatatacccagatccccgctgatttggttactcggggtgagcatcagatggaaatagaagtttccgggggccaagagagaaagagggatgtaacgacaattcttttcaaaacgtgtcccatggtatgcctcgtggaaaaaatggttcattggtcaaatgaatttgggaaaatgctgtcaatatcaccgactcatggagcttcgcaaggcatcttagcttaataaaggttatgaaaagtcttgcagcaaagatgctgtttacccctgcttaatccagcactgcccaaactcattccaaataccagagcctctgtttgca

SEQ ID NO: 429465 - DNA, 419 bp, Homo sapiens
acagatcgaaacacaaaaaatacaaagagatcttggggagggcaagtcatttccagaaaaggacatccccacccccctcatttccacacagcatctgaggcatcctgcactaaaagatatatgtacagcaaaacaaaaatagaaaaccagcacagcagagtggaggtggggtataaatatacccagatccccgctgatttggttactcggggtgagcatcagatggaaatagaagtttccgggggccaagagagaaagagggatgtaacgacaattcttttcaaaacgtgtcccatggtatgcctcgtggaaaaaatggttcattggtcaaatgaatttgggaaaatgctgtcaatatcaccgactcatggagcttcgcaaggcatcttagcttaataaaggttatgaaaagtcttgca

SEQ ID NO: 429466 - DNA, 1771 bp, Homo sapiens
gggcgacactggcttcccttttgggatttcccagaagatccagattttcttaagtccccttggaacagactaagaaaggatcaccttagaaatcacctggtcctattgtcccccccgtacatgagtaactgaggcccacagagagcaaatcgcctgcctgagtcacacagcagtgagtggcagacctaggctaggaactaggactggggattgctattccagtgctccccatcctcacacagactgcacagtccgcctggacacaccccagctgacagtggtacctcccagtcagccaggagaatggattccttctcctgcagtaggggccccctggctgagtggcctgattgactaaaacatatgtctttgaaggagagtgcatcacaagcacctttctttggggtagatttttctctgggtctagagggacagctcaggcttgggactgggcctcagaacctacgacagaccgtgagagcagacccaccttatccatctggtgccagctccccaggtcagctacagcgacccccggacttcatagagtacaatccacagtaatagcacacagctctgtacctatctagctccatgcctatctatctgcctacctttcacaaaataattcttagcaaccctgctacagccaatgattctaatacgttctgttctattgcatgttataaaatgctggtcacgatccactaaattgatgtctctacctgctaatggtttaatacctgcagattgaaatatactggagaaataaagagagtgggagtagggacactttctcccagtgcccacaccgcccctcgttacccgcataggtcaactgaaagatacagagagggaagctttgatggggggttcagagttcaaaggaagaaatgatggcacctgcactccctgcccccagaggcaggacacagccagccctcctgtgacagcactcctggcagctccttgttggcctgcagccctcagggggcttagttgccattgactcacccactcctaaggccaccacatcaaaatctgaggcttactgccctgtcccacctgcctctgtctttcttaaaacagctaaatgcaacaatagcagaaattagcttgtttttgaggttggcaatgaccagttcaaggtgactcttattttcttaagcagtgcttgcaggacataaatgtgatgacacttgccctcctttctttatcgcctgggacagactttacaaacagacctgggagaagtcccctaaggggctgcatttatccccatctccctaggggtgatcagcattgtgacagctgggcagagcagtggtgaactgcacccatgtccctgctcacatctcctaagatctcagaattgcctgaggttctagcgtgggctccttctctccagatgatgccatccccacccccctcatttccacacagcatctgaggcatcctgcactaaaagatatatgtacagcaaaacaaaaatagaaaaccagcacagcagagtggaggtggggtataaatatacccagatccccgctgatttggttactcggggtgagcatcagatggaaatagaagtttccgggggccaagagagaaagagggatgtaacgacaattcttttcaaaacgtgtcccatggtatgcctcgtggaaaaaatggttcattggtcaaatgaatttgggaaaatgctgtcaatatcaccgactcatggagcttcgcaaggcatcttagcttaataaaggttatgaaaagtcttgca

SEQ ID NO: 429467 - DNA, 4009 bp, Homo sapiens
  misc_feature (1610)..(1610): n is a, c, g, or t
ctgggtctccagcacaccctggagaaaagcaggtcagggggtggtgcttctgtttccagatgagcaaactagggctgagggagagggcgttctctggtcagggtggtagagccagtctcgtggaagccggctgagccactgaaacagaatcagttttctcatggaccaaacggggatagtgtctggcctgcgccaccccaagtgtattgtgaagatgaaatgagaaggggttttttgttgtggttgctggaaggagatcctagaagggaggaatgggggagaagatggcaaagggatcctaggacgaggcgtatgggcaagggaagcttgtctttctgggaggaaaatctcgaaccaagaatttcaggaagaaggcactgggaaaagagggaggaggtgccctcagatccatggaggtgagtgtcagcccccagatctcttgtgtggccaccactttcacggcaaccactcctcactgggaatccttggagtctggtgctttcaccaccctgccccggctgcttcatgtgtgccacctcgccctgtttccagactgatgcagagaaagttctcagagcccaacacttacatcgatggcctgcctagccaggaccgccaggaggagctgtatgacgacgtggacctgtcagagctcacagctgcggtggagcctaccgaggaagccacccctgttgcagatgacccaaatgagagagaatctgaccgggtgtacctggacctcacacctgtcaagtcctttctgcatggccccagcagtgcacaggcccaggcctcctccccgacgttgtcctgcctggacaatgcaactgaggccctcccggcagactcaggcccaggtcccaccccagatgagccctgcataaagtgtccagagaacctgggagaacagcagctggagagtttggagccagaggatccttccctgagaatcaccaccgtcaaaatccagacggaacagcagagaatctccttcccaccgagctgcccggatgccgtggtggccaccccacctggtgccagcccacctgtgaaggacaggttgcgcgtgaccagtgcagagatcaagcttggcaagaatcggacagaagctgaggtgaagcggtacacagaggagaaggagaggcttgaaaagaagaaggaagaaatccgggggcacctggctcagctccggaaagagaaacgggagctaaaggaaaccctactgaaatgcacagacaaggaagtcctggcgagcctggagcagaagctgaaggaaattgacgaggagtgccggggcgaggagagcaggcgcgtggacctggagctcagcatcatggaggtgaaggacaacctgaagaaggctgaggcagggcctgtgacgttaggcaccaccgtggacaccacccacctggagaatgtgagcccccgccccaaagctgtcacacctgcctctgccccagactgtaccccagtcaactctgcaaccacactcaagaacaggcctctctcggtcgtggtcacaggcaaaggcactgtactccagaaagccaaggtaagcagtcactcccagcctcccttggggccagcagaaatgtcactaaggtaggggnccatcttctgacccaggtggtgctttgtggcttttggcaccagctctgagcaagggctcggcactcaccaaggagtggccatggctttgccatgccttcagctcagtctctggcactgaccaaccagaaaggtgtctgcacttggttcgagcatccttccctgtgagcttggggatgcttcagttcttgccctccacacagctatgggtagattccaggaggccagctgcagctcagggacagattatgactgagttttcaaaccaaaaagtcagtcagtgactccacaggacttctaccattaaaactaaagaaacagactcacataggtggtttgaattgcccaaagttgcccacccaactactggcaaaattctcagcaagttgtgaatgaggaatccatgctatgatgcggtttctccctgatggctagtcaaaaaagtatcattaatcatttactcatttactcatttgtacactaaagaacatgcctagggctgcctttgcttttggcaaattctgctccttattcctatcctccttacctgctggagatatttggaggtcccacaacaatggctaaccaataaatccatgcaagcatctgaacctccactcccttgttgctgtgagagacatcacttataggcactcgctgttgtgccacagtctcaaaatctctgaataggcactctaagcagtgatgaacacacagggtttgaaacatttatcacctctgtgcctaaaatagtttttctcacattttttctatgtatatcaaggttgctacagtggataactaactatctttttggtggggggtgggtgctggtatttgaatggtaccctaggaatgggagaagaaaggagcaagttagaaaacaagcttcatctaaagactctcatgtcaatgtggaccttggtgacaatcctgctttgttaaagcaaaaactatgcgaaagggtgagtctgtttagaagaaaaagcaaagactgaggtactgtgaatggagagcttcagctaagaggaggctctgtcccttttcagagccaaaggaaataatacaacaaaaaggaggcttctttggagacctaagtctattggatgtaaacaagacgttgtatttagggatgttctgtgtttctttcttttttgaagttgtcatcaattgctttactaagatttttaaatagtgaaaacctcctgtttagactttggtggaagatgaatcaaggaagcagggccctgtcttatgggtcacgtgtctttggtgagtgagaagacctaaactcctggccatcatctcttatccaatacttagcagttggggattaaaccatccttgccttcagttctctccaatattaccaggcccaactcagtcttcagtgattttaaacagcattgacatcatctgtaaaaccatcatctgtaaaaccatctatgacatgagttttgagaaacaataatggggaaaatatttgggaccaagctgaagcactaatcccactaagttaaagacttctttccagtccaaggcaggcctgaatcaactgtctttaaataaaattttaagtgatgctgtattatatataggaaaaaatgcttaaaatcctgtcatttagaacagtgaaaagtatcttttgagattaaagtgactctttactgtaggaaaaatattactctgtgtttacagattcattgctgtggtcaggccatttttaagggaagagttatttaatataaatagtctctgattttaagttctgtttaatgttcattctccttccaagaacaaagtggtgatttttggttagggtgatcgccctcttaaaattggcagtgctgttccttgtgctgcccctgtcttttcctctgatggcattttttttttttttttttttaacacaggttgaaacatttcatctattatctctgcctcatttctggagggttgtgtatcagttctctaacacttgttcctgagaactaaatgtcttttttattcttatttcctctctcataaacatttggtgaccttttaccaagtggtgagttaggttttttaaaataaaatgttcattgtatttgaagttttcctcagttcatgaaatgacttggggcagggcctggggggttctcaagggaggaaatgttttggttatttacacactgaactacaagatgggatcctagcaggaaactcagcctccttgaatcaaagagcatagataaggctgaaagcaaattttagttgtacagttaacaacataccaaagacacaggaaacatctgcagaaattgatcatatataagtgaatgaaaaatcagtactcctcccagaagttaaatatactcctaaagaattcttgggaaaaaagaaacataccaatactggg

SEQ ID NO: 429468 - DNA, 3534 bp, Homo sapiens
cggcgagcggggccgcgggcgcgcaccgactcaagagccgactgtcagcctcggcgggccggagttctccggcgctgggacaggggcgctgggacaggggcgctgggggcgagccctggcgggggccaggtccgaggaccctgggcgcggcggccccgccaggaggtccggccgcgagcgtgacctcacggggaggggccagcgcggcggcctgggcgctgagccgagcgccgggagagcagcgcagaagccgagccgcgaggagcgcactccgtggccccgatggagcggtacaaagccctggaacagctgctgacagagttggatgacttcctcaagattcttgaccaggagaacctgagcagcacagcactggtgaagaagagctgcctggcggagctcctccggctttacaccaaaagcagcagctctgatgaggagtacatttatatgaacaaagtgaccatcaacaagcaacagaatgcagagtctcaaggcaaagcgcctgaggagcagggcctgctacccaatggggagcccagccagcactcctcggcccctcagaagagccttccagacctcccgccacccaagatgattccagaacggaaacagcttgccatcccaaagacggagtctccagagggctactatgaagaggctgagccatatgacacatccctcaatgaggacggagaggctgtgagcagctcctacgagtcctacgatgaagaggacggcagcaagggcaagtcggccccttaccagtggccctcgccggaggccggcatcgagctgatgcgtgacgcccgcatctgcgccttcctgtggcgcaagaagtggctgggacagtgggccaagcagctctgtgtcatcaaggacaacaggcttctgtgctacaaatcctccaaggaccacagccctcagctggacgtgaacctactgggcagcagcgtcattcacaaggagaagcaagtgcggaagaaggagcacaagctgaagatcacaccgatgaatgccgatgtgattgtgctgggcctgcagagcaaggaccaggctgagcagtggctcagggtcatccaggaagtgagcggcctgccttccgaaggagcatctgaaggaaaccagtacaccccggatgcccagcgctttaactgccagaaaccagatatagctgagaagtacctgtcggcttcagagtatgggagctccgtggatggccaccctgaggtcccagaaaccaaagacgtcaagaagaaatgttctgctggcctcaaactgagcaacctaatgaatctgggcaggaagaaatccacctcactggagcctgtggagaggtccctcgagacatccagttacctgaacgtgctggtgaacagccagtggaagtctcgctggtgctctgtcagggacaatcacctgcacttctaccaggaccggaaccggagcaaggtggcccagcaacccctcagcctggtgggctgcgaggtggtcccagaccccagccccgaccacctctactccttccgcatcctccacaagggcgaggagctggccaagcttgaggccaagtcttccgaggaaatgggccactggctgggtctcctgctctctgagtcaggctccaagacagacccagaagagttcacctacgactatgtggatgccgatagggtctcctgtattgtgagtgcggccaaaaactctctcttactgatgcagagaaagttctcagagcccaacacttacatcgatggcctgcctagccaggaccgccaggaggagctgtatgacgacgtggacctgtcagagctcacagctgcggtggagcctaccgaggaagccacccctgttgcagatgacccaaatgagagagaatctgaccgggtgtacctggacctcacacctgtcaagtcctttctgcatggccccagcagtgcacaggcccaggcctcctccccgacgttgtcctgcctggacaatgcaactgaggccctcccggcagactcaggcccaggtcccaccccagatgagccctgcataaagtgtccagagaacctgggagaacagcagctggagagtttggagccagaggatccttccctgagaatcaccaccgtcaaaatccagacggaacagcagagaatctccttcccaccgagctgcccggatgccgtggtggccaccccacctggtgccagcccacctgtgaaggacaggttgcgcgtgaccagtgcagagatcaagcttggcaagaatcggacagaagctgaggtgaagcggtacacagaggagaaggagaggcttgaaaagaagaaggaagaaatccgggggcacctggctcagctccggaaagagaaacgggagctaaaggaaaccctactgaaatgcacagacaaggaagtcctggcgagcctggagcagaagctgaaggaaattgacgaggagtgccggggcgaggagagcaggcgcgtggacctggagctcagcatcatggaggtgaaggacaacctgaagaaggctgaggcagggcctgtgacgttaggcaccaccgtggacaccacccacctggagaatgtgagcccccgccccaaagctgtcacacctgcctctgccccagactgtaccccagtcaactctgcaaccacactcaagaacaggcctctctcggtcgtggtcacaggcaaaggcactgtactccagaaagccaaggaatgggagaagaaaggagcaagttagaaaacaagcttcatctaaagactctcatgtcaatgtggaccttggtgacaatcctgctttgttaaagcaaaaactatgcgaaagggtgagtctgtttagaagaaaaagcaaagactgaggtactgtgaatggagagcttcagctaagaggaggctctgtcccttttcagagccaaaggaaataatacaacaaaaaggaggcttctttggagacctaagtctattggatgtaaacaagacgttgtatttagggatgttctgtgtttctttcttttttgaagttgtcatcaattgctttactaagatttttaaatagtgaaaacctcctgtttagactttggtggaagatgaatcaaggaagcagggccctgtcttatgggtcacgtgtctttggtgagtgagaagacctaaactcctggccatcatctcttatccaatacttagcagttggggattaaaccatccttgccttcagttctctccaatattaccaggcccaactcagtcttcagtgattttaaacagcattgacatcatctgtaaaaccatcatctgtaaaaccatctatgacatgagttttgagaaacaataatggggaaaatatttgggaccaagctgaagcactaatcccactaagttaaagacttctttccagtccaaggcaggcctgaatcaactgtctttaaataaaattttaagtgatgctgtattatatataggaaaaaatgcttaaaatcctgtcatttagaacagtgaaaagtatcttttgagattaaagtgactctttactgtagga

SEQ ID NO: 429469 - DNA, 3109 bp, Homo sapiens
tgcgtcccctcctgcagcccggtcccctcctgcatctgcgtcccctcctggagcccagtcccctcttgcatccgcatccgcttcccctcccgcagccccgccccctcctgcatctgtgtgccctcccgaagccccgccccctcctgcatctgcgtcccctcctgcagccctgtcccctcctgcatctgcacttcctcctgcaggttacctgaacgtgctggtgaacagccagtggaagtctcgctggtgctctgtcagggacaatcacctgcacttctaccaggaccggaaccggagcaaggtggcccagcaacccctcagcctggtgggctgcgaggtggtcccagaccccagccccgaccacctctactccttccgcatcctccacaagggcgaggagctggccaagcttgaggccaagtcttccgaggaaatgggccactggctgggtctcctgctctctgagtcaggctccaagacagacccagaagagttcacctacgactatgtggatgccgatagggtctcctgtattgtgagtgcggccaaaaactctctcttactgatgcagagaaagttctcagagcccaacacttacatcgatggcctgcctagccaggaccgccaggaggagctgtatgacgacgtggacctgtcagagctcacagctgcggtggagcctaccgaggaagccacccctgttgcagatgacccaaatgagagagaatctgaccgggtgtacctggacctcacacctgtcaagtcctttctgcatggccccagcagtgcacaggcccaggcctcctccccgacgttgtcctgcctggacaatgcaactgaggccctcccggcagactcaggcccaggtcccaccccagatgagccctgcataaagtgtccagagaacctgggagaacagcagctggagagtttggagccagaggatccttccctgagaatcaccaccgtcaaaatccagacggaacagcagagaatctccttcccaccgagctgcccggatgccgtggtggccaccccacctggtgccagcccacctgtgaaggacaggttgcgcgtgaccagtgcagagatcaagcttggcaagaatcggacagaagctgaggtgaagcggtacacagaggagaaggagaggcttgaaaagaagaaggaagaaatccgggggcacctggctcagctccggaaagagaaacgggagctaaaggaaaccctactgaaatgcacagacaaggaagtcctggcgagcctggagcagaagctgaaggaaattgacgaggagtgccggggcgaggagagcaggcgcgtggacctggagctcagcatcatggaggtgaaggacaacctgaagaaggctgaggcagggcctgtgacgttaggcaccaccgtggacaccacccacctggagaatgtgagcccccgccccaaagctgtcacacctgcctctgccccagactgtaccccagtcaactctgcaaccacactcaagaacaggcctctctcggtcgtggtcacaggcaaaggcactgtactccagaaagccaaggaatgggagaagaaaggagcaagttagaaaacaagcttcatctaaagactctcatgtcaatgtggaccttggtgacaatcctgctttgttaaagcaaaaactatgcgaaagggtgagtctgtttagaagaaaaagcaaagactgaggtactgtgaatggagagcttcagctaagaggaggctctgtcccttttcagagccaaaggaaataatacaacaaaaaggaggcttctttggagacctaagtctattggatgtaaacaagacgttgtatttagggatgttctgtgtttctttcttttttgaagttgtcatcaattgctttactaagatttttaaatagtgaaaacctcctgtttagactttggtggaagatgaatcaaggaagcagggccctgtcttatgggtcacgtgtctttggtgagtgagaagacctaaactcctggccatcatctcttatccaatacttagcagttggggattaaaccatccttgccttcagttctctccaatattaccaggcccaactcagtcttcagtgattttaaacagcattgacatcatctgtaaaaccatcatctgtaaaaccatctatgacatgagttttgagaaacaataatggggaaaatatttgggaccaagctgaagcactaatcccactaagttaaagacttctttccagtccaaggcaggcctgaatcaactgtctttaaataaaattttaagtgatgctgtattatatataggaaaaaatgcttaaaatcctgtcatttagaacagtgaaaagtatcttttgagattaaagtgactctttactgtaggaaaaatattactctgtgtttacagattcattgctgtggtcaggccatttttaagggaagagttatttaatataaatagtctctgattttaagttctgtttaatgttcattctccttccaagaacaaagtggtgatttttggttagggtgatcgccctcttaaaattggcagtgctgttccttgtgctgcccctgtcttttcctctgatggcattttttttttttttttttttaacacaggttgaaacatttcatctattatctctgcctcatttctggagggttgtgtatcagttctctaacacttgttcctgagaactaaatgtcttttttattcttatttcctctctcataaacatttggtgaccttttaccaagtggtgagttaggttttttaaaataaaatgttcattgtatttgaagttttcctcagttcatgaaatgacttggggcagggcctggggggttctcaagggaggaaatgttttggttatttacacactgaactacaagatgggatcctagcaggaaactcagcctccttgaatcaaagagcatagataaggctgaaagcaaattttagttgtacagttaacaacataccaaagacacaggaaacatctgcagaaattgatcatatataagtgaatgaaaaatcagtactcctcccagaagttaaatatactcctaaagaattcttgggaaaaaagaaacataccaatactggg

SEQ ID NO: 429470 - DNA, 1905 bp, Homo sapiens
  misc_feature (1840)..(1840): n is a, c, g, or t
  misc_feature (1885)..(1885): n is a, c, g, or t
ggagccgctagtacgcgttccgcgtgccctattacggatcgattgcctggagcagttgctgactgagttggatgacttcctctgtattcttggacattgagaacctgagcagcacagcgatttggatgaagaagactgactggcgccagctctgtcctgcttgaacagcaatcagcatacacgctctgcatcgatgaggtacgtctgtattgagcactgtgaccagtctaccaagcgatggtattgctgagtcatcaaggaccaagcgcattaggtagcagggtcgtgctacccaaggtgggggagcccatgacacgtgactcttcggcccctcagactaggcttcctgactctcctcgccaaccgaggatgattccagaacggaaacagcttgccatcccaaagacggagtctccagagggctactatgaagaggctgagccatatgacacatccctcaatgaggacggagaggctgtgagcagctcctacgagtcctacgatgaagaggacggcagcaagggcaagtcggccccttaccagtggccctcgccggaggccggcatcgagctgatgcgtgacgcccgcatctgcgccttcctgtggcgcaagaagtggctgggacagtgggccaagcagctctgtgtcatcaaggacaacaggcttctgtgctacaaatcctccaaggaccacagccctcagctggacgtgaacctactgggcagcagcgtcattcacaaggagaagcaagtgcggaagaaggagcacaagctgaagatcacaccgatgaatgccgatgtgattgtgctgggcctgcagagcaaggaccaggctgagcagtggctcagggtcatccaggaagtgagcggcctgccttccgaaggagcatctgaaggaaaccagtacaccccggatgcccagcgctttaactgccagaaaccagatatagctgagaagtacctgtcggcttcagagtatgggagctccgtggatggccaccctgaggtcccagaaaccaaagacgtcaagaagaaatgttctgctggcctcaaactgagcaacctaatgaatctgggcaggaagaaatccacctcactggagcctgtggagaggtccctcgagacatccagttacctgaacgtgctggtgaacagccagtggaagtctcgctggtgctctgtcagggacaatcacctgcacttctaccaggaccggaaccggagcaaggtggcccagcaacccctcagcctggtgggctgcgaggtggtcccagaccccagccccgaccacctctactccttccgcatcctccacaagggcgaggagctggccaagcttgaggccaagtcttccgaggaaatgggccactggctgggtctcctgctctctgagtcaggctccaagacagacccagaagagttcacctacgactatgtggatgccgatagggtctcctgtattgtgagtgcggccaaaaactctctcttactgatgcagagaaagttctcagagcccaacacttacatcgatggccccagcagtgcacaggcccaggcctcctccccgacgttgtcctgcctggacaatgcaactgaggccctcccggcagactcaggcccaggtcccaccccagatgagccctgtatgacgacgtggacctgtcagagctcacagctgcggtgggagcctaccgagggaagccacccctgttgcagatgacccaaatgagagagaatttgaccgagtgttacctggggaccttcacacctgttcaagttccttttcttgcatgggccccagcagttgccggggcggagggagaggcagggcgcttgggacntggggagtttcagcattcatggggaggtttgaagggacaactttnaaggaaggttttagggcagg

SEQ ID NO: 429471 - DNA, 592 bp, Homo sapiens
ggtacggtcatggcctggtggggaggggctggcaccaggcagcactgcctggccctgcttatgtctctcttggcctcgttccaggccaagtcttccgaggaaatgggccactggctgggtctcctgctctctgagtcaggctccaagacagacccagaagagttcacctacgactatgtggatgccgatagggtctcctgtattgtgagtgcggccaaaaactctctcttgtgagtaatttggacccttcctccgtacactctcttattcctggccatgctgtaggccctgggtcagccagagtcaggggcagcagggagcacagggtcccaccccactctgcccagcagcaggaaaatgtgaagccaaggagtagccctcagggaggcccggccaagagccaggagctgagctaagagcaaggagccgagccaggcttcgggccccgggggcagctttggcatcctcagaggcagttagactctccagctcctccaggcagagctgtcacctttcctgacctcctacttgtccttctggtgaatccctcactgggtctccagcacaccctggagaaaagcaggtcaggggg

SEQ ID NO: 429472 - DNA, 4260 bp, Homo sapiens
cggcgagcggggccgcgggcgcgcaccgactcaagagccgactgtcagcctcggcgggccggagttctccggcgctgggacaggggcgctgggacaggggcgctgggggcgagccctggcgggggccaggtccgaggaccctgggcgcggcggccccgccaggaggtccggccgcgagcgtgacctcacggggaggggccagcgcggcggcctgggcgctgagccgagcgccgggagagcagcgcagaagccgagccgcgaggagcgcactccgtggccccgatggagcggtacaaagccctggaacagctgctgacagagttggatgacttcctcaagattcttgaccaggagaacctgagcagcacagcactggtgaagaagagctgcctggcggagctcctccggctttacaccaaaagcagcagctctgatgaggagtacatttatatgaacaaagtgaccatcaacaagcaacagaatgcagagtctcaaggcaaagcgcctgaggagcagggcctgctacccaatggggagcccagccagcactcctcggcccctcagaagagccttccagacctcccgccacccaagatgattccagaacggaaacagcttgccatcccaaagacggagtctccagagggctactatgaagaggctgagccatatgacacatccctcaatgaggacggagaggctgtgagcagctcctacgagtcctacgatgaagaggacggcagcaagggcaagtcggccccttaccagtggccctcgccggaggccggcatcgagctgatgcgtgacgcccgcatctgcgccttcctgtggcgcaagaagtggctgggacagtgggccaagcagctctgtgtcatcaaggacaacaggcttctgtgctacaaatcctccaaggaccacagccctcagctggacgtgaacctactgggcagcagcgtcattcacaaggagaagcaagtgcggaagaaggagcacaagctgaagatcacaccgatgaatgccgatgtgattgtgctgggcctgcagagcaaggaccaggctgagcagtggctcagggtcatccaggaagtgagcggcctgccttccgaaggagcatctgaaggaaaccagtacaccccggatgcccagcgctttaactgccagaaaccagatatagctgagaagtacctgtcggcttcagagtatgggagctccgtggatggccaccctgaggtcccagaaaccaaagacgtcaagaagaaatgttctgctggcctcaaactgagcaacctaatgaatctgggcaggaagaaatccacctcactggagcctgtggagaggtccctcgagacatccagttacctgaacgtgctggtgaacagccagtggaagtctcgctggtgctctgtcagggacaatcacctgcacttctaccaggaccggaaccggagcaaggtggcccagcaacccctcagcctggtgggctgcgaggtggtcccagaccccagccccgaccacctctactccttccgcatcctccacaagggcgaggagctggccaagcttgaggccaagtcttccgaggaaatgggccactggctgggtctcctgctctctgagtcaggctccaagacagacccagaagagttcacctacgactatgtggatgccgatagggtctcctgtattgtgagtgcggccaaaaactctctcttactgatgcagagaaagttctcagagcccaacacttacatcgatggcctgcctagccaggaccgccaggaggagctgtatgacgacgtggacctgtcagagctcacagctgcggtggagcctaccgaggaagccacccctgttgcagatgacccaaatgagagagaatctgaccgggtgtacctggacctcacacctgtcaagtcctttctgcatggccccagcagtgcacaggcccaggcctcctccccgacgttgtcctgcctggacaatgcaactgaggccctcccggcagactcaggcccaggtcccaccccagatgagccctgcataaagtgtccagagaacctgggagaacagcagctggagagtttggagccagaggatccttccctgagaatcaccaccgtcaaaatccagacggaacagcagagaatctccttcccaccgagctgcccggatgccgtggtggccaccccacctggtgccagcccacctgtgaaggacaggttgcgcgtgaccagtgcagagatcaagcttggcaagaatcggacagaagctgaggtgaagcggtacacagaggagaaggagaggcttgaaaagaagaaggaagaaatccgggggcacctggctcagctccggaaagagaaacgggagctaaaggaaaccctactgaaatgcacagacaaggaagtcctggcgagcctggagcagaagctgaaggaaattgacgaggagtgccggggcgaggagagcaggcgcgtggacctggagctcagcatcatggaggtgaaggacaacctgaagaaggctgaggcagggcctgtgacgttaggcaccaccgtggacaccacccacctggagaatgtgagcccccgccccaaagctgtcacacctgcctctgccccagactgtaccccagtcaactctgcaaccacactcaagaacaggcctctctcggtcgtggtcacaggcaaaggcactgtactccagaaagccaaggaatgggagaagaaaggagcaagttagaaaacaagcttcatctaaagactctcatgtcaatgtggaccttggtgacaatcctgctttgttaaagcaaaaactatgcgaaagggtgagtctgtttagaagaaaaagcaaagactgaggtactgtgaatggagagcttcagctaagaggaggctctgtcccttttcagagccaaaggaaataatacaacaaaaaggaggcttctttggagacctaagtctattggatgtaaacaagacgttgtatttagggatgttctgtgtttctttcttttttgaagttgtcatcaattgctttactaagatttttaaatagtgaaaacctcctgtttagactttggtggaagatgaatcaaggaagcagggccctgtcttatgggtcacgtgtctttggtgagtgagaagacctaaactcctggccatcatctcttatccaatacttagcagttggggattaaaccatccttgccttcagttctctccaatattaccaggcccaactcagtcttcagtgattttaaacagcattgacatcatctgtaaaaccatcatctgtaaaaccatctatgacatgagttttgagaaacaataatggggaaaatatttgggaccaagctgaagcactaatcccactaagttaaagacttctttccagtccaaggcaggcctgaatcaactgtctttaaataaaattttaagtgatgctgtattatatataggaaaaaatgcttaaaatcctgtcatttagaacagtgaaaagtatcttttgagattaaagtgactctttactgtaggaaaaatattactctgtgtttacagattcattgctgtggtcaggccatttttaagggaagagttatttaatataaatagtctctgattttaagttctgtttaatgttcattctccttccaagaacaaagtggtgatttttggttagggtgatcgccctcttaaaattggcagtgctgttccttgtgctgcccctgtcttttcctctgatggcattttttttttttttttttttaacacaggttgaaacatttcatctattatctctgcctcatttctggagggttgtgtatcagttctctaacacttgttcctgagaactaaatgtcttttttattcttatttcctctctcataaacatttggtgaccttttaccaagtggtgagttaggttttttaaaataaaatgttcattgtatttgaagttttcctcagttcatgaaatgacttggggcagggcctggggggttctcaagggaggaaatgttttggttatttacacactgaactacaagatgggatcctagcaggaaactcagcctccttgaatcaaagagcatagataaggctgaaagcaaattttagttgtacagttaacaacataccaaagacacaggaaacatctgcagaaattgatcatatataagtgaatgaaaaatcagtactcctcccagaagttaaatatactcctaaagaattcttgggaaaaaagaaacataccaatactggg

SEQ ID NO: 429473 - DNA, 4035 bp, Homo sapiens
ggagccgctagtacgcgttccgcgtgccctattacggatcgattgcctggagcagttgctgactgagttggatgacttcctctgtattcttggacattgagaacctgagcagcacagcgatttggatgaagaagactgactggcgccagctctgtcctgcttgaacagcaatcagcatacacgctctgcatcgatgaggtacgtctgtattgagcactgtgaccagtctaccaagcgatggtattgctgagtcatcaaggaccaagcgcattaggtagcagggtcgtgctacccaaggtgggggagcccatgacacgtgactcttcggcccctcagactaggcttcctgactctcctcgccaaccgaggatgattccagaacggaaacagcttgccatcccaaagacggagtctccagagggctactatgaagaggctgagccatatgacacatccctcaatgaggacggagaggctgtgagcagctcctacgagtcctacgatgaagaggacggcagcaagggcaagtcggccccttaccagtggccctcgccggaggccggcatcgagctgatgcgtgacgcccgcatctgcgccttcctgtggcgcaagaagtggctgggacagtgggccaagcagctctgtgtcatcaaggacaacaggcttctgtgctacaaatcctccaaggaccacagccctcagctggacgtgaacctactgggcagcagcgtcattcacaaggagaagcaagtgcggaagaaggagcacaagctgaagatcacaccgatgaatgccgatgtgattgtgctgggcctgcagagcaaggaccaggctgagcagtggctcagggtcatccaggaagtgagcggcctgccttccgaaggagcatctgaaggaaaccagtacaccccggatgcccagcgctttaactgccagaaaccagatatagctgagaagtacctgtcggcttcagagtatgggagctccgtggatggccaccctgaggtcccagaaaccaaagacgtcaagaagaaatgttctgctggcctcaaactgagcaacctaatgaatctgggcaggaagaaatccacctcactggagcctgtggagaggtccctcgagacatccagttacctgaacgtgctggtgaacagccagtggaagtctcgctggtgctctgtcagggacaatcacctgcacttctaccaggaccggaaccggagcaaggtggcccagcaacccctcagcctggtgggctgcgaggtggtcccagaccccagccccgaccacctctactccttccgcatcctccacaagggcgaggagctggccaagcttgaggccaagtcttccgaggaaatgggccactggctgggtctcctgctctctgagtcaggctccaagacagacccagaagagttcacctacgactatgtggatgccgatagggtctcctgtattgtgagtgcggccaaaaactctctcttactgatgcagagaaagttctcagagcccaacacttacatcgatggcctgcctagccaggaccgccaggaggagctgtatgacgacgtggacctgtcagagctcacagctgcggtggagcctaccgaggaagccacccctgttgcagatgacccaaatgagagagaatctgaccgggtgtacctggacctcacacctgtcaagtcctttctgcatggccccagcagtgcacaggcccaggcctcctccccgacgttgtcctgcctggacaatgcaactgaggccctcccggcagactcaggcccaggtcccaccccagatgagccctgcataaagtgtccagagaacctgggagaacagcagctggagagtttggagccagaggatccttccctgagaatcaccaccgtcaaaatccagacggaacagcagagaatctccttcccaccgagctgcccggatgccgtggtggccaccccacctggtgccagcccacctgtgaaggacaggttgcgcgtgaccagtgcagagatcaagcttggcaagaatcggacagaagctgaggtgaagcggtacacagaggagaaggagaggcttgaaaagaagaaggaagaaatccgggggcacctggctcagctccggaaagagaaacgggagctaaaggaaaccctactgaaatgcacagacaaggaagtcctggcgagcctggagcagaagctgaaggaaattgacgaggagtgccggggcgaggagagcaggcgcgtggacctggagctcagcatcatggaggtgaaggacaacctgaagaaggctgaggcagggcctgtgacgttaggcaccaccgtggacaccacccacctggagaatgtgagcccccgccccaaagctgtcacacctgcctctgccccagactgtaccccagtcaactctgcaaccacactcaagaacaggcctctctcggtcgtggtcacaggcaaaggcactgtactccagaaagccaaggaatgggagaagaaaggagcaagttagaaaacaagcttcatctaaagactctcatgtcaatgtggaccttggtgacaatcctgctttgttaaagcaaaaactatgcgaaagggtgagtctgtttagaagaaaaagcaaagactgaggtactgtgaatggagagcttcagctaagaggaggctctgtcccttttcagagccaaaggaaataatacaacaaaaaggaggcttctttggagacctaagtctattggatgtaaacaagacgttgtatttagggatgttctgtgtttctttcttttttgaagttgtcatcaattgctttactaagatttttaaatagtgaaaacctcctgtttagactttggtggaagatgaatcaaggaagcagggccctgtcttatgggtcacgtgtctttggtgagtgagaagacctaaactcctggccatcatctcttatccaatacttagcagttggggattaaaccatccttgccttcagttctctccaatattaccaggcccaactcagtcttcagtgattttaaacagcattgacatcatctgtaaaaccatcatctgtaaaaccatctatgacatgagttttgagaaacaataatggggaaaatatttgggaccaagctgaagcactaatcccactaagttaaagacttctttccagtccaaggcaggcctgaatcaactgtctttaaataaaattttaagtgatgctgtattatatataggaaaaaatgcttaaaatcctgtcatttagaacagtgaaaagtatcttttgagattaaagtgactctttactgtaggaaaaatattactctgtgtttacagattcattgctgtggtcaggccatttttaagggaagagttatttaatataaatagtctctgattttaagttctgtttaatgttcattctccttccaagaacaaagtggtgatttttggttagggtgatcgccctcttaaaattggcagtgctgttccttgtgctgcccctgtcttttcctctgatggcattttttttttttttttttttaacacaggttgaaacatttcatctattatctctgcctcatttctggagggttgtgtatcagttctctaacacttgttcctgagaactaaatgtcttttttattcttatttcctctctcataaacatttggtgaccttttaccaagtggtgagttaggttttttaaaataaaatgttcattgtatttgaagttttcctcagttcatgaaatgacttggggcagggcctggggggttctcaagggaggaaatgttttggttatttacacactgaactacaagatgggatcctagcaggaaactcagcctccttgaatcaaagagcatagataaggctgaaagcaaattttagttgtacagttaacaacataccaaagacacaggaaacatctgcagaaattgatcatatataagtgaatgaaaaatcagtactcctcccagaagttaaatatactcctaaagaattcttgggaaaaaagaaacataccaatactggg

SEQ ID NO: 429474 - DNA, 3200 bp, Homo sapiens
cggcgagcggggccgcgggcgcgcaccgactcaagagccgactgtcagcctcggcgggccggagttctccggcgctgggacaggggcgctgggacaggggcgctgggggcgagccctggcgggggccaggtccgaggaccctgggcgcggcggccccgccaggaggtccggccgcgagcgtgacctcacggggaggggccagcgcggcggcctgggcgctgagccgagcgccgggagagcagcgcagaagccgagccgcgaggagcgcactccgtggccccgatggagcggtacaaagccctggaacagctgctgacagagttggatgacttcctcaagattcttgaccaggagaacctgagcagcacagcactggtgaagaagagctgcctggcggagctcctccggctttacaccaaaagcagcagctctgatgaggagtacatttatatgaacaaagtgaccatcaacaagcaacagaatgcagagtctcaaggcaaagcgcctgaggagcagggcctgctacccaatggggagcccagccagcactcctcggcccctcagaagagccttccagacctcccgccacccaagatgattccagaacggaaacagcttgccatcccaaagacggagtctccagagggctactatgaagaggctgagccatatgacacatccctcaatgaggacggagaggctgtgagcagctcctacgagtcctacgatgaagaggacggcagcaagggcaagtcggccccttaccagtggccctcgccggaggccggcatcgagctgatgcgtgacgcccgcatctgcgccttcctgtggcgcaagaagtggctgggacagtgggccaagcagctctgtgtcatcaaggacaacaggcttctgtgctacaaatcctccaaggaccacagccctcagctggacgtgaacctactgggcagcagcgtcattcacaaggagaagcaagtgcggaagaaggagcacaagctgaagatcacaccgatgaatgccgatgtgattgtgctgggcctgcagagcaaggaccaggctgagcagtggctcagggtcatccaggaagtgagcggcctgccttccgaaggagcatctgaaggaaaccagtacaccccggatgcccagcgctttaactgccagaaaccagatatagctgagaagtacctgtcggcttcagagtatgggagctccgtggatggccaccctgaggtcccagaaaccaaagacgtcaagaagaaatgttctgctggcctcaaactgagcaacctaatgaatctgggcaggaagaaatccacctcactggagcctgtggagaggtccctcgagacatccagttacctgaacgtgctggtgaacagccagtggaagtctcgctggtgctctgtcagggacaatcacctgcacttctaccaggaccggaaccggagcaaggtggcccagcaacccctcagcctggtgggctgcgaggtggtcccagaccccagccccgaccacctctactccttccgcatcctccacaagggcgaggagctggccaagcttgaggccaagtcttccgaggaaatgggccactggctgggtctcctgctctctgagtcaggctccaagacagacccagaagagttcacctacgactatgtggatgccgatagggtctcctgtattgtgagtgcggccaaaaactctctcttactgatgcagagaaagttctcagagcccaacacttacatcgatggcctgcctagccaggaccgccaggaggagctgtatgacgacgtggacctgtcagagctcacagctgcggtggagcctaccgaggaagccacccctgttgcagatgacccaaatgagagagaatctgaccgggtgtacctggacctcacacctgtcaagtcctttctgcatggccccagcagtgcacaggcccaggcctcctccccgacgttgtcctgcctggacaatgcaactgaggccctcccggcagactcaggcccaggtcccaccccagatgagccctgcataaagtgtccagagaacctgggagaacagcagctggagagtttggagccagaggatccttccctgagaatcaccaccgtcaaaatccagacggaacagcagagaatctccttcccaccgagctgcccggatgccgtggtggccaccccacctggtgccagcccacctgtgaaggacaggttgcgcgtgaccagtgcagagatcaagcttggcaagaatcggacagaagctgaggtgaagcggtacacagaggagaaggagaggcttgaaaagaagaaggaagaaatccgggggcacctggctcagctccggaaagagaaacgggagctaaaggaaaccctactgaaatgcacagacaaggaagtcctggcgagcctggagcagaagctgaaggaaattgacgaggagtgccggggcgaggagagcaggcgcgtggacctggagctcagcatcatggaggtgaaggacaacctgaagaaggctgaggcagggcctgtgacgttaggcaccaccgtggacaccacccacctggagaatgtgagcccccgccccaaagctgtcacacctgcctctgccccagactgtaccccagtcaactctgcaaccacactcaagaacaggcctctctcggtcgtggtcacaggcaaaggcactgtactccagaaagccaaggttgaaacatttcatctattatctctgcctcatttctggagggttgtgtatcagttctctaacacttgttcctgagaactaaatgtcttttttattcttatttcctctctcataaacatttggtgaccttttaccaagtggtgagttaggttttttaaaataaaatgttcattgtatttgaagttttcctcagttcatgaaatgacttggggcagggcctggggggttctcaagggaggaaatgttttggttatttacacactgaactacaagatgggatcctagcaggaaactcagcctccttgaatcaaagagcatagataaggctgaaagcaaattttagttgtacagttaacaacataccaaagacacaggaaacatctgcagaaattgatcatatataagtgaatgaaaaatcagtactcctcccagaagttaaatatactcctaaagaattcttgggaaaaaagaaacataccaatactggg

SEQ ID NO: 429475 - DNA, 407 bp, Homo sapiens
tgggcaccagaactgtgaggcagggctggtaccccctccacagctgagggagtagaggtaatgttgaatgccccagactcactctctcctgcaggtggagcctaccgaggaagccacccctgttgcagatgacccaaatgagagagaatctgaccgggtgtacctggacctcacacctgtcaagtcctttctgcatggccccagcagtgcacaggcccaggcctcctccccgacgttgtcctgcctggacaatgcaactgaggccctcccggcagactcaggcccaggtcccaccccagatgagccctgcataaagtgtccagagaacctgggagaacaggtacaggcctcccctgcaggacagcaagaccaccttcctgcgccccttcagccagctgagtcaggtc

SEQ ID NO: 429476 - DNA, 378 bp, Homo sapiens
tcccacctcggccccccacgcagctgggactacaggtacatgccaccacacccagctaatttttaagttttttgtagagacgaggtctagctgtgttgcccaggctggctcctgggctcaagggatccctctgcctcagcctcctaaagtgctggggttacaagtgtgagtcacctcgcccagcctcttgcttttcttataaggacactagtcctattggatgcaggcgccactccaacgacctcatttagcctatttacctccccaaaggccttgtctccacatatcatcagattgtgggttaaggcttcaacatatgacatttaattcagctcgtaccagagggtgtttaagcattttcccattgaaatgtattcc

SEQ ID NO: 429477 - DNA, 2604 bp, Homo sapiens
aattttatgtctggtaatggacttgtatatgtaaagaactcttataattgaataataaaagggcaaatagcccaactgaagagggcaaaggatctgaataggcatttctgcaaaacacatgaaaagaagctcaacatcattagccatcagggaaatgatttcacttaatgcccacaaggatggctataatcagaacgagaagacagtaacaagtgttcacaaggatatggagaaatgggaacgttggaactgtcatatgttgctgtgagaatgtaaaatggtgcagccgttttggaaaatagcctggcatttcttcaaggttaaatgtagaattaacacgtgactcagcagttccatttctgggtttatacccaagagaaatgaaaatatatgtccacagaaaaacttgtacatggatgttcatagcagcagcatccataatagcctcaagtagaagcaactcaaatgtctgtcaactgatgaacagatgacaaaacatggtacaatggaatattactcagcaatgaaaaggaatgctttatatgttacaacatgattggaccctaaaaacatgccaaaaggctgtgtattatatgactccattgataggaaaggaatggtttacatgttacaacatgattgaaccttaaaaacatgccacaaactgtgtatgactccattgatatgagaggaatggtttacatgttacaacatgattgaaccctaaaaacatgtattatatgactccatttatatgaaatgtctcaaagaggcagattcatagaaagactagtggttgccaaggtcttcattttttaggggtgcactaatggatgtaggatttctttttagagtgattaaaatgttacaaaattgctggctgggtgcagtggcttatgcccataatcacagcacttcgggaggctgaagtgggaagatccaggagttgaagaccagcctgggcaacatagtgagaaaatgtctccctaaaaggaagaattaacctcatgtggtggtgtgcacctgtagttctagctactagggaggctgaggaggaaggattgcttatcccgggaattcaaggttgcagtgagctatgattgcacccactgtacctcatcctgagagagagagcaagaccctgtctctaaaagaaaaataaatgttctgaaattgattatgttgacggtcacataactgaatatattaaaaacttaaattgtatactttaagttggtgattgtatgatatatgagttttatcaatacagctacttaaaaacctatagttatgcaaattaaaaatttcatttactggggataattgaaatgattataccgaacataatacatgtagaaacagtatagtttttgtattgctggatagtctgtttttttctttttcaatatttgaaactaaaggtcatgtaattgatgtttttcttacataactgtgaaatatttattctctgttgaaatgttttatcttacgttttctcctttaggaatgttacgttcataacttactaaggattagtgtatattttccaaccttgaggcatgaaattctggagcttattattgaaaaactactcaagctggatgtgaatgcatcccggcagggtattgaagatgctgaagaaacagcaaatcaaacttgtggtgggacagattccacggaaggattgtttaatatgggattcgcagaggcatttttggaacatctttggaaaaacttgcaggatccaagtaatcctgccatcatcaggcaggctgctggaaattatattggaagctttttggcaagagctaaatttatttctcttattactgtaaaaccatgcctagatcttttggttaactggctgcacatataccttaataaccaggattcgggaacaaaggcattctgcgatgttgctctccatggaccattttactcagcctgccaagctgtgttctacacctttgtttttagacacaagcagcttttgagcggaaacctgaaagaaggtttgcagtatcctcagagtctgaattttgagcggatagtgatgagccagctaaatcccctgaagatttgcctgccctcagtggttaacttttttgctgcaatcacaaagatgaagacttgtggatatggatggtggtgatggttgcacaacaatatcaatttattttataccactgaaccgtgcacttcaaaatggttaagatggtaagttttatgttgtgtattttaccataataaaaaaaattgtagagggaaaaacagtctgcctccacttttgatatgggactgctaacatcttccaccctccctctccccctctgccccacatctgggcaagctaagaaagcctgctgctctctcctctggcaccagctggaaattcatacccaacaagccctagccctcccaccagacccacatttcatccccatccccatcgcatccccatccccatccccatccctaaccaccataaatgctaagggagtttccttgcctggttttctgaaaccatttttggacctgcttgggaatctgccctgctctctcagaaagcttcattatatgagcaataaaccttttcctaccctc

SEQ ID NO: 429478 - DNA, 2322 bp, Homo sapiens
aattttatgtctggtaatggacttgtatatgtaaagaactcttataattgaataataaaagggcaaatagcccaactgaagagggcaaaggatctgaataggcatttctgcaaaacacatgaaaagaagctcaacatcattagccatcagggaaatgatttcacttaatgcccacaaggatggctataatcagaacgagaagacagtaacaagtgttcacaaggatatggagaaatgggaacgttggaactgtcatatgttgctgtgagaatgtaaaatggtgcagccgttttggaaaatagcctggcatttcttcaaggttaaatgtagaattaacacgtgactcagcagttccatttctgggtttatacccaagagaaatgaaaatatatgtccacagaaaaacttgtacatggatgttcatagcagcagcatccataatagcctcaagtagaagcaactcaaatgtctgtcaactgatgaacagatgacaaaacatggtacaatggaatattactcagcaatgaaaaggaatgctttatatgttacaacatgattggaccctaaaaacatgccaaaaggctgtgtattatatgactccattgataggaaaggaatggtttacatgttacaacatgattgaaccttaaaaacatgccacaaactgtgtatgactccattgatatgagaggaatggtttacatgttacaacatgattgaaccctaaaaacatgtattatatgactccatttatatgaaatgtctcaaagaggcagattcatagaaagactagtggttgccaaggtcttcattttttaggggtgcactaatggatgtaggatttctttttagagtgattaaaatgttacaaaattgctggctgggtgcagtggcttatgcccataatcacagcacttcgggaggctgaagtgggaagatccaggagttgaagaccagcctgggcaacatagtgagaaaatgtctccctaaaaggaagaattaacctcatgtggtggtgtgcacctgtagttctagctactagggaggctgaggaggaaggattgcttatcccgggaattcaaggttgcagtgagctatgattgcacccactgtacctcatcctgagagagagagcaagaccctgtctctaaaagaaaaataaatgttctgaaattgattatgttgacggtcacataactgaatatattaaaaacttaaattgtatactttaagttggtgattgtatgatatatgagttttatcaatacagctacttaaaaacctatagttatgcaaattaaaaatttcatttactggggataattgaaatgattataccgaacataatacatgtagaaacagtatagtttttgtattgctggatagtctgtttttttctttttcaatatttgaaactaaaggtcatgtaattgatgtttttcttacataactgtgaaatatttattctctgttgaaatgttttatcttacgttttctcctttaggaatgttacgttcataacttactaaggattagtgtatattttccaaccttgaggcatgaaattctggagcttattattgaaaaactactcaagctggatgtgaatgcatcccggcagggtattgaagatgctgaagaaacagcaaatcaaacttgtggtgggacagattccacggaaggattgtttaatatgggattcgcagaggcatttttggaacatctttggaaaaacttgcaggatccaagtaatcctgccatcatcaggcaggctgctggaaattatattggaagctttttggcaagagctaaatttatttctcttatgtaagtagcctaatttgccgagtactttttaatatcatgctttaaaaagagtatagcattgtctcaagtcagaaatatctcccatatgtttttggcatgtttttaaagtgaataaaattcctactctgtgcaagatgtttatatttctaagtggtgattttagaataaagtgtctccttttttatatataaaaaaaaaaaaaaaaaaaaaaaaaaaaatttgtggggggttggagccttggaaaaacgtttctataaaaccaatctggtgggggggcggggggcccccaaaagaggtaaagtcgcaacagcgggcgccaaaagatcgggtaccccgaggagaaaccctgggacatagacataggtggggggatttctcagccatataaaaaaagccccggggcaaacaccagcggtcttgaaaaaaaccaaagggagatcagagaacacaggggtaataacgggggcaacgaggcggaaaaaatacccggcgggc

SEQ ID NO: 429479 - DNA, 1233 bp, Homo sapiens
gtctcgagctcctgaccttgggtgatccacccgcctcggcctcccaaagtgctgggattacatttacaggcgtgagccactgtgcctggccctgggttgattttgatgcttagctaggtttgggatccattggattatttaacacccgaggtgccttttgtttctaatgatattctctcaacgtgttttaaaaatgaagcccatgagatagttatgagatagtagaacttttccctacattggtgaagtaaaaatcttgggattttgatagtcagattatcttaggcattaaaaaatatcacaccgatgccctctctttttatagggattcgcagaggcatttttggaacatctttggaaaaacttgcaggatccaagtaatcctgccatcatcaggcaggctgctggaaattatattggaagctttttggcaagagctaaatttatttctcttattactgtaaaaccatgcctagatcttttggttaactggctgcacatataccttaataaccaggattcgggaacaaaggcattctgcgatgttgctctccatggaccattttactcagcctgccaagctgtgttctacacctttgtttttagacacaagcagcttttgagcggaaacctgaaagaaggtttgcagtatcctcagagtctgaattttgagcggatagtgatgagccagctaaatcccctgaagatttgcctgccctcagtggttaacttttttgctgcaatcacaaagatgaagacttgtggatatggatggtggtgatggttgcacaacaatatcaatttattttataccactgaaccgtgcacttcaaaatggttaagatggtaagttttatgttgtgtattttaccataataaaaaaaattgtagagggaaaaacagtctgcctccacttttgatatgggactgctaacatcttccaccctccctctccccctctgccccacatctgggcaagctaagaaagcctgctgctctctcctctggcaccagctggaaattcatacccaacaagccctagccctcccaccagacccacatttcatccccatccccatcgcatccccatccccatccccatccctaaccaccataaatgctaagggagtttccttgcctggttttctgaaaccatttttggacctgcttgggaatctgccctgctctctcagaaagcttcattatatgagcaataaaccttttcctaccctc

SEQ ID NO: 429480 - DNA, 1172 bp, Homo sapiens
gtctcgagctcctgaccttgggtgatccacccgcctcggcctcccaaagtgctgggattacatttacaggcgtgagccactgtgcctggccctgggttgattttgatgcttagctaggtttgggatccattggattatttaacacccgaggtgccttttgtttctaatgatattctctcaacgtgttttaaaaatgaagcccatgagatagttatgagatagtagaacttttccctacattggtgaagtaaaaatcttgggattttgatagtcagattatcttaggcattaaaaaatatcacaccgatgccctctctttttatagggattcgcagaggcatttttggaacatctttggaaaaacttgcaggatccaagtaatcctgccatcatcaggcaggctgctggaaattatattggaagctttttggcaagagctaaatttatttctcttatgattcgggaacaaaggcattctgcgatgttgctctccatggaccattttactcagcctgccaagctgtgttctacacctttgtttttagacacaagcagcttttgagcggaaacctgaaagaaggtttgcagtatcctcagagtctgaattttgagcggatagtgatgagccagctaaatcccctgaagatttgcctgccctcagtggttaacttttttgctgcaatcacaaagatgaagacttgtggatatggatggtggtgatggttgcacaacaatatcaatttattttataccactgaaccgtgcacttcaaaatggttaagatggtaagttttatgttgtgtattttaccataataaaaaaaattgtagagggaaaaacagtctgcctccacttttgatatgggactgctaacatcttccaccctccctctccccctctgccccacatctgggcaagctaagaaagcctgctgctctctcctctggcaccagctggaaattcatacccaacaagccctagccctcccaccagacccacatttcatccccatccccatcgcatccccatccccatccccatccctaaccaccataaatgctaagggagtttccttgcctggttttctgaaaccatttttggacctgcttgggaatctgccctgctctctcagaaagcttcattatatgagcaataaaccttttcctaccctc

SEQ ID NO: 429481 - DNA, 534 bp, Homo sapiens
gcaatagtgctttggctgggttagagtcccagaatgtgaactttatgagagcagcaattttgacgtgcagttttctgctatatccccagcacctggaacagtgcttggcaagtgaaaggtgttccataaatattcagtgcatgaataaagttttctcttggtggggttgatttctgagttggttccatcatgggttggttatctttatcttccactctagactgtcttccttcctgtccactcatctgataatctacatgccccattcatcactagggaacccgtcacaggaagggagtgggtgaactagcataagtggaatagctaaattgaaaagactccaaaacttatgccttgctgcatacaaattgttagcaatatccttttgcttattagaatattctgaattaatatatagatgttctaacacaaattcatctctttagcactttgctatctctacaatagagagggaagaagcattgttctatttctcactgaaaaaagagtattacagaaatgattttagaagtt

SEQ ID NO: 429482 - DNA, 3529 bp, Homo sapiens
cggggaccgcagcgggctgaactgctggtgtcagagcccggcgagcgctggcagttccgcggcggggatgctgaggagcgctgggtccgggagcagccctggcccctgcggacttccgaggccgtgaaaacccctgcgctgcggcccttcccaggcccccgaggccgttcgccgttcccgaagcccgactgggggaagagtccagcaccaaagcggccgttctcggattccggagcgttctggagccccgagagacgccccggggttctagaagctccccggcggcgcccagtcccggcttcattcgggcgtccctccgaaacccactcgggtgcacgggtcgtcggcgagccgcgaccgggtcctggcgcgcaccatgatcgtggcggactccgagtgccgcgcagagctcaaggactacctgcggttcgccccgggcggcgtcggcgactcgggccccggagaggagcagagggagagccgggctcggcgaggccctcgagggcccagcgccttcatccccgtggaggaggtccttcgggagggggctgagagcctcgagcagcacctggggctggaggcactgatgtcctctgggcgagtagacaacctggcagtggtgatgggcctgcaccctgactactttaccagcttctggcgcctgcactacctgctgctgcacacggatggtcccttggccagctcctggcgccactacattgccatcatggctgccgcccgccatcagtgttcttacctggtaggctcccacatggccgagtttctgcagactggtggtgaccctgagtggctgctgggcctccaccgggcccccgagaagctgcgcaaactcagcgagatcaacaagttgctggcgcatcggccatggctcatcaccaaggaacacatccaggccttgctgaagaccggcgagcacacttggtccctggccgagctcattcaggctctggtcctgctcacccactgccactcgctctcctccttcgtgtttggctgtggcatcctccctgagggggatgcagatggcagccctgccccccaggcacctacaccccctagtgaacagagcagccccccaagcagggacccgttgaacaactctgggggctttgagtctgcccgcgacgtggaggcgctgatggagcgcatgcagcagctgcaggagagcctgctgcgggatgaggggacgtcccaggaggagatggagagccgctttgagctggagaagtcagagagcctgctggtgaccccctcagctgacatcctggagccctctccacacccagacatgctgtgctttgtggaagaccctactttcggatatgaggacttcactcggagaggggctcaggcaccccctaccttccgggcccaggattatacctgggaagaccatggctactcgctgatccagcggctttaccctgagggtgggcagctgctggatgagaagttccaggcagcctatagcctcacctacaataccatcgccatgcacagtggtgtggacacctccgtgctccgcagggccatctggaactatatccactgcgtctttggcatcagatatgatgactatgattatggggaggtgaaccagctcctggagcggaacctcaaggtctatatcaagacagtggcctgctacccagagaagaccacccgaagaatgtacaacctcttctggaggcacttccgccactcagagaaggtccacgtgaacttgctgctcctggaggcgcgcatgcaagccgctctgctgtacgccctccgtgccatcacccgctacatgacctgactcctgagcaggacctgggcccggttcagctccccacaaggacttctctgtctggagacagccccagacccttttgtgtcccatgcccaccctccccacgctgcagtgggcttgtgtgtgatgtgcagtcccgaagccacaccctcccttttcctcactggaatggacagttcattgcactgactctgggatctcagccctgctcctgggagctggaagagcacttggagatcctaagggaccacacccttcctccttcccctgcccacagaggcagagggcacaggaaagaagccgggccaagctcggaattaatgtgccacaagtgttgtggccttcctgaactgggaagtccctggctggcccccgggggagaggggcaaatgcctccgggactgacactccaggcagctttgccttctctcccctgtcatttccagatttcattacctcctacttgccattcacccatcaatgtgaaagtcagggtcacagctggtctgtgtgtccagttccctaaaagcctgttctgttgggcagcctgaggctgttgcccgaatcctagttcagttttttgacttcctttgccctttttcccttttctccatgcttaatggtgtgaggcgtcaggagagaggccaagtacataaaaaaaaaaaaaagcagattatctctagagagtttgagcctttgctggtcacattgccttctgaagaggagggagtattagattataaatcctctttattttggtcctttatgcttgaggttccaacctggagccacagtgtgtgagaggaggaggagagggagaattctgttctcccagagctgcacctgcctcgcagaggccagcaccccactctcctgcctccagtggccctgccgcagatgtctcccaaaaagttgagcctttctagatggcttaggtggcaccatggctcagcaggaggggcgggaggcaccagggttcttgtttggaccctgcccctgggccatggccaggtgaccatggctacattgccaaacctctgactgccacagctgcagactgagagggtgggtctgagtccccacaatgtctgaagctgcccctgggattctcaggccaacctgccaacagcaagcggattttcttgcaagatcagggaccccatttctgcagccagtgtctcctgggtgccttctgaggactcccacccccatcccagtatctcatctgtcccctctcctggggcttaagtgggttgcttccaggcagaagcagccaaggaccgattccaggcactttctgtagcaaatgactgtgaattacgacttctcttgcccttcttctagcagtctgtgcctcctctctgaccagtttggagggcactgaagaaaggcaagggccgtgctgctgctgggcggggcaggagaggagcctggccagtgtgccacattaaatacccgtgcaggcgcggagaagcaaccggcacccccttccggcctgaaagccctccctgcaagaaggtgtgcaggagagaagaggccccggcatggggatctgggttctagagggcatgtgatgactgtaaatgttcactgggtgggtagggagtggtatccagtgttcaagtgcagaaatctttggctttgctaccagttccatatgatgagaaataaacgttcgctgaggttttgtttcatactccctttttatgggctgtt

SEQ ID NO: 429483 - DNA, 3496 bp, Homo sapiens
cggggaccgcagcgggctgaactgctggtgtcagagcccggcgagcgctggcagttccgcggcggggatgctgaggagcgctgggtccgggagcagccctggcccctgcggacttccgaggccgtgaaaacccctgcgctgcggcccttcccaggcccccgaggccgttcgccgttcccgaagcccgactgggggaagagtccagcaccaaagcggccgttctcggattccggagcgttctggagccccgagagacgccccggggttctagaagctccccggcggcgcccagtcccggcttcattcgggcgtccctccgaaacccactcgggtgcacgggtcgtcggcgagccgcgaccgggtcctggcgcgcaccatgatcgtggcggactccgagtgccgcgcagagctcaaggactacctgcggttcgccccgggcggcgtcggcgactcgggccccggagaggagcagagggagagccgggctcggcgaggccctcgagggcccagcgccttcatccccgtggaggaggtccttcgggagggggctgagagcctcgagcagcacctggggctggaggcactgatgtcctctgggcgagtagacaacctggcagtggtgatgggcctgcaccctgactactttaccagcttctggcgcctgcactacctgctgctgcacacggatggtcccttggccagctcctggcgccactacattgccatcatggctgccgcccgccatcagtgttcttacctggtaggctcccacatggccgagtttctgcagactggtggtgaccctgagtggctgctgggcctccaccgggcccccgagaagctgcgcaaactcagcgagatcaacaagttgctggcgcatcggccatggctcatcaccaaggaacacatccaggccttgctgaagaccggcgagcacacttggtccctggccgagctcattcaggctctggtcctgctcacccactgccactcgctctcctccttcgtgtttggctgtggcatcctccctgagggggatgcagatggcagccctgccccccaggcacctacaccccctagtgaacagagcagccccccaagcagggacccgttgaacaactctgggggctttgagtctgcccgcgacgtggaggcgctgatggagcgcatgcagcagctgcaggaggagatggagagccgctttgagctggagaagtcagagagcctgctggtgaccccctcagctgacatcctggagccctctccacacccagacatgctgtgctttgtggaagaccctactttcggatatgaggacttcactcggagaggggctcaggcaccccctaccttccgggcccaggattatacctgggaagaccatggctactcgctgatccagcggctttaccctgagggtgggcagctgctggatgagaagttccaggcagcctatagcctcacctacaataccatcgccatgcacagtggtgtggacacctccgtgctccgcagggccatctggaactatatccactgcgtctttggcatcagatatgatgactatgattatggggaggtgaaccagctcctggagcggaacctcaaggtctatatcaagacagtggcctgctacccagagaagaccacccgaagaatgtacaacctcttctggaggcacttccgccactcagagaaggtccacgtgaacttgctgctcctggaggcgcgcatgcaagccgctctgctgtacgccctccgtgccatcacccgctacatgacctgactcctgagcaggacctgggcccggttcagctccccacaaggacttctctgtctggagacagccccagacccttttgtgtcccatgcccaccctccccacgctgcagtgggcttgtgtgtgatgtgcagtcccgaagccacaccctcccttttcctcactggaatggacagttcattgcactgactctgggatctcagccctgctcctgggagctggaagagcacttggagatcctaagggaccacacccttcctccttcccctgcccacagaggcagagggcacaggaaagaagccgggccaagctcggaattaatgtgccacaagtgttgtggccttcctgaactgggaagtccctggctggcccccgggggagaggggcaaatgcctccgggactgacactccaggcagctttgccttctctcccctgtcatttccagatttcattacctcctacttgccattcacccatcaatgtgaaagtcagggtcacagctggtctgtgtgtccagttccctaaaagcctgttctgttgggcagcctgaggctgttgcccgaatcctagttcagttttttgacttcctttgccctttttcccttttctccatgcttaatggtgtgaggcgtcaggagagaggccaagtacataaaaaaaaaaaaaagcagattatctctagagagtttgagcctttgctggtcacattgccttctgaagaggagggagtattagattataaatcctctttattttggtcctttatgcttgaggttccaacctggagccacagtgtgtgagaggaggaggagagggagaattctgttctcccagagctgcacctgcctcgcagaggccagcaccccactctcctgcctccagtggccctgccgcagatgtctcccaaaaagttgagcctttctagatggcttaggtggcaccatggctcagcaggaggggcgggaggcaccagggttcttgtttggaccctgcccctgggccatggccaggtgaccatggctacattgccaaacctctgactgccacagctgcagactgagagggtgggtctgagtccccacaatgtctgaagctgcccctgggattctcaggccaacctgccaacagcaagcggattttcttgcaagatcagggaccccatttctgcagccagtgtctcctgggtgccttctgaggactcccacccccatcccagtatctcatctgtcccctctcctggggcttaagtgggttgcttccaggcagaagcagccaaggaccgattccaggcactttctgtagcaaatgactgtgaattacgacttctcttgcccttcttctagcagtctgtgcctcctctctgaccagtttggagggcactgaagaaaggcaagggccgtgctgctgctgggcggggcaggagaggagcctggccagtgtgccacattaaatacccgtgcaggcgcggagaagcaaccggcacccccttccggcctgaaagccctccctgcaagaaggtgtgcaggagagaagaggccccggcatggggatctgggttctagagggcatgtgatgactgtaaatgttcactgggtgggtagggagtggtatccagtgttcaagtgcagaaatctttggctttgctaccagttccatatgatgagaaataaacgttcgctgaggttttgtttcatactccctttttatgggctgtt

SEQ ID NO: 429484 - DNA, 2004 bp, Homo sapiens
gggggaggtgaaccagctcctcataatcatagtcatcatatctgatgccaaagacgcagtggatatgatgactatgattatggggaggtgaaccagctcctggagcggaacctcaaggtctatatcaagacagtggcctgctacccagagaagaccacccgaagaatgtacaacctcttctggaggcacttccgccactcagagaaggtccacgtgaacttgctgctcctggaggcgcgcatgcaagccgctctgctgtacgccctccgtgccatcacccgctacatgacctgactcctgagcaggacctgggcccggttcagctccccacaaggacttctctgtctggagacagccccagacccttttgtgtcccatgcccaccctccccacgctgcagtgggcttgtgtgtgatgtgcagtcccgaagccacaccctcccttttcctcactggaatggacagttcattgcactgactctgggatctcagccctgctcctgggagctggaagagcacttggagatcctaagggaccacacccttcctccttcccctgcccacagaggcagagggcacaggaaagaagccgggccaagctcggaattaatgtgccacaagtgttgtggccttcctgaactgggaagtccctggctggcccccgggggagaggggcaaatgcctccgggactgacactccaggcagctttgccttctctcccctgtcatttccagatttcattacctcctacttgccattcacccatcaatgtgaaagtcagggtcacagctggtctgtgtgtccagttccctaaaagcctgttctgttgggcagcctgaggctgttgcccgaatcctagttcagttttttgacttcctttgccctttttcccttttctccatgcttaatggtgtgaggcgtcaggagagaggccaagtacataaaaaaaaaaaaaagcagattatctctagagagtttgagcctttgctggtcacattgccttctgaagaggagggagtattagattataaatcctctttattttggtcctttatgcttgaggttccaacctggagccacagtgtgtgagaggaggaggagagggagaattctgttctcccagagctgcacctgcctcgcagaggccagcaccccactctcctgcctccagtggccctgccgcagatgtctcccaaaaagttgagcctttctagatggcttaggtggcaccatggctcagcaggaggggcgggaggcaccagggttcttgtttggaccctgcccctgggccatggccaggtgaccatggctacattgccaaacctctgactgccacagctgcagactgagagggtgggtctgagtccccacaatgtctgaagctgcccctgggattctcaggccaacctgccaacagcaagcggattttcttgcaagatcagggaccccatttctgcagccagtgtctcctgggtgccttctgaggactcccacccccatcccagtatctcatctgtcccctctcctggggcttaagtgggttgcttccaggcagaagcagccaaggaccgattccaggcactttctgtagcaaatgactgtgaattacgacttctcttgcccttcttctagcagtctgtgcctcctctctgaccagtttggagggcactgaagaaaggcaagggccgtgctgctgctgggcggggcaggagaggagcctggccagtgtgccacattaaatacccgtgcaggcgcggagaagcaaccggcacccccttccggcctgaaagccctccctgcaagaaggtgtgcaggagagaagaggccccggcatggggatctgggttctagagggcatgtgatgactgtaaatgttcactgggtgggtagggagtggtatccagtgttcaagtgcagaaatctttggctttgctaccagttccatatgatgagaaataaacgttcgctgaggttttgtttcatactccctttttatgggctgtt

SEQ ID NO: 429485 - DNA, 2045 bp, Homo sapiens
agtgttgggattacaggcgtgagccaccgcacctggccattttacctttagggaatacagagcttagtcatgataggaatgaatgtgcttgtccttgtactaaactgctcagagccttagcagatgctggggcagctctgtaggaaaggaaatggtgaggtaagtgggtcagggatcaaggcagtctgggaggggtgtgggggtgaggagtgacatcagttgccaacatgccttcctctgtgccccaggtccacgtgaacttgctgctcctggaggcgcgcatgcaagccgctctgctgtacgccctccgtgccatcacccgctacatgacctgactcctgagcaggacctgggcccggttcagctccccacaaggacttctctgtctggagacagccccagacccttttgtgtcccatgcccaccctccccacgctgcagtgggcttgtgtgtgatgtgcagtcccgaagccacaccctcccttttcctcactggaatggacagttcattgcactgactctgggatctcagccctgctcctgggagctggaagagcacttggagatcctaagggaccacacccttcctccttcccctgcccacagaggcagagggcacaggaaagaagccgggccaagctcggaattaatgtgccacaagtgttgtggccttcctgaactgggaagtccctggctggcccccgggggagaggggcaaatgcctccgggactgacactccaggcagctttgccttctctcccctgtcatttccagatttcattacctcctacttgccattcacccatcaatgtgaaagtcagggtcacagctggtctgtgtgtccagttccctaaaagcctgttctgttgggcagcctgaggctgttgcccgaatcctagttcagttttttgacttcctttgccctttttcccttttctccatgcttaatggtgtgaggcgtcaggagagaggccaagtacataaaaaaaaaaaaaagcagattatctctagagagtttgagcctttgctggtcacattgccttctgaagaggagggagtattagattataaatcctctttattttggtcctttatgcttgaggttccaacctggagccacagtgtgtgagaggaggaggagagggagaattctgttctcccagagctgcacctgcctcgcagaggccagcaccccactctcctgcctccagtggccctgccgcagatgtctcccaaaaagttgagcctttctagatggcttaggtggcaccatggctcagcaggaggggcgggaggcaccagggttcttgtttggaccctgcccctgggccatggccaggtgaccatggctacattgccaaacctctgactgccacagctgcagactgagagggtgggtctgagtccccacaatgtctgaagctgcccctgggattctcaggccaacctgccaacagcaagcggattttcttgcaagatcagggaccccatttctgcagccagtgtctcctgggtgccttctgaggactcccacccccatcccagtatctcatctgtcccctctcctggggcttaagtgggttgcttccaggcagaagcagccaaggaccgattccaggcactttctgtagcaaatgactgtgaattacgacttctcttgcccttcttctagcagtctgtgcctcctctctgaccagtttggagggcactgaagaaaggcaagggccgtgctgctgctgggcggggcaggagaggagcctggccagtgtgccacattaaatacccgtgcaggcgcggagaagcaaccggcacccccttccggcctgaaagccctccctgcaagaaggtgtgcaggagagaagaggccccggcatggggatctgggttctagagggcatgtgatgactgtaaatgttcactgggtgggtagggagtggtatccagtgttcaagtgcagaaatctttggctttgctaccagttccatatgatgagaaataaacgttcgctgaggttttgtttcatactccctttttatgggctgtt

SEQ ID NO: 429486 - DNA, 1391 bp, Homo sapiens
  misc_feature (10)..(10): n is a, c, g, or t
  misc_feature (16)..(16): n is a, c, g, or t
  misc_feature (21)..(22): n is a, c, g, or t
  misc_feature (39)..(39): n is a, c, g, or t
atgtacttgncctctntcctnnggcctcaaaccattaancatggagaaaagggaaaaagggcaaatgcctccgggactgacactccaggcagctttgccttctctcccctgtcatttccagatttcattacctcctacttgccattcacccatcaatgtgaaagtcagggtcacagctggtctgtgtgtccagttccctaaaagcctgttctgttgggcagcctgaggctgttgcccgaatcctagttcagttttttgacttcctttgccctttttcccttttctccatgcttaatggtgtgaggcgtcaggagagaggccaagtacataaaaaaaaaaaaaagcagattatctctagagagtttgagcctttgctggtcacattgccttctgaagaggagggagtattagattataaatcctctttattttggtcctttatgcttgaggttccaacctggagccacagtgtgtgagaggaggaggagagggagaattctgttctcccagagctgcacctgcctcgcagaggccagcaccccactctcctgcctccagtggccctgccgcagatgtctcccaaaaagttgagcctttctagatggcttaggtggcaccatggctcagcaggaggggcgggaggcaccagggttcttgtttggaccctgcccctgggccatggccaggtgaccatggctacattgccaaacctctgactgccacagctgcagactgagagggtgggtctgagtccccacaatgtctgaagctgcccctgggattctcaggccaacctgccaacagcaagcggattttcttgcaagatcagggaccccatttctgcagccagtgtctcctgggtgccttctgaggactcccacccccatcccagtatctcatctgtcccctctcctggggcttaagtgggttgcttccaggcagaagcagccaaggaccgattccaggcactttctgtagcaaatgactgtgaattacgacttctcttgcccttcttctagcagtctgtgcctcctctctgaccagtttggagggcactgaagaaaggcaagggccgtgctgctgctgggcggggcaggagaggagcctggccagtgtgccacattaaatacccgtgcaggcgcggagaagcaaccggcacccccttccggcctgaaagccctccctgcaagaaggtgtgcaggagagaagaggccccggcatggggatctgggttctagagggcatgtgatgactgtaaatgttcactgggtgggtagggagtggtatccagtgttcaagtgcagaaatctttggctttgctaccagttccatatgatgagaaataaacgttcgctgaggttttgtttcatactccctttttatgggctgtt

SEQ ID NO: 429487 - DNA, 749 bp, Homo sapiens
  misc_feature (651)..(651): n is a, c, g, or t
  misc_feature (681)..(681): n is a, c, g, or t
  misc_feature (741)..(741): n is a, c, g, or t
cggggaccgcagcgggctgaactgctggtgtcagagcccggcgagcgctggcagttccgcggcggggatgctgaggagcgctgggtccgggagcagccctggcccctgcggacttccgaggccgtgaaaacccctgcgctgcggcccttcccaggcccccgaggccgttcgccgttcccgaagcccgactgggggaagagtccagcaccaaagcggccgttctcggattccggagcgttctggagccccgagagacgccccggggttctagaagctccccggcggcgcccagtcccggcttcattcgggcgtccctccgaaacccactcgggtgcacgggtcgtcggcgagccgcgaccgggtcctggcgcgcaccatgatcgtggcggactccgagtgccgcgcagagctcaaggactacctgcggttcgccccgggcggcgtcggcgactcgggccccggagaggagcagagggagagccgggctcggcgaggccctcgagggcccagcgccttcatccccgtggaggaggtccttcgggagggggctgagagcctcgagcagcacctggggctggaggcactgatgtcctctgggcgagtagacaacctggcagtggtgatgggcctgcaccctgactactttttacncatgctttcttgggcggccttgcacttacncttgcttgcttgcactaccgggattggtcccctttggcccaagcttccttgggcgcccanttacattt

SEQ ID NO: 429488 - DNA, 3533 bp, Homo sapiens
tcggtgcattgtacggtccgggcgtatttggatatgtcgaccaggctgtctgccactgcgtcgggccggggatgctgaggagcgctgggtccgggagcagccctggcccctgcggacttccgaggccgtgaaaacccctgcgctgcggcccttcccaggcccccgaggccgttcgccgttcccgaagcccgactgggggaagagtccagcaccaaagcggccgttctcggattccggagcgttctggagccccgagagacgccccggggttctagaagctccccggcggcgcccagtcccggcttcattcgggcgtccctccgaaacccactcgggtgcacgggtcgtcggcgagccgcgaccgggtcctggcgcgcaccatgatcgtggcggactccgagtgccgcgcagagctcaaggactacctgcggttcgccccgggcggcgtcggcgactcgggccccggagaggagcagagggagagccgggctcggcgaggccctcgagggcccagcgccttcatccccgtggaggaggtccttcgggagggggctgagagcctcgagcagcacctggggctggaggcactgatgtcctctgggcgagtagacaacctggcagtggtgatgggcctgcaccctgactactttaccagcttctggcgcctgcactacctgctgctgcacacggatggtcccttggccagctcctggcgccactacattgccatcatggctgccgcccgccatcagtgttcttacctggtaggctcccacatggccgagtttctgcagactggtggtgaccctgagtggctgctgggcctccaccgggcccccgagaagctgcgcaaactcagcgagatcaacaagttgctggcgcatcggccatggctcatcaccaaggaacacatccaggccttgctgaagaccggcgagcacacttggtccctggccgagctcattcaggctctggtcctgctcacccactgccactcgctctcctccttcgtgtttggctgtggcatcctccctgagggggatgcagatggcagccctgccccccaggcacctacaccccctagtgaacagagcagccccccaagcagggacccgttgaacaactctgggggctttgagtctgcccgcgacgtggaggcgctgatggagcgcatgcagcagctgcaggagagcctgctgcgggatgaggggacgtcccaggaggagatggagagccgctttgagctggagaagtcagagagcctgctggtgaccccctcagctgacatcctggagccctctccacacccagacatgctgtgctttgtggaagaccctactttcggatatgaggacttcactcggagaggggctcaggcaccccctaccttccgggcccaggattatacctgggaagaccatggctactcgctgatccagcggctttaccctgagggtgggcagctgctggatgagaagttccaggcagcctatagcctcacctacaataccatcgccatgcacagtggtgtggacacctccgtgctccgcagggccatctggaactatatccactgcgtctttggcatcagatatgatgactatgattatggggaggtgaaccagctcctggagcggaacctcaaggtctatatcaagacagtggcctgctacccagagaagaccacccgaagaatgtacaacctcttctggaggcacttccgccactcagagaaggtccacgtgaacttgctgctcctggaggcgcgcatgcaagccgctctgctgtacgccctccgtgccatcacccgctacatgacctgactcctgagcaggacctgggcccggttcagctccccacaaggacttctctgtctggagacagccccagacccttttgtgtcccatgcccaccctccccacgctgcagtgggcttgtgtgtgatgtgcagtcccgaagccacaccctcccttttcctcactggaatggacagttcattgcactgactctgggatctcagccctgctcctgggagctggaagagcacttggagatcctaagggaccacacccttcctccttcccctgcccacagaggcagagggcacaggaaagaagccgggccaagctcggaattaatgtgccacaagtgttgtggccttcctgaactgggaagtccctggctggcccccgggggagaggggcaaatgcctccgggactgacactccaggcagctttgccttctctcccctgtcatttccagatttcattacctcctacttgccattcacccatcaatgtgaaagtcagggtcacagctggtctgtgtgtccagttccctaaaagcctgttctgttgggcagcctgaggctgttgcccgaatcctagttcagttttttgacttcctttgccctttttcccttttctccatgcttaatggtgtgaggcgtcaggagagaggccaagtacataaaaaaaaaaaaaagcagattatctctagagagtttgagcctttgctggtcacattgccttctgaagaggagggagtattagattataaatcctctttattttggtcctttatgcttgaggttccaacctggagccacagtgtgtgagaggaggaggagagggagaattctgttctcccagagctgcacctgcctcgcagaggccagcaccccactctcctgcctccagtggccctgccgcagatgtctcccaaaaagttgagcctttctagatggcttaggtggcaccatggctcagcaggaggggcgggaggcaccagggttcttgtttggaccctgcccctgggccatggccaggtgaccatggctacattgccaaacctctgactgccacagctgcagactgagagggtgggtctgagtccccacaatgtctgaagctgcccctgggattctcaggccaacctgccaacagcaagcggattttcttgcaagatcagggaccccatttctgcagccagtgtctcctgggtgccttctgaggactcccacccccatcccagtatctcatctgtcccctctcctggggcttaagtgggttgcttccaggcagaagcagccaaggaccgattccaggcactttctgtagcaaatgactgtgaattacgacttctcttgcccttcttctagcagtctgtgcctcctctctgaccagtttggagggcactgaagaaaggcaagggccgtgctgctgctgggcggggcaggagaggagcctggccagtgtgccacattaaatacccgtgcaggcgcggagaagcaaccggcacccccttccggcctgaaagccctccctgcaagaaggtgtgcaggagagaagaggccccggcatggggatctgggttctagagggcatgtgatgactgtaaatgttcactgggtgggtagggagtggtatccagtgttcaagtgcagaaatctttggctttgctaccagttccatatgatgagaaataaacgttcgctgaggttttgtttcatactccctttttatgggctgtt

SEQ ID NO: 429489 - DNA, 3017 bp, Homo sapiens
cggggaccgcagcgggctgaactgctggtgtcagagcccggcgagcgctggcagttccgcggcggggatgctgaggagcgctgggtccgggagcagccctggcccctgcggacttccgaggccgtgaaaacccctgcgctgcggcccttcccaggcccccgaggccgttcgccgttcccgaagcccgactgggggaagagtccagcaccaaagcggccgttctcggattccggagcgttctggagccccgagagacgccccggggttctagaagctccccggcggcgcccagtcccggcttcattcgggcgtccctccgaaacccactcgggtgcacgggtcgtcggcgagccgcgaccgggtcctggcgcgcaccatgatcgtggcggactccgagtgccgcgcagagctcaaggactacctgcggttcgccccgggcggcgtcggcgactcgggccccggagaggagcagagggagagccgggctcggcgaggccctcgagggcccagcgccttcatccccgtggaggaggtccttcgggagggggctgagagcctcgagcagcacctggggctggaggcactgatgtcctctgggcgagtagacaacctggcagtggtgatgggcctgcaccctgactactttaccagcttctggcgcctgcactacctgctgctgcacacggatggtcccttggccagctcctggcgccactacattgccatcatggctgccgcccgccatcagtgttcttacctggtaggctcccacatggccgagtttctgcagactggtggtgaccctgagtggctgctgggcctccaccgggcccccgagaagctgcgcaaactcagcgagatcaacaagttgctggcgcatcggccatggctcatcaccaaggaacacatccaggccttgctgaagaccggcgagcacacttggtccctggccgagctcattcaggctctggtcctgctcacccactgccactcgctctcctccttcgtgtttggctgtggcatcctccctgagggggatgcagatggcagccctgccccccaggcacctacaccccctagtgaacagagcagccccccaagcagggacccgttgaacaactctgggggctttgagtctgcccgcgacgtggaggcgctgatggagcgcatgcagcagctgcaggagagcctgctgcgggatgaggggacgtcccaggaggagatggagagccgctttgagctggagaagtcagagagcctgctggtgaccccctcagctgacatcctggagccctctccacacccagacatgctgtgctttgtggaagaccctactttcggatatgaggattctctgtctggagacagccccagacccttttgtgtcccatgcccaccctccccacgctgcagtgggcttgtgtgtgatgtgcagtcccgaagccacaccctcccttttcctcactggaatggacagttcattgcactgactctgggatctcagccctgctcctgggagctggaagagcacttggagatcctaagggaccacacccttcctccttcccctgcccacagaggcagagggcacaggaaagaagccgggccaagctcggaattaatgtgccacaagtgttgtggccttcctgaactgggaagtccctggctggcccccgggggagaggggcaaatgcctccgggactgacactccaggcagctttgccttctctcccctgtcatttccagatttcattacctcctacttgccattcacccatcaatgtgaaagtcagggtcacagctggtctgtgtgtccagttccctaaaagcctgttctgttgggcagcctgaggctgttgcccgaatcctagttcagttttttgacttcctttgccctttttcccttttctccatgcttaatggtgtgaggcgtcaggagagaggccaagtacataaaaaaaaaaaaaagcagattatctctagagagtttgagcctttgctggtcacattgccttctgaagaggagggagtattagattataaatcctctttattttggtcctttatgcttgaggttccaacctggagccacagtgtgtgagaggaggaggagagggagaattctgttctcccagagctgcacctgcctcgcagaggccagcaccccactctcctgcctccagtggccctgccgcagatgtctcccaaaaagttgagcctttctagatggcttaggtggcaccatggctcagcaggaggggcgggaggcaccagggttcttgtttggaccctgcccctgggccatggccaggtgaccatggctacattgccaaacctctgactgccacagctgcagactgagagggtgggtctgagtccccacaatgtctgaagctgcccctgggattctcaggccaacctgccaacagcaagcggattttcttgcaagatcagggaccccatttctgcagccagtgtctcctgggtgccttctgaggactcccacccccatcccagtatctcatctgtcccctctcctggggcttaagtgggttgcttccaggcagaagcagccaaggaccgattccaggcactttctgtagcaaatgactgtgaattacgacttctcttgcccttcttctagcagtctgtgcctcctctctgaccagtttggagggcactgaagaaaggcaagggccgtgctgctgctgggcggggcaggagaggagcctggccagtgtgccacattaaatacccgtgcaggcgcggagaagcaaccggcacccccttccggcctgaaagccctccctgcaagaaggtgtgcaggagagaagaggccccggcatggggatctgggttctagagggcatgtgatgactgtaaatgttcactgggtgggtagggagtggtatccagtgttcaagtgcagaaatctttggctttgctaccagttccatatgatgagaaataaacgttcgctgaggttttgtttcatactccctttttatgggctgtt

SEQ ID NO: 429490 - DNA, 450 bp, Homo sapiens
agcacctggggctggaggcactgatgtcctctgggcgagtagacaacctggcagtggtgatgggcctgcaccctgactactttaccagcttctggcgcctgcactacctgctgctgcacacggatggtcccttggccagctcctggcgccactacattgccatcatggtgagcctctctgggcctgacacttggagaggtggctttgtggtgggttctgtcctttgatctcttttctgggagctttgtgagctgattccatagacaagcagggaaagccctggctttatctaactgtagagttttgggttttttgtttttattttttctcagaaggaaaattttaggttttgaagaaaggcatcgttagtgcttgtgttaggtacagattggcaaactgaggtgcaaaaaggaatcaggtggcctgcaagctggtggcagagctggggtt

SEQ ID NO: 429491 - DNA, 992 bp, Homo sapiens
gcttgctgcttcctgaggccgcgtcagggtattgggttaggcagagatgctgaggcaaccctcatttcaccctcctcttcccctctggacacaagatacctgatacctggggctttctctcctgacatcgatgagagagtcacatttagggcagactagggacaccaggctttggactcagacctcctcagcatggcccaggccttgcatgctgaggctctgaaatccaggaaaaatggttgacctcatggacacttcctcaaactctctgcagcggatgtgattctggatccaaaaacagcaaaccccatcctccttgtttctgaggaccagaggagtgtgcagcgtgccaaggagccccaggatctgccagacaaccctgagagatttaattggcattattgtgttctcggctgtgagagcttcatatcagggagacattactgggaggtggaggtaggggacaggaaagagtggcatataggggtgtgcagtaagaatgtgcagagaaaaggctgggtcaaaatgacacctgagaatggattctggactatggggctgactgatgggaataagtatcggactctaactgagcccagaaccaacctgaaacttcctaagccccctaagaaagtgggggtcttcctggactatgagactggagatatctcattctacaatgctgtggatggatcgcatattcatactttcctggacgtctccttctctgaggctctatatcctgttttcagaattttgaccttggagcccacggccctgactatttgtccagcgtgaaaagaagaagagagttcctccaattctgaccgagtgctgatcattccctagagacaccagtaaccccgggcttagctaacgaaagtggggagcctcaggctgaagtaacttttctctgcttctccctgcccagctcagagctgagggcctccccctccacagcaaccaatcacaaccataaagctacaagcacg

SEQ ID NO: 429492 - DNA, 866 bp, Homo sapiens
  misc_feature (770)..(770): n is a, c, g, or t
  misc_feature (816)..(816): n is a, c, g, or t
  misc_feature (853)..(853): n is a, c, g, or t
gttattattcctcacgatgacccgacagtctctgctttctttttcctttcttccagaaggagatttaaccatagtagaaagaatggagaactattaactgcctttcttctgtgggctgtgattttcagaggggaatgctaagaggtgattttcaatgttgggactcaaaggtgaagacactgaaggacagaatttttggcagaggaaagatcttcttcggtcaccatacttgagttagctctagggaagtggaggtttccatttggaattctatagcttcttccaggtcatagtgtctgccccccaccttccagtatctcctgatatgcagcatgaatgaaaatggcaagtttcctggccttccttctgctcaactttcgtgtctgcctccttttgcttcagctgctcatgcctcactcagctcagttttctgtgcttggaccctctgggcccatcctggccatggtgggtgaagacgctgatctgccctgtcacctgttcccgaccatgagtgcagagaccatggagctgaagtgggtaagttccagcctaaggcaggtggtgaacgtgtatgcagatggaaaggaagtggaagacaggcagagtgcaccgtatcgagggagaacttcgattctgcgggatggcatcactgcagggaaggctgctctccgaatacacaacgtcacagcctctgacagtggaaagtacctgtgttatttccaagatggtgacttctatgaaaaagccctggtggagctgaaggttgcagncactggggttctgaaccttcacgttgaatgtgaaagggttaccaanggattggaaggggatcccatctgggaaatgccaggtnccacttggcttgg

SEQ ID NO: 429493 - DNA, 611 bp, Homo sapiens
cctcatgagatagattccgtgccctgtgacctggggtgagcagctaacacttggggcgctgcagtctggggaggctgagtgcaccggcccccatgacccacagccgttgccttcacaaccccttcttcaggagcgcccagaggtggatcgccgccctggcagggaccctgcctgtcttgctgctgcttcttgggggagccggttacttcctgtggcaacagcaggaggaaaaaaagactcagttcagaaagaaaaagagagagcaagagttgagagaaatggcatggagcacaatgaagcaagaacaaagcacaagagtgaagctcctggaggaactcagtaagttcccattcccccagagacccaggcatgtcttcctgtccctgctttatgcgccttgatgcatcttcccctgttccttccgttgcaggatggagaagtatccagtatgcatctcgtaagtgcctctgacattttctctgaatttgaatctataactgtctgtgcttgaatagtttccactcttaactctttccccaaggttgggaagtggtcttagatccctttgactaaggaaagaaaatagatgtgccaattcctagtcattgcca

SEQ ID NO: 429494 - DNA, 679 bp, Homo sapiens
gcatgttccctggaccaacaacctgagggactatattcctttttccttttttcttctccaactcttgtgatttggagcagaaaagttcccttgacttccttcgtgggtaggaagacgcataaagggtggaggtgaagggaaggagacacacactgagtaatactgcagggagagtgaggatggaaatgccaaggagaggaggtgatgcctgcccaaagaactttgtccttcccaggcttctcatgccacctactgcctgtatctcctcaaaggatttaatgcttccaagctttggcctccacatttttagatgatgattgcaatctgtttttcatgggggttgaggtgaagactgaaggaataatgaacatgcttggcagaaacctagcaagaaatagatggtgagctcaaactgggtagttggacaaggtttccagaaagaagggttaagggaaagcaacaaggaaaagtgcagtgcccccatggttcccaacagtggggagctgtctccacccctagcctgggagggctaaaaaggggaggcaattactggaacccagagaaagaggtagcttaacgagggagcttcctgagaagagtcctcgggccttgttagagcaccaccagctgctgctggcagggaggaagcaggaaattaaacggtgtgtatctcctttct

SEQ ID NO: 429495 - DNA, 192 bp, Homo sapiens
cttattttccttctttatcgcttattttccttctttgttaaaccaatattcctttcaactgctgcctgctagggaaaaactactcctcattatcatcattattattgctctccactgtatcccctctacctggcatgtgcttgtcaagttctagttgttcaataaatttgttaataatgctgactcttcaac

SEQ ID NO: 429496 - DNA, 521 bp, Homo sapiens
cctcatgagatagattccgtgccctgtgacctggggtgagcagctaacacttggggcgctgcagtctggggaggctgagtgcaccggcccccatgacccacagccgttgccttcacaaccccttcttcaggagcgcccagaggtggatcgccgccctggcagggaccctgcctgtcttgctgctgcttcttgggggagccggttacttcctgtggcaacagcaggaggaaaaaaagactcagttcagaaagaaaaagagagagcaagagttgagagaaatggcatggagcacaatgaagcaagaacaaagcacaagaggtagctgaccttgggagtttatgatggagaagtatccagtatgcatctcgtaagtgcctctgacattttctctgaatttgaatctataactgtctgtgcttgaatagtttccactcttaactctttccccaaggttgggaagtggtcttagatccctttgactaaggaaagaaaatagatgtgccaattcctagtcattgcca

SEQ ID NO: 429497 - DNA, 3774 bp, Homo sapiens
ctcttactgtttctcatggtgagaagacaatatttgctttctctttttcctttcttccggatgagaggctaagccataatagaaagaatggagaattattgattgaccgtctttattctgtgggctctgattctccaatgggaataccaagggatggttttccatactggaacccaaaggtaaagacactcaaggacagacatttttggcagagcatagatgaaaatggcaagttccctggctttccttctgctcaactttcatgtctccctcctcttggtccagctgctcactccttgctcagctcagttttctgtgcttggaccctctgggcccatcctggccatggtgggtgaagacgctgatctgccctgtcacctgttcccgaccatgagtgcagagaccatggagctgaagtgggtaagttccagcctaaggcaggtggtgaacgtgtatgcagatggaaaggaagtggaagacaggcagagtgcaccgtatcgagggagaacttcgattctgcgggatggcatcactgcagggaaggctgctctccgaatacacaacgtcacagcctctgacagtggaaagtacttgtgttatttccaagatggtgacttctatgaaaaagccctggtggagctgaaggttgcagcactgggttctaatcttcacgtcgaagtgaagggttatgaggatggagggatccatctggagtgcaggtccaccggctggtacccccaaccccaaatacagtggagcaacgccaagggagagaacatcccagctgtggaagcacctgtggttgcagatggagtgggcctatatgaagtagcagcatctgtgatcatgagaggcggctccggggagggtgtatcctgcatcatcagaaattccctcctcggcctggaaaagacagccagcatttccatcgcagaccccttcttcaggagcgcccagccctggatcgcagccctggcagggaccctgcctatcttgctgctgcttctcgccggagccagttacttcttgtggagacaacagaaggaaataactgctctgtccagtgagatagaaagtgagcaagagatgaaagaaatgggatatgctgcaacagagcgggaaataagcctaagagagagcctccaggaggaactcaagaggaaaaaaatccagtacttgactcgtggagaggagtcttcgtccgataccaataagtcagcctgatgctctaatggaaaaatggccctcttcaagcctggtgaggaaatgcttcagatgaggctccaccttgttaaataaattggatgtatggaaaaatagactgcagaaaaggggaactcatttagctcacgagtggtcgagtgaagattgaaaattaacctctgagggccagcacagcagctcatgcctgtaatcctagcactttggaaggctgaggagggcggatcacaaggtcaggagatcaagaccatcctggctaacacggtgaaaccccgtctctactaaaaatacaaaaaataaaaaattagccgggcatggtgacgggcacctgtagtcccagctactcgggaggctgaggcaggagaatggcatgaacccggaaggcagagcttgcagtgagccgagatcacgccactgcactccagcctgggagacagagcgagactctgtctcaagaaaaaaaaaaaaaaaaaaaaagaaaagaaaattaacctctgagtataaagcatcagtgggcagaatcaatgtggggagggaaacaacaaaaatgtagaaagaggatccttgttgcttcttggggccgcatcagggtattgggttaggcagatactgaccttactttcatttcccctctggtcactagacccctggggctttcaccaatgacattgatgagagaatcacattcagggcaggctagggacacggggttctggaaggacctcctcagcatggcccaagccttgcatgctgtggctcttaaatccaggaaaaatggctgaccccatggacacctcctcaaactctctgcagcagatgtaattctgtatccagacatggcaaatgccatcctccttgtttctgaggaccagaggagtgtacagcgtgctgaggagccccatgacctaccagacaaccctgagagatttgaatggcgttactgtgtgcttggctgtgaaagcttcatgtcagagagacactactgggaggtggaagtgggggacagaaaagagtggcatattggggtatgtagtaagaacgtggagaggaaaaaagtttgggtcaaaatgacaccggagaacggatactggactatgggcctgactgatgggaataagtatcgggctctcactgagcccagaaccaacctgaaacttcctgagcctcctaggaaagtgggggtcatcctggactatgagactggacatatctcgttctacaatgccacggatggatctcatatctacacatttctgcacgcctcttcctctgagcctctgtatcctgtattcagaattttgaccttggagcccactgccctgaccgtttgcccaataccaaaagtagagagttcccccgatcccgacctagtgcctgatcattccctggagataccactgaccccaggcttagctaatgaaagtggggagcctcaggctgaagtaacatctctgcttctccctgcccagcctggagctaagggtctcaccctccacaacagccagtcagaaccataaagctacaggcacacactgaagcactttactgatattcattcaattattccataggacagttgtttgagtttggtgccaccttattggcccctttatacagataaggaaactggggtgtagaaaagtgtattgactttacaaagcagacaggaatagtgaacaacagagctgggatctgaacaacaatgactaacattaatggagaatttaaaacgttctgagtgctgtgttatgagctttggtgggtgtcactcctttaatcctcacaacaccctgtcaggtagtctcatttggcaagtatggaagcagaggcagggcaacattaagtagcttacataactcacacggtaatttgtgcagttgggagatgttcagcttcagtccctggccaattgcccgttcttttccagcctgatttttcctgcatgggaagagcccacatgtagccctgaggttcccttcccaggacagctccaggatcgagatcactgtgagtggttgtggagttaagacccctatggactccttcccagctgattatcagagccttagacccagcactccttggattggctctgcagagtgtcttggttgagagaataacgttgcagttcccacagggcatgtgactttgaaagagactagaggccacactcagttaataatggggcacagatgtgttcccacccaacaaatgtgataagtgatcgtgcagccagagccagccttccttcagtcaaggtttccaggcagagcaaataccctagagattctctgtaatattggtaatttggatgaaggaagctagaagaattacagggatgtttttaatcccactatggactcagtctcctggaaaaggatctgtccactcctggtcattggtggatgttaaacccatattcctttcaactgctgcctgctagggaaaactgctcctcattatcatcactattattgctcaccactgtatcccctctactgggcaagtgcttgtcaagttctagttgttcaataaatttgttaataatgctga

SEQ ID NO: 429498 - DNA, 3720 bp, Homo sapiens
ctcttactgtttctcatggtgagaagacaatatttgctttctctttttcctttcttccggatgagaggctaagccataatagaaagaatggagaattattgattgaccgtctttattctgtgggctctgattctccaatgggaataccaagggatggttttccatactggaacccaaaggtaaagacactcaaggacagacatttttggcagagcatagatgaaaatggcaagttccctggctttccttctgctcaactttcatgtctccctcctcttggtccagctgctcactccttgctcagctcagttttctgtgcttggaccctctgggcccatcctggccatggtgggtgaagacgctgatctgccctgtcacctgttcccgaccatgagtgcagagaccatggagctgaagtgggtaagttccagcctaaggcaggtggtgaacgtgtatgcagatggaaaggaagtggaagacaggcagagtgcaccgtatcgagggagaacttcgattctgcgggatggcatcactgcagggaaggctgctctccgaatacacaacgtcacagcctctgacagtggaaagtacttgtgttatttccaagatggtgacttctatgaaaaagccctggtggagctgaaggttgcagcactgggttctaatcttcacgtcgaagtgaagggttatgaggatggagggatccatctggagtgcaggtccaccggctggtacccccaaccccaaatacagtggagcaacgccaagggagagaacatcccagctgtggaagcacctgtggttgcagatggagtgggcctatatgaagtagcagcatctgtgatcatgagaggcggctccggggagggtgtatcctgcatcatcagaaattccctcctcggcctggaaaagacagccagcatttccatcgcagaccccttcttcaggagcgcccagccctggatcgcagccctggcagggaccctgcctatcttgctgctgcttctcgccggagccagttacttcttgtggagacaacagaaggaaataactgctctgtccagtgagatagaaagtgagcaagagatgaaagaaatgggatatgctgcaacagagcgggaaataagcctaagagagagcctccaggaggaactcaagaggaaaaaaatccagtacttgactcgtggagaggagtcttcgtccgataccaataagtcagcctgatgctctaatggaaaaatggccctcttcaagcctggtgaggaaatgcttcagatgaggctccaccttgttaaataaattggatgtatggaaaaatagactgcagaaaaggggaactcatttagctcacgagtggtcgagtgaagattgaaaattaacctctgagggccagcacagcagctcatgcctgtaatcctagcactttggaaggctgaggagggcggatcacaaggtcaggagatcaagaccatcctggctaacacggtgaaaccccgtctctactaaaaatacaaaaaataaaaaattagccgggcatggtgacgggcacctgtagtcccagctactcgggaggctgaggcaggagaatggcatgaacccggaaggcagagcttgcagtgagccgagatcacgccactgcactccagcctgggagacagagcgagactctgtctcaagaaaaaaaaaaaaaaaaaaaaagaaaagaaaattaacctctgagtataaagcatcagtgggcagaatcaatgtggggagggaaacaacaaaaatgtagaaagaggatccttgttgcttcttggggccgcatcagggtattgggttaggcagatactgaccttactttcatttcccctctggtcactagacccctggggctttcaccaatgacattgatgagagaatcacattcagggcaggctagggacacggggttctggaaggacctcctcagcatggcccaagccttgcatgctgtggctcttaaatccaggaaaaatggctgaccccatggacacctcctcaaactctctgcagcagatgtaattctgtatccagacatggcaaatgccatcctccttgtttctgaggaccagaggagtgtacagcgtgctgaggagccccatgacctaccagacaaccctgagagatttgaatggcgttactgtgtgcttggctgtgaaagcttcatgtcagagagacactactgggaggtggaagtgggggacagaaaagagtggcatattggggtatgtagtaagaacgtggagaggaaaaaagtttgggtcaaaatgacaccggagaacggatactggactatgggcctgactgatgggaataagtatcgggctctcactgagcccagaaccaacctgaaacttcctgagcctcctaggaaagtgggggtcatcctggactatgagactggacatatctcgttctacaatgccacggatggatctcatatctacacatttctgcacgcctcttcctctgagcctctgtatcctgtattcagaattttgaccttggagcccactgccctgaccgtttgcccaataccaacactgaccccaggcttagctaatgaaagtggggagcctcaggctgaagtaacatctctgcttctccctgcccagcctggagctaagggtctcaccctccacaacagccagtcagaaccataaagctacaggcacacactgaagcactttactgatattcattcaattattccataggacagttgtttgagtttggtgccaccttattggcccctttatacagataaggaaactggggtgtagaaaagtgtattgactttacaaagcagacaggaatagtgaacaacagagctgggatctgaacaacaatgactaacattaatggagaatttaaaacgttctgagtgctgtgttatgagctttggtgggtgtcactcctttaatcctcacaacaccctgtcaggtagtctcatttggcaagtatggaagcagaggcagggcaacattaagtagcttacataactcacacggtaatttgtgcagttgggagatgttcagcttcagtccctggccaattgcccgttcttttccagcctgatttttcctgcatgggaagagcccacatgtagccctgaggttcccttcccaggacagctccaggatcgagatcactgtgagtggttgtggagttaagacccctatggactccttcccagctgattatcagagccttagacccagcactccttggattggctctgcagagtgtcttggttgagagaataacgttgcagttcccacagggcatgtgactttgaaagagactagaggccacactcagttaataatggggcacagatgtgttcccacccaacaaatgtgataagtgatcgtgcagccagagccagccttccttcagtcaaggtttccaggcagagcaaataccctagagattctctgtaatattggtaatttggatgaaggaagctagaagaattacagggatgtttttaatcccactatggactcagtctcctggaaaaggatctgtccactcctggtcattggtggatgttaaacccatattcctttcaactgctgcctgctagggaaaactgctcctcattatcatcactattattgctcaccactgtatcccctctactgggcaagtgcttgtcaagttctagttgttcaataaatttgttaataatgctga

SEQ ID NO: 429499 - DNA, 4056 bp, Homo sapiens
ctcttactgtttctcatggtgagaagacaatatttgctttctctttttcctttcttccggatgagaggctaagccataatagaaagaatggagaattattgattgaccgtctttattctgtgggctctgattctccaatgggaataccaagggatggttttccatactggaacccaaaggtaaagacactcaaggacagacatttttggcagagcatagatgaaaatggcaagttccctggctttccttctgctcaactttcatgtctccctcctcttggtccagctgctcactccttgctcagctcagttttctgtgcttggaccctctgggcccatcctggccatggtgggtgaagacgctgatctgccctgtcacctgttcccgaccatgagtgcagagaccatggagctgaagtgggtaagttccagcctaaggcaggtggtgaacgtgtatgcagatggaaaggaagtggaagacaggcagagtgcaccgtatcgagggagaacttcgattctgcgggatggcatcactgcagggaaggctgctctccgaatacacaacgtcacagcctctgacagtggaaagtacttgtgttatttccaagatggtgacttctatgaaaaagccctggtggagctgaaggttgcagcactgggttctaatcttcacgtcgaagtgaagggttatgaggatggagggatccatctggagtgcaggtccaccggctggtacccccaaccccaaatacagtggagcaacgccaagggagagaacatcccagctgtggaagcacctgtggttgcagatggagtgggcctatatgaagtagcagcatctgtgatcatgagaggcggctccggggagggtgtatcctgcatcatcagaaattccctcctcggcctggaaaagacagccagcatttccatcgcagaccccttcttcaggagcgcccagccctggatcgcagccctggcagggaccctgcctatcttgctgctgcttctcgccggagccagttacttcttgtggagacaacagaaggaaataactgctctgtccagtgagatagaaagtgagcaagagatgaaagaaatgggatatgctgcaacagagcgggaaataagcctaagagagagcctccaggaggaactcaagaggaaaaaaatccagtacttgactcgtggagaggagtcttcgtccgataccaataagtcagcctgatgctctaatggaaaaatggccctcttcaagcctgggcctcccattggccaaacacagcagcaaaccagaggacaagggagcccagtggcactgtccatagaggacagattcctggggtccagaagagggtggagaaagctgaaggctggagagtgaatctagggcatataaggccccacacagagcccagcacagagacggccttgcagctatcaggaagatgaggagcttccttcatggcctgctgtgggctgagtaaataatatgattgccttctacagcgctagagattcatatgtttatccccatttttcaggtgaggaaatgcttcagatgaggctccaccttgttaaataaattggatgtatggaaaaatagactgcagaaaaggggaactcatttagctcacgagtggtcgagtgaagattgaaaattaacctctgagggccagcacagcagctcatgcctgtaatcctagcactttggaaggctgaggagggcggatcacaaggtcaggagatcaagaccatcctggctaacacggtgaaaccccgtctctactaaaaatacaaaaaataaaaaattagccgggcatggtgacgggcacctgtagtcccagctactcgggaggctgaggcaggagaatggcatgaacccggaaggcagagcttgcagtgagccgagatcacgccactgcactccagcctgggagacagagcgagactctgtctcaagaaaaaaaaaaaaaaaaaaaaagaaaagaaaattaacctctgagtataaagcatcagtgggcagaatcaatgtggggagggaaacaacaaaaatgtagaaagaggatccttgttgcttcttggggccgcatcagggtattgggttaggcagatactgaccttactttcatttcccctctggtcactagacccctggggctttcaccaatgacattgatgagagaatcacattcagggcaggctagggacacggggttctggaaggacctcctcagcatggcccaagccttgcatgctgtggctcttaaatccaggaaaaatggctgaccccatggacacctcctcaaactctctgcagcagatgtaattctgtatccagacatggcaaatgccatcctccttgtttctgaggaccagaggagtgtacagcgtgctgaggagccccatgacctaccagacaaccctgagagatttgaatggcgttactgtgtgcttggctgtgaaagcttcatgtcagagagacactactgggaggtggaagtgggggacagaaaagagtggcatattggggtatgtagtaagaacgtggagaggaaaaaagtttgggtcaaaatgacaccggagaacggatactggactatgggcctgactgatgggaataagtatcgggctctcactgagcccagaaccaacctgaaacttcctgagcctcctaggaaagtgggggtcatcctggactatgagactggacatatctcgttctacaatgccacggatggatctcatatctacacatttctgcacgcctcttcctctgagcctctgtatcctgtattcagaattttgaccttggagcccactgccctgaccgtttgcccaataccaaaagtagagagttcccccgatcccgacctagtgcctgatcattccctggagataccactgaccccaggcttagctaatgaaagtggggagcctcaggctgaagtaacatctctgcttctccctgcccagcctggagctaagggtctcaccctccacaacagccagtcagaaccataaagctacaggcacacactgaagcactttactgatattcattcaattattccataggacagttgtttgagtttggtgccaccttattggcccctttatacagataaggaaactggggtgtagaaaagtgtattgactttacaaagcagacaggaatagtgaacaacagagctgggatctgaacaacaatgactaacattaatggagaatttaaaacgttctgagtgctgtgttatgagctttggtgggtgtcactcctttaatcctcacaacaccctgtcaggtagtctcatttggcaagtatggaagcagaggcagggcaacattaagtagcttacataactcacacggtaatttgtgcagttgggagatgttcagcttcagtccctggccaattgcccgttcttttccagcctgatttttcctgcatgggaagagcccacatgtagccctgaggttcccttcccaggacagctccaggatcgagatcactgtgagtggttgtggagttaagacccctatggactccttcccagctgattatcagagccttagacccagcactccttggattggctctgcagagtgtcttggttgagagaataacgttgcagttcccacagggcatgtgactttgaaagagactagaggccacactcagttaataatggggcacagatgtgttcccacccaacaaatgtgataagtgatcgtgcagccagagccagccttccttcagtcaaggtttccaggcagagcaaataccctagagattctctgtaatattggtaatttggatgaaggaagctagaagaattacagggatgtttttaatcccactatggactcagtctcctggaaaaggatctgtccactcctggtcattggtggatgttaaacccatattcctttcaactgctgcctgctagggaaaactgctcctcattatcatcactattattgctcaccactgtatcccctctactgggcaagtgcttgtcaagttctagttgttcaataaatttgttaataatgctga

SEQ ID NO: 429500 - DNA, 3573 bp, Homo sapiens
ctcttactgtttctcatggtgagaagacaatatttgctttctctttttcctttcttccggatgagaggctaagccataatagaaagaatggagaattattgattgaccgtctttattctgtgggctctgattctccaatgggaataccaagggatggttttccatactggaacccaaaggtaaagacactcaaggacagacatttttggcagagcatagatgaaaatggcaagttccctggctttccttctgctcaactttcatgtctccctcctcttggtccagctgctcactccttgctcagctcagttttctgtgcttggaccctctgggcccatcctggccatggtgggtgaagacgctgatctgccctgtcacctgttcccgaccatgagtgcagagaccatggagctgaagtgggtaagttccagcctaaggcaggtggtgaacgtgtatgcagatggaaaggaagtggaagacaggcagagtgcaccgtatcgagggagaacttcgattctgcgggatggcatcactgcagggaaggctgctctccgaatacacaacgtcacagcctctgacagtggaaagtacttgtgttatttccaagatggtgacttctatgaaaaagccctggtggagctgaaggttgcagcactgggttctaatcttcacgtcgaagtgaagggttatgaggatggagggatccatctggagtgcaggtccaccggctggtacccccaaccccaaatacagtggagcaacgccaagggagagaacatcccagctgtggaagcacctgtggttgcagatggagtgggcctatatgaagtagcagcatctgtgatcatgagaggcggctccggggagggtgtatcctgcatcatcagaaattccctcctcggcctggaaaagacagccagcatttccatcgcagagagcctccaggaggaactcaagaggaaaaaaatccagtacttgactcgtggagaggagtcttcgtccgataccaataagtcagcctgatgctctaatggaaaaatggccctcttcaagcctggtgaggaaatgcttcagatgaggctccaccttgttaaataaattggatgtatggaaaaatagactgcagaaaaggggaactcatttagctcacgagtggtcgagtgaagattgaaaattaacctctgagggccagcacagcagctcatgcctgtaatcctagcactttggaaggctgaggagggcggatcacaaggtcaggagatcaagaccatcctggctaacacggtgaaaccccgtctctactaaaaatacaaaaaataaaaaattagccgggcatggtgacgggcacctgtagtcccagctactcgggaggctgaggcaggagaatggcatgaacccggaaggcagagcttgcagtgagccgagatcacgccactgcactccagcctgggagacagagcgagactctgtctcaagaaaaaaaaaaaaaaaaaaaaagaaaagaaaattaacctctgagtataaagcatcagtgggcagaatcaatgtggggagggaaacaacaaaaatgtagaaagaggatccttgttgcttcttggggccgcatcagggtattgggttaggcagatactgaccttactttcatttcccctctggtcactagacccctggggctttcaccaatgacattgatgagagaatcacattcagggcaggctagggacacggggttctggaaggacctcctcagcatggcccaagccttgcatgctgtggctcttaaatccaggaaaaatggctgaccccatggacacctcctcaaactctctgcagcagatgtaattctgtatccagacatggcaaatgccatcctccttgtttctgaggaccagaggagtgtacagcgtgctgaggagccccatgacctaccagacaaccctgagagatttgaatggcgttactgtgtgcttggctgtgaaagcttcatgtcagagagacactactgggaggtggaagtgggggacagaaaagagtggcatattggggtatgtagtaagaacgtggagaggaaaaaagtttgggtcaaaatgacaccggagaacggatactggactatgggcctgactgatgggaataagtatcgggctctcactgagcccagaaccaacctgaaacttcctgagcctcctaggaaagtgggggtcatcctggactatgagactggacatatctcgttctacaatgccacggatggatctcatatctacacatttctgcacgcctcttcctctgagcctctgtatcctgtattcagaattttgaccttggagcccactgccctgaccgtttgcccaataccaaaagtagagagttcccccgatcccgacctagtgcctgatcattccctggagataccactgaccccaggcttagctaatgaaagtggggagcctcaggctgaagtaacatctctgcttctccctgcccagcctggagctaagggtctcaccctccacaacagccagtcagaaccataaagctacaggcacacactgaagcactttactgatattcattcaattattccataggacagttgtttgagtttggtgccaccttattggcccctttatacagataaggaaactggggtgtagaaaagtgtattgactttacaaagcagacaggaatagtgaacaacagagctgggatctgaacaacaatgactaacattaatggagaatttaaaacgttctgagtgctgtgttatgagctttggtgggtgtcactcctttaatcctcacaacaccctgtcaggtagtctcatttggcaagtatggaagcagaggcagggcaacattaagtagcttacataactcacacggtaatttgtgcagttgggagatgttcagcttcagtccctggccaattgcccgttcttttccagcctgatttttcctgcatgggaagagcccacatgtagccctgaggttcccttcccaggacagctccaggatcgagatcactgtgagtggttgtggagttaagacccctatggactccttcccagctgattatcagagccttagacccagcactccttggattggctctgcagagtgtcttggttgagagaataacgttgcagttcccacagggcatgtgactttgaaagagactagaggccacactcagttaataatggggcacagatgtgttcccacccaacaaatgtgataagtgatcgtgcagccagagccagccttccttcagtcaaggtttccaggcagagcaaataccctagagattctctgtaatattggtaatttggatgaaggaagctagaagaattacagggatgtttttaatcccactatggactcagtctcctggaaaaggatctgtccactcctggtcattggtggatgttaaacccatattcctttcaactgctgcctgctagggaaaactgctcctcattatcatcactattattgctcaccactgtatcccctctactgggcaagtgcttgtcaagttctagttgttcaataaatttgttaataatgctga

SEQ ID NO: 429501 - DNA, 3855 bp, Homo sapiens
ctcttactgtttctcatggtgagaagacaatatttgctttctctttttcctttcttccggatgagaggctaagccataatagaaagaatggagaattattgattgaccgtctttattctgtgggctctgattctccaatgggaataccaagggatggttttccatactggaacccaaaggtaaagacactcaaggacagacatttttggcagagcatagatgaaaatggcaagttccctggctttccttctgctcaactttcatgtctccctcctcttggtccagctgctcactccttgctcagctcagttttctgtgcttggaccctctgggcccatcctggccatggtgggtgaagacgctgatctgccctgtcacctgttcccgaccatgagtgcagagaccatggagctgaagtgggtaagttccagcctaaggcaggtggtgaacgtgtatgcagatggaaaggaagtggaagacaggcagagtgcaccgtatcgagggagaacttcgattctgcgggatggcatcactgcagggaaggctgctctccgaatacacaacgtcacagcctctgacagtggaaagtacttgtgttatttccaagatggtgacttctatgaaaaagccctggtggagctgaaggttgcagcactgggttctaatcttcacgtcgaagtgaagggttatgaggatggagggatccatctggagtgcaggtccaccggctggtacccccaaccccaaatacagtggagcaacgccaagggagagaacatcccagctgtggaagcacctgtggttgcagatggagtgggcctatatgaagtagcagcatctgtgatcatgagaggcggctccggggagggtgtatcctgcatcatcagaaattccctcctcggcctggaaaagacagccagcatttccatcgcagagagcctccaggaggaactcaagaggaaaaaaatccagtacttgactcgtggagaggagtcttcgtccgataccaataagtcagcctgatgctctaatggaaaaatggccctcttcaagcctgggcctcccattggccaaacacagcagcaaaccagaggacaagggagcccagtggcactgtccatagaggacagattcctggggtccagaagagggtggagaaagctgaaggctggagagtgaatctagggcatataaggccccacacagagcccagcacagagacggccttgcagctatcaggaagatgaggagcttccttcatggcctgctgtgggctgagtaaataatatgattgccttctacagcgctagagattcatatgtttatccccatttttcaggtgaggaaatgcttcagatgaggctccaccttgttaaataaattggatgtatggaaaaatagactgcagaaaaggggaactcatttagctcacgagtggtcgagtgaagattgaaaattaacctctgagggccagcacagcagctcatgcctgtaatcctagcactttggaaggctgaggagggcggatcacaaggtcaggagatcaagaccatcctggctaacacggtgaaaccccgtctctactaaaaatacaaaaaataaaaaattagccgggcatggtgacgggcacctgtagtcccagctactcgggaggctgaggcaggagaatggcatgaacccggaaggcagagcttgcagtgagccgagatcacgccactgcactccagcctgggagacagagcgagactctgtctcaagaaaaaaaaaaaaaaaaaaaaagaaaagaaaattaacctctgagtataaagcatcagtgggcagaatcaatgtggggagggaaacaacaaaaatgtagaaagaggatccttgttgcttcttggggccgcatcagggtattgggttaggcagatactgaccttactttcatttcccctctggtcactagacccctggggctttcaccaatgacattgatgagagaatcacattcagggcaggctagggacacggggttctggaaggacctcctcagcatggcccaagccttgcatgctgtggctcttaaatccaggaaaaatggctgaccccatggacacctcctcaaactctctgcagcagatgtaattctgtatccagacatggcaaatgccatcctccttgtttctgaggaccagaggagtgtacagcgtgctgaggagccccatgacctaccagacaaccctgagagatttgaatggcgttactgtgtgcttggctgtgaaagcttcatgtcagagagacactactgggaggtggaagtgggggacagaaaagagtggcatattggggtatgtagtaagaacgtggagaggaaaaaagtttgggtcaaaatgacaccggagaacggatactggactatgggcctgactgatgggaataagtatcgggctctcactgagcccagaaccaacctgaaacttcctgagcctcctaggaaagtgggggtcatcctggactatgagactggacatatctcgttctacaatgccacggatggatctcatatctacacatttctgcacgcctcttcctctgagcctctgtatcctgtattcagaattttgaccttggagcccactgccctgaccgtttgcccaataccaaaagtagagagttcccccgatcccgacctagtgcctgatcattccctggagataccactgaccccaggcttagctaatgaaagtggggagcctcaggctgaagtaacatctctgcttctccctgcccagcctggagctaagggtctcaccctccacaacagccagtcagaaccataaagctacaggcacacactgaagcactttactgatattcattcaattattccataggacagttgtttgagtttggtgccaccttattggcccctttatacagataaggaaactggggtgtagaaaagtgtattgactttacaaagcagacaggaatagtgaacaacagagctgggatctgaacaacaatgactaacattaatggagaatttaaaacgttctgagtgctgtgttatgagctttggtgggtgtcactcctttaatcctcacaacaccctgtcaggtagtctcatttggcaagtatggaagcagaggcagggcaacattaagtagcttacataactcacacggtaatttgtgcagttgggagatgttcagcttcagtccctggccaattgcccgttcttttccagcctgatttttcctgcatgggaagagcccacatgtagccctgaggttcccttcccaggacagctccaggatcgagatcactgtgagtggttgtggagttaagacccctatggactccttcccagctgattatcagagccttagacccagcactccttggattggctctgcagagtgtcttggttgagagaataacgttgcagttcccacagggcatgtgactttgaaagagactagaggccacactcagttaataatggggcacagatgtgttcccacccaacaaatgtgataagtgatcgtgcagccagagccagccttccttcagtcaaggtttccaggcagagcaaataccctagagattctctgtaatattggtaatttggatgaaggaagctagaagaattacagggatgtttttaatcccactatggactcagtctcctggaaaaggatctgtccactcctggtcattggtggatgttaaacccatattcctttcaactgctgcctgctagggaaaactgctcctcattatcatcactattattgctcaccactgtatcccctctactgggcaagtgcttgtcaagttctagttgttcaataaatttgttaataatgctga

SEQ ID NO: 429502 - DNA, 3855 bp, Homo sapiens; identical to SEQ ID NO: 429501

SEQ ID NO: 429503 - DNA, 4100 bp, Homo sapiens
ctcttactgtttctcatggtgagaagacaatatttgctttctctttttcctttcttccggatgagaggctaagccataatagaaagaatggagaattattgattgaccgtctttattctgtgggctctgattctccaatgggaataccaagggatggttttccatactggaacccaaaggtaaagacactcaaggacagacatttttggcagagcatagatgaaaatggcaagttccctggctttccttctgctcaactttcatgtctccctcctcttggtccagctgctcactccttgctcagctcagttttctgtgcttggaccctctgggcccatcctggccatggtgggtgaagacgctgatctgccctgtcacctgttcccgaccatgagtgcagagaccatggagctgaagtgggtaagttccagcctaaggcaggtggtgaacgtgtatgcagatggaaaggaagtggaagacaggcagagtgcaccgtatcgagggagaacttcgattctgcgggatggcatcactgcagggaaggctgctctccgaatacacaacgtcacagcctctgacagtggaaagtacttgtgttatttccaagatggtgacttctatgaaaaagccctggtggagctgaaggttgcagcactgggttctaatcttcacgtcgaagtgaagggttatgaggatggagggatccatctggagtgcaggtccaccggctggtacccccaaccccaaatacagtggagcaacgccaagggagagaacatcccagctgtggaagcacctgtggttgcagatggagtgggcctatatgaagtagcagcatctgtgatcatgagaggcggctccggggagggtgtatcctgcatcatcagaaattccctcctcggcctggaaaagacagccagcatttccatcgcagaccccttcttcaggagcgcccagccctggatcgcagccctggcagggaccctgcctatcttgctgctgcttctcgccggagccagttacttcttgtggagacaacagaaggaaataactgctctgtccagtgagatagaaagtgagcaagagatgaaagaaatgggatatgctgcaacagagcgggaaataagcctaagagagagcctccaggaggaactcaagaggaaaaaaatccagtacttgactcgtggagaggagtcttcgtccgataccaataagtcagcctgatgctctaatggaaaaatggccctcttcaagcctggtgaggaaatgcttcagatgaggctccaccttgttaaataaattggatgtatggaaaaatagactgcagaaaaggggaactcatttagctcacgagtggtcgagtgaagattgaaaattaacctctgagggccagcacagcagctcatgcctgtaatcctagcactttggaaggctgaggagggcggatcacaaggtcaggagatcaagaccatcctggctaacacggtgaaaccccgtctctactaaaaatacaaaaaataaaaaattagccgggcatggtgacgggcacctgtagtcccagctactcgggaggctgaggcaggagaatggcatgaacccggaaggcagagcttgcagtgagccgagatcacgccactgcactccagcctgggagacagagcgagactctgtctcaagaaaaaaaaaaaaaaaaaaaaagaaaagaaaattaacctctgagtataaagcatcagtgggcagaatcaatgtggggagggaaacaacaaaaatgtagaaagaggatccttgttgcttcttggggccgcatcagggtattgggttaggcagatactgaccttactttcatttcccctctggtcactagacccctggggctttcaccaatgacattgatgagagaatcacattcagggcaggctagggacacggggttctggaaggacctcctcagcatggcccaagccttgcatgctgtggctcttaaatccaggaaaaatggctgaccccatggacacctcctcaaactctctgcagcagatgtaattctgtatccagacatggcaaatgccatcctccttgtttctgaggaccagaggagtgtacagcgtgctgaggagccccatgacctaccagacaaccctgagagatttgaatggcgttactgtgtgcttggctgtgaaagcttcatgtcagagagacactactgggaggtggaagtgggggacagaaaagagtggcatattggggtatgtagtaagaacgtggagaggaaaaaagtttgggtcaaaatgacaccggagaacggatactggactatgggcctgactgatgggaataagtatcgggctctcactgagcccagaaccaacctgaaacttcctgagcctcctaggaaagtgggggtcatcctggactatgagactggacatatctcgttctacaatgccacggatggatctcatatctacacatttctgcacgcctcttcctctgagcctctgtatcctgtattcagaattttgaccttggagcccactgccctgaccgtttgcccaataccaaaagtagagagttcccccgatcccgacctagtgcctgatcattccctggagataccactgaccccaggcttagctaatgaaagtggggagcctcaggctgaagtaacatctctgcttctccctgcccagcctggagctaagggtctcaccctccacaacagccagtcagaaccataaagctacaggcacacactgaagcactttactgatattcattcaattattccataggacagttgtttgagtttggtgccaccttattggcccctttatacagataaggaaactggggtgtagaaaagtgtattgactttacaaagcagacaggaatagtgaacaacagagctgggatctgaacaacaatgactaacattaatggagaatttaaaacgttctgagtgctgtgttatgagctttggtgggtgtcactcctttaatcctcacaacaccctgtcaggtagtctcatttggcaagtatggaagcagaggcagggcaacattaagtagcttacataactcacacggtaatttgtgcagttgggagatgttcagcttcagtccctggccaattgcccgttcttttccagcctgatttttcctgcatgggaagagcccacatgtagccctgaggttcccttcccaggacagctccaggatcgagatcactgtgagtggttgtggagttaagacccctatggactccttcccagctgattatcagagccttagacccagcactccttggattggctctgcagagtgtcttggttgagagaataacgttgcagttcccacagggcatgtgactttgaaagagactagaggccacactcagttaataatggggcacagatgtgttcccacccaacaaatgtgataagtgatcgtgcagccagagccagccttccttcagtcaaggtttccaggcagagcaaataccctagagattctctgtaatattggtaatttggatgaaggaagctagaagaattacagggatgtttttaatcccactatggactcagtctcctggaaaaggatctgtccactcctggtcattggtggatgttaaacccatattcctttcaactgctgcctgctagggaaaactgctcctcattatcatcactattattgctcaccactgtatcccctctactgggcaagtgcttgtcaagttctagttgttcaataaatttgttaataatgctgaaaaaaaaaaaaaaaaaaaaaaaaaaaaaaaaaaaatgtgtgggggggccggggcccggaaaagacttttgaagaaccatcgcgtggggggggcggcgggccccagtagaggttagagtgtgaaacgggggccataaggcgggtcccatagggaaaccgcgggccaggaacaagggcgcgggggattctctcccaccagataaaaaagcgcccggggggcaaaccagagcggtttcgtgaaacaaatcccagaaggggagctccgggggggccactagggggtctctatcaccggggattccaggcgaaccgaattcaaatagcgga

SEQ ID NO: 429504 - DNA, 3663 bp, Homo sapiens
ctcttactgtttctcatggtgagaagacaatatttgctttctctttttcctttcttccggatgagaggctaagccataatagaaagaatggagaattattgattgaccgtctttattctgtgggctctgattctccaatgggaataccaagggatggttttccatactggaacccaaaggtaaagacactcaaggacagacatttttggcagagcatagatgaaaatggcaagttccctggctttccttctgctcaactttcatgtctccctcctcttggtccagctgctcactccttgctcagctcagttttctgtgcttggaccctctgggcccatcctggccatggtgggtgaagacgctgatctgccctgtcacctgttcccgaccatgagtgcagagaccatggagctgaagtgggtaagttccagcctaaggcaggtggtgaacgtgtatgcagatggaaaggaagtggaagacaggcagagtgcaccgtatcgagggagaacttcgattctgcgggatggcatcactgcagggaaggctgctctccgaatacacaacgtcacagcctctgacagtggaaagtacttgtgttatttccaagatggtgacttctatgaaaaagccctggtggagctgaaggttgcagcactgggttctaatcttcacgtcgaagtgaagggttatgaggatggagggatccatctggagtgcaggtccaccggctggtacccccaaccccaaatacagtggagcaacgccaagggagagaacatcccagctgtggaagcacctgtggttgcagatggagtgggcctatatgaagtagcagcatctgtgatcatgagaggcggctccggggagggtgtatcctgcatcatcagaaattccctcctcggcctggaaaagacagccagcatttccatcgcagagagcctccaggaggaactcagtaagttaccattcccccagagatccagacatgtcttcctatcctcgctttgagcaccttgatgactcttccctgttcattccattgcagagaggaaaaaaatccagtacttgactcgtggagaggagtcttcgtccgataccaataagtcagcctgatgctctaatggaaaaatggccctcttcaagcctggtgaggaaatgcttcagatgaggctccaccttgttaaataaattggatgtatggaaaaatagactgcagaaaaggggaactcatttagctcacgagtggtcgagtgaagattgaaaattaacctctgagggccagcacagcagctcatgcctgtaatcctagcactttggaaggctgaggagggcggatcacaaggtcaggagatcaagaccatcctggctaacacggtgaaaccccgtctctactaaaaatacaaaaaataaaaaattagccgggcatggtgacgggcacctgtagtcccagctactcgggaggctgaggcaggagaatggcatgaacccggaaggcagagcttgcagtgagccgagatcacgccactgcactccagcctgggagacagagcgagactctgtctcaagaaaaaaaaaaaaaaaaaaaaagaaaagaaaattaacctctgagtataaagcatcagtgggcagaatcaatgtggggagggaaacaacaaaaatgtagaaagaggatccttgttgcttcttggggccgcatcagggtattgggttaggcagatactgaccttactttcatttcccctctggtcactagacccctggggctttcaccaatgacattgatgagagaatcacattcagggcaggctagggacacggggttctggaaggacctcctcagcatggcccaagccttgcatgctgtggctcttaaatccaggaaaaatggctgaccccatggacacctcctcaaactctctgcagcagatgtaattctgtatccagacatggcaaatgccatcctccttgtttctgaggaccagaggagtgtacagcgtgctgaggagccccatgacctaccagacaaccctgagagatttgaatggcgttactgtgtgcttggctgtgaaagcttcatgtcagagagacactactgggaggtggaagtgggggacagaaaagagtggcatattggggtatgtagtaagaacgtggagaggaaaaaagtttgggtcaaaatgacaccggagaacggatactggactatgggcctgactgatgggaataagtatcgggctctcactgagcccagaaccaacctgaaacttcctgagcctcctaggaaagtgggggtcatcctggactatgagactggacatatctcgttctacaatgccacggatggatctcatatctacacatttctgcacgcctcttcctctgagcctctgtatcctgtattcagaattttgaccttggagcccactgccctgaccgtttgcccaataccaaaagtagagagttcccccgatcccgacctagtgcctgatcattccctggagataccactgaccccaggcttagctaatgaaagtggggagcctcaggctgaagtaacatctctgcttctccctgcccagcctggagctaagggtctcaccctccacaacagccagtcagaaccataaagctacaggcacacactgaagcactttactgatattcattcaattattccataggacagttgtttgagtttggtgccaccttattggcccctttatacagataaggaaactggggtgtagaaaagtgtattgactttacaaagcagacaggaatagtgaacaacagagctgggatctgaacaacaatgactaacattaatggagaatttaaaacgttctgagtgctgtgttatgagctttggtgggtgtcactcctttaatcctcacaacaccctgtcaggtagtctcatttggcaagtatggaagcagaggcagggcaacattaagtagcttacataactcacacggtaatttgtgcagttgggagatgttcagcttcagtccctggccaattgcccgttcttttccagcctgatttttcctgcatgggaagagcccacatgtagccctgaggttcccttcccaggacagctccaggatcgagatcactgtgagtggttgtggagttaagacccctatggactccttcccagctgattatcagagccttagacccagcactccttggattggctctgcagagtgtcttggttgagagaataacgttgcagttcccacagggcatgtgactttgaaagagactagaggccacactcagttaataatggggcacagatgtgttcccacccaacaaatgtgataagtgatcgtgcagccagagccagccttccttcagtcaaggtttccaggcagagcaaataccctagagattctctgtaatattggtaatttggatgaaggaagctagaagaattacagggatgtttttaatcccactatggactcagtctcctggaaaaggatctgtccactcctggtcattggtggatgttaaacccatattcctttcaactgctgcctgctagggaaaactgctcctcattatcatcactattattgctcaccactgtatcccctctactgggcaagtgcttgtcaagttctagttgttcaataaatttgttaataatgctga

SEQ ID NO: 429505 - DNA, 3043 bp, Homo sapiens
  misc_feature (1136)..(1137): n is a, c, g, or t
  misc_feature (1139)..(1139): n is a, c, g, or t
  misc_feature (1142)..(1142): n is a, c, g, or t
  misc_feature (1147)..(1147): n is a, c, g, or t
ctcttactgtttctcatggtgagaagacaatatttgctttctctttttcctttcttccggatgagaggctaagccataatagaaagaatggagaattattgattgaccgtctttattctgtgggctctgattctccaatgggaataccaagggatggttttccatactggaacccaaaggtaaagacactcaaggacagacatttttggcagagcatagatgaaaatggcaagttccctggctttccttctgctcaactttcatgtctccctcctcttggtccagctgctcactccttgctcagctcagttttctgtgcttggaccctctgggcccatcctggccatggtgggtgaagacgctgatctgccctgtcacctgttcccgaccatgagtgcagagaccatggagctgaagtgggtaagttccagcctaaggcaggtggtgaacgtgtatgcagatggaaaggaagtggaagacaggcagagtgcaccgtatcgagggagaacttcgattctgcgggatggcatcactgcagggaaggctgctctccgaatacacaacgtcacagcctctgacagtggaaagtacttgtgttatttccaagatggtgacttctatgaaaaagccctggtggagctgaaggttgcagcactgggttctaatcttcacgtcgaagtgaagggttatgaggatggagggatccatctggagtgcaggtccaccggctggtacccccaaccccaaatacagtggagcaacgccaagggagagaacatcccagctgtggaagcacctgtggttgcagatggagtgggcctatatgaagtagcagcatctgtgatcatgagaggcggctccggggagggtgtatcctgcatcatcagaaattccctcctcggcctggaaaagacagccagcatttccatcgcagaccccttcttcaggagcgcccagccctggatcgcagccctggcagggaccctgcctatcttgctgctgcttctcgccggagccagttacttcttgtggagacaacagaaggaaataactgctctgtccagtgagatagaaagtgagcaagagatgaaagaaatgggatatgctgcaacagagcgggaaataagcctaagagnnanccnccagnaggaactaagagaggaaaaaaatccagtacttgactcgtggagaggagtcttcgtccgataccaataagtcagcctgatgctctaatggaaaaatggccctcttcaagcctggaaaaatggctgaccccatggacacctcctcaaactctctgcagcagatgtaattctgtatccagacatggcaaatgccatcctccttgtttctgaggaccagaggagtgtacagcgtgctgaggagccccatgacctaccagacaaccctgagagatttgaatggcgttactgtgtgcttggctgtgaaagcttcatgtcagagagacactactgggaggtggaagtgggggacagaaaagagtggcatattggggtatgtagtaagaacgtggagaggaaaaaagtttgggtcaaaatgacaccggagaacggatactggactatgggcctgactgatgggaataagtatcgggctctcactgagcccagaaccaacctgaaacttcctgagcctcctaggaaagtgggggtcatcctggactatgagactggacatatctcgttctacaatgccacggatggatctcatatctacacatttctgcacgcctcttcctctgagcctctgtatcctgtattcagaattttgaccttggagcccactgccctgaccgtttgcccaataccaaaagtagagagttcccccgatcccgacctagtgcctgatcattccctggagataccactgaccccaggcttagctaatgaaagtggggagcctcaggctgaagtaacatctctgcttctccctgcccagcctggagctaagggtctcaccctccacaacagccagtcagaaccataaagctacaggcacacactgaagcactttactgatattcattcaattattccataggacagttgtttgagtttggtgccaccttattggcccctttatacagataaggaaactggggtgtagaaaagtgtattgactttacaaagcagacaggaatagtgaacaacagagctgggatctgaacaacaatgactaacattaatggagaatttaaaacgttctgagtgctgtgttatgagctttggtgggtgtcactcctttaatcctcacaacaccctgtcaggtagtctcatttggcaagtatggaagcagaggcagggcaacattaagtagcttacataactcacacggtaatttgtgcagttgggagatgttcagcttcagtccctggccaattgcccgttcttttccagcctgatttttcctgcatgggaagagcccacatgtagccctgaggttcccttcccaggacagctccaggatcgagatcactgtgagtggttgtggagttaagacccctatggactccttcccagctgattatcagagccttagacccagcactccttggattggctctgcagagtgtcttggttgagagaataacgttgcagttcccacagggcatgtgactttgaaagagactagaggccacactcagttaataatggggcacagatgtgttcccacccaacaaatgtgataagtgatcgtgcagccagagccagccttccttcagtcaaggtttccaggcagagcaaataccctagagattctctgtaatattggtaatttggatgaaggaagctagaagaattacagggatgtttttaatcccactatggactcagtctcctggaaaaggatctgtccactcctggtcattggtggatgttaaacccatattcctttcaactgctgcctgctagggaaaactgctcctcattatcatcactattattgctcaccactgtatcccctctactgggcaagtgcttgtcaagttctagttgttcaataaatttgttaataatgctga

SEQ ID NO: 429506 - DNA, 3684 bp, Homo sapiens
ctcttactgtttctcatggtgagaagacaatatttgctttctctttttcctttcttccggatgagaggctaagccataatagaaagaatggagaattattgattgaccgtctttattctgtgggctctgattctccaatgggaataccaagggatggttttccatactggaacccaaaggtaaagacactcaaggacagacatttttggcagagctcagttttctgtgcttggaccctctgggcccatcctggccatggtgggtgaagacgctgatctgccctgtcacctgttcccgaccatgagtgcagagaccatggagctgaagtgggtaagttccagcctaaggcaggtggtgaacgtgtatgcagatggaaaggaagtggaagacaggcagagtgcaccgtatcgagggagaacttcgattctgcgggatggcatcactgcagggaaggctgctctccgaatacacaacgtcacagcctctgacagtggaaagtacttgtgttatttccaagatggtgacttctatgaaaaagccctggtggagctgaaggttgcagcactgggttctaatcttcacgtcgaagtgaagggttatgaggatggagggatccatctggagtgcaggtccaccggctggtacccccaaccccaaatacagtggagcaacgccaagggagagaacatcccagctgtggaagcacctgtggttgcagatggagtgggcctatatgaagtagcagcatctgtgatcatgagaggcggctccggggagggtgtatcctgcatcatcagaaattccctcctcggcctggaaaagacagccagcatttccatcgcagaccccttcttcaggagcgcccagccctggatcgcagccctggcagggaccctgcctatcttgctgctgcttctcgccggagccagttacttcttgtggagacaacagaaggaaataactgctctgtccagtgagatagaaagtgagcaagagatgaaagaaatgggatatgctgcaacagagcgggaaataagcctaagagagagcctccaggaggaactcaagaggaaaaaaatccagtacttgactcgtggagaggagtcttcgtccgataccaataagtcagcctgatgctctaatggaaaaatggccctcttcaagcctggtgaggaaatgcttcagatgaggctccaccttgttaaataaattggatgtatggaaaaatagactgcagaaaaggggaactcatttagctcacgagtggtcgagtgaagattgaaaattaacctctgagggccagcacagcagctcatgcctgtaatcctagcactttggaaggctgaggagggcggatcacaaggtcaggagatcaagaccatcctggctaacacggtgaaaccccgtctctactaaaaatacaaaaaataaaaaattagccgggcatggtgacgggcacctgtagtcccagctactcgggaggctgaggcaggagaatggcatgaacccggaaggcagagcttgcagtgagccgagatcacgccactgcactccagcctgggagacagagcgagactctgtctcaagaaaaaaaaaaaaaaaaaaaaagaaaagaaaattaacctctgagtataaagcatcagtgggcagaatcaatgtggggagggaaacaacaaaaatgtagaaagaggatccttgttgcttcttggggccgcatcagggtattgggttaggcagatactgaccttactttcatttcccctctggtcactagacccctggggctttcaccaatgacattgatgagagaatcacattcagggcaggctagggacacggggttctggaaggacctcctcagcatggcccaagccttgcatgctgtggctcttaaatccaggaaaaatggctgaccccatggacacctcctcaaactctctgcagcagatgtaattctgtatccagacatggcaaatgccatcctccttgtttctgaggaccagaggagtgtacagcgtgctgaggagccccatgacctaccagacaaccctgagagatttgaatggcgttactgtgtgcttggctgtgaaagcttcatgtcagagagacactactgggaggtggaagtgggggacagaaaagagtggcatattggggtatgtagtaagaacgtggagaggaaaaaagtttgggtcaaaatgacaccggagaacggatactggactatgggcctgactgatgggaataagtatcgggctctcactgagcccagaaccaacctgaaacttcctgagcctcctaggaaagtgggggtcatcctggactatgagactggacatatctcgttctacaatgccacggatggatctcatatctacacatttctgcacgcctcttcctctgagcctctgtatcctgtattcagaattttgaccttggagcccactgccctgaccgtttgcccaataccaaaagtagagagttcccccgatcccgacctagtgcctgatcattccctggagataccactgaccccaggcttagctaatgaaagtggggagcctcaggctgaagtaacatctctgcttctccctgcccagcctggagctaagggtctcaccctccacaacagccagtcagaaccataaagctacaggcacacactgaagcactttactgatattcattcaattattccataggacagttgtttgagtttggtgccaccttattggcccctttatacagataaggaaactggggtgtagaaaagtgtattgactttacaaagcagacaggaatagtgaacaacagagctgggatctgaacaacaatgactaacattaatggagaatttaaaacgttctgagtgctgtgttatgagctttggtgggtgtcactcctttaatcctcacaacaccctgtcaggtagtctcatttggcaagtatggaagcagaggcagggcaacattaagtagcttacataactcacacggtaatttgtgcagttgggagatgttcagcttcagtccctggccaattgcccgttcttttccagcctgatttttcctgcatgggaagagcccacatgtagccctgaggttcccttcccaggacagctccaggatcgagatcactgtgagtggttgtggagttaagacccctatggactccttcccagctgattatcagagccttagacccagcactccttggattggctctgcagagtgtcttggttgagagaataacgttgcagttcccacagggcatgtgactttgaaagagactagaggccacactcagttaataatggggcacagatgtgttcccacccaacaaatgtgataagtgatcgtgcagccagagccagccttccttcagtcaaggtttccaggcagagcaaataccctagagattctctgtaatattggtaatttggatgaaggaagctagaagaattacagggatgtttttaatcccactatggactcagtctcctggaaaaggatctgtccactcctggtcattggtggatgttaaacccatattcctttcaactgctgcctgctagggaaaactgctcctcattatcatcactattattgctcaccactgtatcccctctactgggcaagtgcttgtcaagttctagttgttcaataaatttgttaataatgctga

SEQ ID NO: 429507 - DNA, 3483 bp, Homo sapiens
ctcttactgtttctcatggtgagaagacaatatttgctttctctttttcctttcttccggatgagaggctaagccataatagaaagaatggagaattattgattgaccgtctttattctgtgggctctgattctccaatgggaataccaagggatggttttccatactggaacccaaaggtaaagacactcaaggacagacatttttggcagagctcagttttctgtgcttggaccctctgggcccatcctggccatggtgggtgaagacgctgatctgccctgtcacctgttcccgaccatgagtgcagagaccatggagctgaagtgggtaagttccagcctaaggcaggtggtgaacgtgtatgcagatggaaaggaagtggaagacaggcagagtgcaccgtatcgagggagaacttcgattctgcgggatggcatcactgcagggaaggctgctctccgaatacacaacgtcacagcctctgacagtggaaagtacttgtgttatttccaagatggtgacttctatgaaaaagccctggtggagctgaaggttgcagcactgggttctaatcttcacgtcgaagtgaagggttatgaggatggagggatccatctggagtgcaggtccaccggctggtacccccaaccccaaatacagtggagcaacgccaagggagagaacatcccagctgtggaagcacctgtggttgcagatggagtgggcctatatgaagtagcagcatctgtgatcatgagaggcggctccggggagggtgtatcctgcatcatcagaaattccctcctcggcctggaaaagacagccagcatttccatcgcagagagcctccaggaggaactcaagaggaaaaaaatccagtacttgactcgtggagaggagtcttcgtccgataccaataagtcagcctgatgctctaatggaaaaatggccctcttcaagcctggtgaggaaatgcttcagatgaggctccaccttgttaaataaattggatgtatggaaaaatagactgcagaaaaggggaactcatttagctcacgagtggtcgagtgaagattgaaaattaacctctgagggccagcacagcagctcatgcctgtaatcctagcactttggaaggctgaggagggcggatcacaaggtcaggagatcaagaccatcctggctaacacggtgaaaccccgtctctactaaaaatacaaaaaataaaaaattagccgggcatggtgacgggcacctgtagtcccagctactcgggaggctgaggcaggagaatggcatgaacccggaaggcagagcttgcagtgagccgagatcacgccactgcactccagcctgggagacagagcgagactctgtctcaagaaaaaaaaaaaaaaaaaaaaagaaaagaaaattaacctctgagtataaagcatcagtgggcagaatcaatgtggggagggaaacaacaaaaatgtagaaagaggatccttgttgcttcttggggccgcatcagggtattgggttaggcagatactgaccttactttcatttcccctctggtcactagacccctggggctttcaccaatgacattgatgagagaatcacattcagggcaggctagggacacggggttctggaaggacctcctcagcatggcccaagccttgcatgctgtggctcttaaatccaggaaaaatggctgaccccatggacacctcctcaaactctctgcagcagatgtaattctgtatccagacatggcaaatgccatcctccttgtttctgaggaccagaggagtgtacagcgtgctgaggagccccatgacctaccagacaaccctgagagatttgaatggcgttactgtgtgcttggctgtgaaagcttcatgtcagagagacactactgggaggtggaagtgggggacagaaaagagtggcatattggggtatgtagtaagaacgtggagaggaaaaaagtttgggtcaaaatgacaccggagaacggatactggactatgggcctgactgatgggaataagtatcgggctctcactgagcccagaaccaacctgaaacttcctgagcctcctaggaaagtgggggtcatcctggactatgagactggacatatctcgttctacaatgccacggatggatctcatatctacacatttctgcacgcctcttcctctgagcctctgtatcctgtattcagaattttgaccttggagcccactgccctgaccgtttgcccaataccaaaagtagagagttcccccgatcccgacctagtgcctgatcattccctggagataccactgaccccaggcttagctaatgaaagtggggagcctcaggctgaagtaacatctctgcttctccctgcccagcctggagctaagggtctcaccctccacaacagccagtcagaaccataaagctacaggcacacactgaagcactttactgatattcattcaattattccataggacagttgtttgagtttggtgccaccttattggcccctttatacagataaggaaactggggtgtagaaaagtgtattgactttacaaagcagacaggaatagtgaacaacagagctgggatctgaacaacaatgactaacattaatggagaatttaaaacgttctgagtgctgtgttatgagctttggtgggtgtcactcctttaatcctcacaacaccctgtcaggtagtctcatttggcaagtatggaagcagaggcagggcaacattaagtagcttacataactcacacggtaatttgtgcagttgggagatgttcagcttcagtccctggccaattgcccgttcttttccagcctgatttttcctgcatgggaagagcccacatgtagccctgaggttcccttcccaggacagctccaggatcgagatcactgtgagtggttgtggagttaagacccctatggactccttcccagctgattatcagagccttagacccagcactccttggattggctctgcagagtgtcttggttgagagaataacgttgcagttcccacagggcatgtgactttgaaagagactagaggccacactcagttaataatggggcacagatgtgttcccacccaacaaatgtgataagtgatcgtgcagccagagccagccttccttcagtcaaggtttccaggcagagcaaataccctagagattctctgtaatattggtaatttggatgaaggaagctagaagaattacagggatgtttttaatcccactatggactcagtctcctggaaaaggatctgtccactcctggtcattggtggatgttaaacccatattcctttcaactgctgcctgctagggaaaactgctcctcattatcatcactattattgctcaccactgtatcccctctactgggcaagtgcttgtcaagttctagttgttcaataaatttgttaataatgctga

SEQ ID NO: 429508 - DNA, 2207 bp, Homo sapiens
gttactattcctgtctgctttgtaaagtcaatacactaaaccttcacaccaaaatgagttaccaacccgagatctccagcctgggagacagagcgagactctgtctcaagaaaaaaaaaaaaaaaaaaaaagaaaagaaaattaacctctgagtataaagcatcagtgggcagaatcaatgtggggagggaaacaacaaaaatgtagaaagaggatccttgttgcttcttggggccgcatcagggtattgggttaggcagatactgaccttactttcatttcccctctggtcactagacccctggggctttcaccaatgacattgatgagagaatcacattcagggcaggctagggacacggggttctggaaggacctcctcagcatggcccaagccttgcatgctgtggctcttaaatccaggaaaaatggctgaccccatggacacctcctcaaactctctgcagcagatgtaattctgtatccagacatggcaaatgccatcctccttgtttctgaggaccagaggagtgtacagcgtgctgaggagccccatgacctaccagacaaccctgagagatttgaatggcgttactgtgtgcttggctgtgaaagcttcatgtcagagagacactactgggaggtggaagtgggggacagaaaagagtggcatattggggtatgtagtaagaacgtggagaggaaaaaagtttgggtcaaaatgacaccggagaacggatactggactatgggcctgactgatgggaataagtatcgggctctcactgagcccagaaccaacctgaaacttcctgagcctcctaggaaagtgggggtcatcctggactatgagactggacatatctcgttctacaatgccacggatggatctcatatctacacatttctgcacgcctcttcctctgagcctctgtatcctgtattcagaattttgaccttggagcccactgccctgaccgtttgcccaataccaaaagtagagagttcccccgatcccgacctagtgcctgatcattccctggagataccactgaccccaggcttagctaatgaaagtggggagcctcaggctgaagtaacatctctgcttctccctgcccagcctggagctaagggtctcaccctccacaacagccagtcagaaccataaagctacaggcacacactgaagcactttactgatattcattcaattattccataggacagttgtttgagtttggtgccaccttattggcccctttatacagataaggaaactggggtgtagaaaagtgtattgactttacaaagcagacaggaatagtgaacaacagagctgggatctgaacaacaatgactaacattaatggagaatttaaaacgttctgagtgctgtgttatgagctttggtgggtgtcactcctttaatcctcacaacaccctgtcaggtagtctcatttggcaagtatggaagcagaggcagggcaacattaagtagcttacataactcacacggtaatttgtgcagttgggagatgttcagcttcagtccctggccaattgcccgttcttttccagcctgatttttcctgcatgggaagagcccacatgtagccctgaggttcccttcccaggacagctccaggatcgagatcactgtgagtggttgtggagttaagacccctatggactccttcccagctgattatcagagccttagacccagcactccttggattggctctgcagagtgtcttggttgagagaataacgttgcagttcccacagggcatgtgactttgaaagagactagaggccacactcagttaataatggggcacagatgtgttcccacccaacaaatgtgataagtgatcgtgcagccagagccagccttccttcagtcaaggtttccaggcagagcaaataccctagagattctctgtaatattggtaatttggatgaaggaagctagaagaattacagggatgtttttaatcccactatggactcagtctcctggaaaaggatctgtccactcctggtcattggtggatgttaaacccatattcctttcaactgctgcctgctagggaaaactgctcctcattatcatcactattattgctcaccactgtatcccctctactgggcaagtgcttgtcaagttctagttgttcaataaatttgttaataatgctga

SEQ ID NO: 429509 - DNA, 2695 bp, Homo sapiens
ctcttactgtttctcatggtgagaagacaatatttgctttctctttttcctttcttccggatgagaggctaagccataatagaaagaatggagaattattgattgaccgtctttattctgtgggctctgattctccaatgggaataccaagggatggttttccatactggaacccaaaggtaaagacactcaaggacagacatttttggcagagcatagatgaaaatggcaagttccctggctttccttctgctcaactttcatgtctccctcctcttggtccagctgctcactccttgctcagctcagttttctgtgcttggaccctctgggcccatcctggccatggtgggtgaagacgctgatctgccctgtcacctgttcccgaccatgagtgcagagaccatggagctgaagtgggtaagttccagcctaaggcaggtggtgaacgtgtatgcagatggaaaggaagtggaagacaggcagagtgcaccgtatcgagggagaacttcgattctgcgggatggcatcactgcagggaaggctgctctccgaatacacaacgtcacagcctctgacagtggaaagtacttgtgttatttccaagatggtgacttctatgaaaaagccctggtggagctgaaggttgcagcactgggttctaatcttcacgtcgaagtgaagggttatgaggatggagggatccatctggagtgcaggtccaccggctggtacccccaaccccaaatacagtggagcaacgccaagggagagaacatcccagctgtggaagcacctgtggttgcagatggagtgggcctatatgaagtagcagcatctgtgatcatgagaggcggctccggggagggtgtatcctgcatcatcagaaattccctcctcggcctggaaaagacagccagcatttccatcgcagaccccttcttcaggagcgcccagccctggatcgcagccctggcagggaccctgcctatcttgctgctgcttctcgccggagccagttacttcttgtggagacaacagaaggaaataactgctctgtccagtgagatagaaagtgagcaagagatgaaagaaatgggatatgctgcaacagagcgggaaataagcctaagagagagcctccaggaggaactcaagaggaaaaaaatccagtacttgactcgtggagaggagtcttcgtccgataccaataagtcagcctgatgctctaatggaaaaatggccctcttcaagcctggtgaggaaatgcttcagatgaggctccaccttgttaaataaattggatgtatggaaaaatagactgcagaaaaggggaactcatttagctcacgagtggtcgagtgaagattgaaaattaacctctgagggccagcacagcagctcatgcctgtaatcctagcactttggaaggctgaggagggcggatcacaaggtcaggagatcaagaccatcctggctaacacggtgaaaccccgtctctactaaaaatacaaaaaataaaaaattagccgggcatggtgacgggcacctgtagtcccagctactcgggaggctgaggcaggagaatggcatgaacccggaaggcagagcttgcagtgagccgagatcacgccactgcactccagcctgggagacagagcgagactctgtctcaagaaaaaaaaaaaaaaaaaaaaagaaaagaaaattaacctctgagtataaagcatcagtgggcagaatcaatgtggggagggaaacaacaaaaatgtagaaagaggatccttgttgcttcttggggccgcatcagggtattgggttaggcagatactgaccttactttcatttcccctctggtcactagacccctggggctttcaccaatgacattgatgagagaatcacattcagggcaggctagggacacggggttctggaaggacctcctcagcatggcccaagccttgcatgctgtggctcttaaatccaggaaaaatggctgaccccatggacacctcctcaaactctctgcagcagatgtaattctgtatccagacatggcaaatgccatcctccttgtttctgaggaccagaggagtgtacagcgtgctgaggagccccatgacctaccagacaaccctgagagatttgaatggcgttactgtgtgcttggctgtgaaagcttcatgtcagagagacactactgggaggtggaagtgggggacagaaaagagtggcatattggggtatgtagtaagaacgtggagaggaaaaaagtttatcggactctaactgagcccagaaccaacctgaaacttcctaagccccctaagaaagtgggggtcttcctggactatgagactggagatatctcattctacaatgctgtggatggatcgcatattcatactttcctggacgtctccttctctgaggctctatatcctgttttcagaattttgaccttggagcccacggccctgactatttgtccagcgtgaaaagaagaagagagttcctccaattctgaccgagtgctgatcattccctagagacaccagtaaccccgggcttagctaacgaaagtggggagcctcaggctgaagtaacttttctctgcttctccctgcccagctcagagctgagggcctccccctccacagcaaccaatcacaaccataaagctacaagcacg

SEQ ID NO: 429510 - DNA, 2062 bp, Homo sapiens
ctcttactgtttctcatggtgagaagacaatatttgctttctctttttcctttcttccggatgagaggctaagccataatagaaagaatggagaattattgattgaccgtctttattctgtgggctctgattctccaatgggaataccaagggatggttttccatactggaacccaaaggtaaagacactcaaggacagacatttttggcagagcatagatgaaaatggcaagttccctggctttccttctgctcaactttcatgtctccctcctcttggtccagctgctcactccttgctcagctcagttttctgtgcttggaccctctgggcccatcctggccatggtgggtgaagacgctgatctgccctgtcacctgttcccgaccatgagtgcagagaccatggagctgaagtgggtaagttccagcctaaggcaggtggtgaacgtgtatgcagatggaaaggaagtggaagacaggcagagtgcaccgtatcgagggagaacttcgattctgcgggatggcatcactgcagggaaggctgctctccgaatacacaacgtcacagcctctgacagtggaaagtacttgtgttatttccaagatggtgacttctatgaaaaagccctggtggagctgaaggttgcagcactgggttctaatcttcacgtcgaagtgaagggttatgaggatggagggatccatctggagtgcaggtccaccggctggtacccccaaccccaaatacagtggagcaacgccaagggagagaacatcccagctgtggaagcacctgtggttgcagatggagtgggcctatatgaagtagcagcatctgtgatcatgagaggcggctccggggagggtgtatcctgcatcatcagaaattccctcctcggcctggaaaagacagccagcatttccatcgcagaccccttcttcaggagcgcccagccctggatcgcagccctggcagggaccctgcctatcttgctgctgcttctcgccggagccagttacttcttgtggagacaacagaaggaaataactgctctgtccagtgagatagaaagtgagcaagagatgaaagaaatgggatatgctgcaacagagcgggaaataagcctaagagagagcctccaggaggaactcagtaagttaccattcccccagagatccagacatgtcttcctatcctcgctttgagcaccttgatgactcttccctgttcattccattgcagagaggaaaaaaatccagtacttgactcgtgagtggctttgacattttctctgaattcaaatctgttactctctctctgcttcattattttccagcccataagtcatagcccagggttgaaaagtggtcttggatccctttacccagaaaaagaaaacaagtgtggctctttggagaaaccacccagtgctttttctctctagaaaaaaaaaaaaaaaaaaaagaggtcttcaatctctttgtactaggggctacagacccttaagctctaaaaagcactgaggaatatccaggggtacacttcaaaaggaagagggaagagaaggatgaggtgcattttctatggcaggaaacttacttgttgtttcccataatctagaggctgttgaaaggaaaacaagaatggaagatttaagaaataagaaaatcagaaaagagagagggagggagaaaagtgtgtctaataaagaggagtagctacagtggctcagttggtacagatagatcataactgctttcaaaaactagtccctgaaattgctcattaaatttcccaaattctttttagagcaaggtacgaaatgatacagattgagaaggatgaatcttgtactcctaggcatacacatatagacatggtgacacctatgcccaggtacacattcaaaacagatgagctggaccccattgggaaggaactctcacagtgcctgccctgccactagcgttcaaccgatgttcccagacttgatattaagaagaggtgaagaaagaattgtacctgaagatggagaccatggggaagggtgggatggta

SEQ ID NO: 429511 - DNA, 1996 bp, Homo sapiens
ctcttactgtttctcatggtgagaagacaatatttgctttctctttttcctttcttccggatgagaggctaagccataatagaaagaatggagaattattgattgaccgtctttattctgtgggctctgattctccaatgggaataccaagggatggttttccatactggaacccaaaggtaaagacactcaaggacagacatttttggcagagcatagatgaaaatggcaagttccctggctttccttctgctcaactttcatgtctccctcctcttggtccagctgctcactccttgctcagctcagttttctgtgcttggaccctctgggcccatcctggccatggtgggtgaagacgctgatctgccctgtcacctgttcccgaccatgagtgcagagaccatggagctgaagtgggtaagttccagcctaaggcaggtggtgaacgtgtatgcagatggaaaggaagtggaagacaggcagagtgcaccgtatcgagggagaacttcgattctgcgggatggcatcactgcagggaaggctgctctccgaatacacaacgtcacagcctctgacagtggaaagtacttgtgttatttccaagatggtgacttctatgaaaaagccctggtggagctgaaggttgcagcactgggttctaatcttcacgtcgaagtgaagggttatgaggatggagggatccatctggagtgcaggtccaccggctggtacccccaaccccaaatacagtggagcaacgccaagggagagaacatcccagctgtggaagcacctgtggttgcagatggagtgggcctatatgaagtagcagcatctgtgatcatgagaggcggctccggggagggtgtatcctgcatcatcagaaattccctcctcggcctggaaaagacagccagcatttccatcgcagaccccttcttcaggagcgcccagccctggatcgcagccctggcagggaccctgcctatcttgctgctgcttctcgccggagccagttacttcttgtggagacaacagaaggaaataactgctctgtccagtgagatagaaagtgagcaagagatgaaagaaatgggatatgctgcaacagagcgggaaataagcctaagagagagcctccaggaggaactcaagaggaaaaaaatccagtacttgactcgtggagaggagtcttcgtccgataccaataagtcagcctgatgctctaatggaaaaatggccctcttcaagcctgggcctcccattggccaaacacagcagcaaaccagaggacaagggagcccagtggcactgtccatagaggacagattcctggggtccagaagagggtggagaaagctgaaggctggagagtgaatctagggcatataaggccccacacagagcccagcacagagacggccttgcagctatcaggaagatgaggagcttccttcatggcctgctgtgggctgagtaaataatatgattgccttctacagcgctagagattcatatgtttatccccatttttcaggtgaggaaatgcttcagatgaggctccaccttgttaaataaattggatgtatggaaaaataaaaaaaaaaaaaaaaaaaaaaaaaaaaaaaaaaagcaaaaaaaaaaaacaaaaaaaaaaaaaaaaaaagacaaaaaaaaaaaaaaaaaaaaaaaaaacaaagtcagggcggcgcgcgcgccgcggcacccacaagaagacccacaacaccgacggggggggcgccgcgcccacggaagaaagaaaaaaggggaaacagggtcgtgtacacaaacagagagccgggcggcgcaagaacaagggaggagtgacacccaaacaaaaaaaagacacccggcggggggaacaagcgggcttggcaaacaacacacagatgggagaggcgagagagagaaaacggcggacaacaacaaaggggggcgcacgagagcggcggcgagcataaatgcacgccgg

SEQ ID NO: 429512 - DNA, 1795 bp, Homo sapiens
ctcttactgtttctcatggtgagaagacaatatttgctttctctttttcctttcttccggatgagaggctaagccataatagaaagaatggagaattattgattgaccgtctttattctgtgggctctgattctccaatgggaataccaagggatggttttccatactggaacccaaaggtaaagacactcaaggacagacatttttggcagagcatagatgaaaatggcaagttccctggctttccttctgctcaactttcatgtctccctcctcttggtccagctgctcactccttgctcagctcagttttctgtgcttggaccctctgggcccatcctggccatggtgggtgaagacgctgatctgccctgtcacctgttcccgaccatgagtgcagagaccatggagctgaagtgggtaagttccagcctaaggcaggtggtgaacgtgtatgcagatggaaaggaagtggaagacaggcagagtgcaccgtatcgagggagaacttcgattctgcgggatggcatcactgcagggaaggctgctctccgaatacacaacgtcacagcctctgacagtggaaagtacttgtgttatttccaagatggtgacttctatgaaaaagccctggtggagctgaaggttgcagcactgggttctaatcttcacgtcgaagtgaagggttatgaggatggagggatccatctggagtgcaggtccaccggctggtacccccaaccccaaatacagtggagcaacgccaagggagagaacatcccagctgtggaagcacctgtggttgcagatggagtgggcctatatgaagtagcagcatctgtgatcatgagaggcggctccggggagggtgtatcctgcatcatcagaaattccctcctcggcctggaaaagacagccagcatttccatcgcagagagcctccaggaggaactcaagaggaaaaaaatccagtacttgactcgtggagaggagtcttcgtccgataccaataagtcagcctgatgctctaatggaaaaatggccctcttcaagcctgggcctcccattggccaaacacagcagcaaaccagaggacaagggagcccagtggcactgtccatagaggacagattcctggggtccagaagagggtggagaaagctgaaggctggagagtgaatctagggcatataaggccccacacagagcccagcacagagacggccttgcagctatcaggaagatgaggagcttccttcatggcctgctgtgggctgagtaaataatatgattgccttctacagcgctagagattcatatgtttatccccatttttcaggtgaggaaatgcttcagatgaggctccaccttgttaaataaattggatgtatggaaaaataaaaaaaaaaaaaaaaaaaaaaaaaaaaaaaaaaagcaaaaaaaaaaaacaaaaaaaaaaaaaaaaaaagacaaaaaaaaaaaaaaaaaaaaaaaaaacaaagtcagggcggcgcgcgcgccgcggcacccacaagaagacccacaacaccgacggggggggcgccgcgcccacggaagaaagaaaaaaggggaaacagggtcgtgtacacaaacagagagccgggcggcgcaagaacaagggaggagtgacacccaaacaaaaaaaagacacccggcggggggaacaagcgggcttggcaaacaacacacagatgggagaggcgagagagagaaaacggcggacaacaacaaaggggggcgcacgagagcggcggcgagcataaatgcacgccgg

SEQ ID NO: 429513 - DNA, 1294 bp, Homo sapiens
ctcttactgtttctcatggtgagaagacaatatttgctttctctttttcctttcttccggatgagaggctaagccataatagaaagaatggagaattattgattgaccgtctttattctgtgggctctgattctccaatgggaataccaagggatggttttccatactggaacccaaaggtaaagacactcaaggacagacatttttggcagagcatagatgaaaatggcaagttccctggctttccttctgctcaactttcatgtctccctcctcttggtccagctgctcactccttgctcagctcagttttctgtgcttggaccctctgggcccatcctggccatggtgggtgaagacgctgatctgccctgtcacctgttcccgaccatgagtgcagagaccatggagctgaagtgggtaagttccagcctaaggcaggtggtgaacgtgtatgcagatggaaaggaagtggaagacaggcagagtgcaccgtatcgagggagaacttcgattctgcgggatggcatcactgcagggaaggctgctctccgaatacacaacgtcacagcctctgacagtggaaagtacttgtgttatttccaagatggtgacttctatgaaaaagccctggtggagctgaaggttgcagcactgggttctaatcttcacgtcgaagtgaagggttatgaggatggagggatccatctggagtgcaggtccaccggctggtacccccaaccccaaatacagtggagcaacgccaagggagagaacatcccagctgtggaagcacctgtggttgcagatggagtgggcctatatgaagtagcagcatctgtgatcatgagaggcggctccggggagggtgtatcctgcatcatcagaaattccctcctcggcctggaaaagacagccagcatttccatcgcagaccccttcttcaggagcgcccagaggtggatcgccgccctggcagggaccctgcctgtcttgctgctgcttcttgggggagccggttacttcctgtggcaacagcaggaggaaaaaaagactcagttcagaaagaaaaagagagagcaagagttgagagaaatggcatggagcacaatgaagcaagaacaaagcacaagagtgaagctcctggaggaactcagatggagaagtatccagtatgcatctcggggagagagacattcagcctataatgaatggaaaaaggccctcttcaagcctggtgaggaaatgcttcagatgaggctccactttgttaaataaaatggatgaatgaaaa

SEQ ID NO: 429514 - DNA, 1933 bp, Homo sapiens
ctcttactgtttctcatggtgagaagacaatatttgctttctctttttcctttcttccggatgagaggctaagccataatagaaagaatggagaattattgattgaccgtctttattctgtgggctctgattctccaatgggaataccaagggatggttttccatactggaacccaaaggtaaagacactcaaggacagacatttttggcagagcatagatgaaaatggcaagttccctggctttccttctgctcaactttcatgtctccctcctcttggtccagctgctcactccttgctcagctcagttttctgtgcttggaccctctgggcccatcctggccatggtgggtgaagacgctgatctgccctgtcacctgttcccgaccatgagtgcagagaccatggagctgaagtgggtaagttccagcctaaggcaggtggtgaacgtgtatgcagatggaaaggaagtggaagacaggcagagtgcaccgtatcgagggagaacttcgattctgcgggatggcatcactgcagggaaggctgctctccgaatacacaacgtcacagcctctgacagtggaaagtacttgtgttatttccaagatggtgacttctatgaaaaagccctggtggagctgaaggttgcagcactgggttctgatcttcacgttgatgtgaagggttacaaggatggagggatccatctggagtgcaggtccactggctggtacccccaaccccaaatacagtggagcaacaacaagggagagaacatcccgactgtggaagcacctgtggttgcagacggagtgggcctgtatgcagtagcagcatctgtgatcatgagaggcagctctggggagggtgtatcctgtaccatcagaagttccctcctcggcctggaaaagacagccagcatttccatcgcagaccccttcttcaggagcgcccagaggtggatcgccgccctggcagggaccctgcctgtcttgctgctgcttcttgggggagccggttacttcctgtggcaacagcaggaggaaaaaaagactcagttcagaaagaaaaagagagagcaagagttgagagaaatggcatggagcacaatgaagcaagaacaaagcacaagagatggagaagtatccagtatgcatctcggggagagagacattcagcctataatgaatggaaaaaggccctcttcaagcctgcggatgtgattctggatccaaaaacagcaaaccccatcctccttgtttctgaggaccagaggagtgtgcagcgtgccaaggagccccaggatctgccagacaaccctgagagatttaattggcattattgtgttctcggctgtgagagcttcatatcagggagacattactgggaggtggaggtaggggacaggaaagagtggcatataggggtgtgcagtaagaatgtgcagagaaaaggctgggtcaaaatgacacctgagaatggattctggactatggggctgactgatgggaataagtatcggactctaactgagcccagaaccaacctgaaacttcctaagccccctaagaaagtgggggtcttcctggactatgagactggagatatctcattctacaatgctgtggatggatcgcatattcatactttcctggacgtctccttctctgaggctctatatcctgttttcagaattttgaccttggagcccacggccctgactatttgtccagcgtgaaaagaagaagagagttcctccaattctgaccgagtgctgatcattccctagagacaccagtaaccccgggcttagctaacgaaagtggggagcctcaggctgaagtaacttttctctgcttctccctgcccagctcagagctgagggcctccccctccacagcaaccaatcacaaccataaagctacaagcacg

SEQ ID NO: 429515 - DNA, 2077 bp, Homo sapiens
tccacctatctgcttagcagtgtctcgtgacattcacctctgtctgtcccttgcaggatggagaagaacattcttacatgctgaaggagatttaaccatagtagaaagaatggagaactattaactgcctttcttctgtgggctgtgattttcagaggggaatgctaagaggtgattttcaatgttgggactcaaaggtgaagacactgaaggacagaatttttggcagaggaaagatcttcttcggtcaccatacttgagttagctctagggaagtggaggtttccatttggaattctatagcttcttccaggtcatagtgtctgccccccaccttccagtatctcctgatatgcagcatgaatgaaaatggcaagtttcctggccttccttctgctcaactttcgtgtctgcctccttttgcttcagctgctcatgcctcactcagctcagttttctgtgcttggaccctctgggcccatcctggccatggtgggtgaagacgctgatctgccctgtcacctgttcccgaccatgagtgcagagaccatggagctgaagtgggtaagttccagcctaaggcaggtggtgaacgtgtatgcagatggaaaggaagtggaagacaggcagagtgcaccgtatcgagggagaacttcgattctgcgggatggcatcactgcagggaaggctgctctccgaatacacaacgtcacagcctctgacagtggaaagtacctgtgttatttccaagatggtgacttctatgaaaaagccctggtggagctgaaggttgcagcactgggttctgatcttcacgttgatgtgaagggttacaaggatggagggatccatctggagtgcaggtccactggctggtacccccaaccccaaatacagtggagcaacaacaagggagagaacatcccgactgtggaagcacctgtggttgcagacggagtgggcctgtatgcagtagcagcatctgtgatcatgagaggcagctctggggagggtgtatcctgtaccatcagaagttccctcctcggcctggaaaagacagccagcatttccatcgcagaccccttcttcaggagcgcccagaggtggatcgccgccctggcagggaccctgcctgtcttgctgctgcttcttgggggagccggttacttcctgtggcaacagcaggaggaaaaaaagactcagttcagaaagaaaaagagagagcaagagttgagagaaatggcatggagcacaatgaagcaagaacaaagcacaagagatggagaagtatccagtatgcatctcggggagagagacattcagcctataatgaatggaaaaaggccctcttcaagcctgcggatgtgattctggatccaaaaacagcaaaccccatcctccttgtttctgaggaccagaggagtgtgcagcgtgccaaggagccccaggatctgccagacaaccctgagagatttaattggcattattgtgttctcggctgtgagagcttcatatcagggagacattactgggaggtggaggtaggggacaggaaagagtggcatataggggtgtgcagtaagaatgtgcagagaaaaggctgggtcaaaatgacacctgagaatggattctggactatggggctgactgatgggaataagtatcggactctaactgagcccagaaccaacctgaaacttcctaagccccctaagaaagtgggggtcttcctggactatgagactggagatatctcattctacaatgctgtggatggatcgcatattcatactttcctggacgtctccttctctgaggctctatatcctgttttcagaattttgaccttggagcccacggccctgactatttgtccagcgtgaaaagaagaagagagttcctccaattctgaccgagtgctgatcattccctagagacaccagtaaccccgggcttagctaacgaaagtggggagcctcaggctgaagtaacttttctctgcttctccctgcccagctcagagctgagggcctccccctccacagcaaccaatcacaaccataaagctacaagcacg

SEQ ID NO: 429516 - DNA, 1885 bp, Homo sapiens
ctcttactgtttctcatggtgagaagacaatatttgctttctctttttcctttcttccggatgagaggctaagccataatagaaagaatggagaattattgattgaccgtctttattctgtgggctctgattctccaatgggaataccaagggatggttttccatactggaacccaaaggtaaagacactcaaggacagacatttttggcagagcttcccccttgtgctgacagctcagttttctgtgcttggaccctctgggcccatcctggccatggtgggtgaagacgctgatctgccctgtcacctgttcccgaccatgagtgcagagaccatggagctgaagtgggtaagttccagcctaaggcaggtggtgaacgtgtatgcagatggaaaggaagtggaagacaggcagagtgcaccgtatcgagggagaacttcgattctgcgggatggcatcactgcagggaaggctgctctccgaatacacaacgtcacagcctctgacagtggaaagtacttgtgttatttccaagatggtgacttctatgaaaaagccctggtggagctgaaggttgcagcactgggttctaatcttcacgtcgaagtgaagggttatgaggatggagggatccatctggagtgcaggtccaccggctggtacccccaaccccaaatacagtggagcaacgccaagggagagaacatcccagctgtggaagcacctgtggttgcagatggagtgggcctatatgaagtagcagcatctgtgatcatgagaggcggctccggggagggtgtatcctgcatcatcagaaattccctcctcggcctggaaaagacagccagcatttccatcgcagaccccttcttcaggagcgcccagaggtggatcgccgccctggcagggaccctgcctgtcttgctgctgcttcttgggggagccggttacttcctgtggcaacagcaggaggaaaaaaagactcagttcagaaagaaaaagagagagcaagagttgagagaaatggcatggagcacaatgaagcaagaacaaagcacaagagtgaagctcctggaggaactcagatggagaagtatccagtatgcatctcggggagagagacattcagcctataatgaatggaaaaaggccctcttcaagcctgcggatgtgattctggatccaaaaacagcaaaccccatcctccttgtttctgaggaccagaggagtgtgcagcgtgccaaggagccccaggatctgccagacaaccctgagagatttaattggcattattgtgttctcggctgtgagagcttcatatcagggagacattactgggaggtggaggtaggggacaggaaagagtggcatataggggtgtgcagtaagaatgtgcagagaaaaggctgggtcaaaatgacacctgagaatggattctggactatggggctgactgatgggaataagtatcggactctaactgagcccagaaccaacctgaaacttcctaagccccctaagaaagtgggggtcttcctggactatgagactggagatatctcattctacaatgctgtggatggatcgcatattcatactttcctggacgtctccttctctgaggctctatatcctgttttcagaattttgaccttggagcccacggccctgactatttgtccagcgtgaaaagaagaagagagttcctccaattctgaccgagtgctgatcattccctagagacaccagtaaccccgggcttagctaacgaaagtggggagcctcaggctgaagtaacttttctctgcttctccctgcccagctcagagctgagggcctccccctccacagcaaccaatcacaaccataaagctacaagcacg

SEQ ID NO: 429517 - DNA, 1753 bp, Homo sapiens
ctcttactgtttctcatggtgagaagacaatatttgctttctctttttcctttcttccggatgagaggctaagccataatagaaagaatggagaattattgattgaccgtctttattctgtgggctctgattctccaatgggaataccaagggatggttttccatactggaacccaaaggtaaagacactcaaggacagacatttttggcagagctcagttttctgtgcttggaccctctgggcccatcctggccatgatggaaaggaagtggaagacaggcagagtgcaccgtatcgagggagaacttcgattctgcgggatggcatcactgcagggaaggctgctctccgaatacacaacgtcacagcctctgacagtggaaagtacttgtgttatttccaagatggtgacttctatgaaaaagccctggtggagctgaaggttgcagcactgggttctaatcttcacgtcgaagtgaagggttatgaggatggagggatccatctggagtgcaggtccaccggctggtacccccaaccccaaatacagtggagcaacgccaagggagagaacatcccagctgtggaagcacctgtggttgcagatggagtgggcctatatgaagtagcagcatctgtgatcatgagaggcggctccggggagggtgtatcctgcatcatcagaaattccctcctcggcctggaaaagacagccagcatttccatcgcagaccccttcttcaggagcgcccagaggtggatcgccgccctggcagggaccctgcctgtcttgctgctgcttcttgggggagccggttacttcctgtggcaacagcaggaggaaaaaaagactcagttcagaaagaaaaagagagagcaagagttgagagaaatggcatggagcacaatgaagcaagaacaaagcacaagagtgaagctcctggaggaactcagatggagaagtatccagtatgcatctcggggagagagacattcagcctataatgaatggaaaaaggccctcttcaagcctgcggatgtgattctggatccaaaaacagcaaaccccatcctccttgtttctgaggaccagaggagtgtgcagcgtgccaaggagccccaggatctgccagacaaccctgagagatttaattggcattattgtgttctcggctgtgagagcttcatatcagggagacattactgggaggtggaggtaggggacaggaaagagtggcatataggggtgtgcagtaagaatgtgcagagaaaaggctgggtcaaaatgacacctgagaatggattctggactatggggctgactgatgggaataagtatcggactctaactgagcccagaaccaacctgaaacttcctaagccccctaagaaagtgggggtcttcctggactatgagactggagatatctcattctacaatgctgtggatggatcgcatattcatactttcctggacgtctccttctctgaggctctatatcctgttttcagaattttgaccttggagcccacggccctgactatttgtccagcgtgaaaagaagaagagagttcctccaattctgaccgagtgctgatcattccctagagacaccagtaaccccgggcttagctaacgaaagtggggagcctcaggctgaagtaacttttctctgcttctccctgcccagctcagagctgagggcctccccctccacagcaaccaatcacaaccataaagctacaagcacg

SEQ ID NO: 429518 - DNA, 1867 bp, Homo sapiens
ctcttactgtttctcatggtgagaagacaatatttgctttctctttttcctttcttccggatgagaggctaagccataatagaaagaatggagaattattgattgaccgtctttattctgtgggctctgattctccaatgggaataccaagggatggttttccatactggaacccaaaggtaaagacactcaaggacagacatttttggcagagagatcctcccccttgtgcctacagctcagttttctgtgcttggaccctctgggcccatcctggccatggtgggtgaagacgctgatctgccctgtcacctgttcccgaccatgagtgcagagaccatggagctgaagtgggtaagttccagcctaaggcaggtggtgaacgtgtatgcagatggaaaggaagtggaagacaggcagagtgcaccgtatcgagggagaacttcgattctgcgggatggcatcactgcagggaaggctgctctccgaatacacaacgtcacagcctctgacagtggaaagtacctgtgttatttccaagatggtgacttctatgaaaaagccctggtggagctgaaggttgcagcactgggttctgatcttcacgttgatgtgaagggttacaaggatggagggatccatctggagtgcaggtccactggctggtacccccaaccccaaatacagtggagcaacaacaagggagagaacatcccgactgtggaagcacctgtggttgcagacggagtgggcctgtatgcagtagcagcatctgtgatcatgagaggcagctctggggagggtgtatcctgtaccatcagaagttccctcctcggcctggaaaagacagccagcatttccatcgcagaccccttcttcaggagcgcccagaggtggatcgccgccctggcagggaccctgcctgtcttgctgctgcttcttgggggagccggttacttcctgtggcaacagcaggaggaaaaaaagactcagttcagaaagaaaaagagagagcaagagttgagagaaatggcatggagcacaatgaagcaagaacaaagcacaagagatggagaagtatccagtatgcatctcggggagagagacattcagcctataatgaatggaaaaaggccctcttcaagcctgcggatgtgattctggatccaaaaacagcaaaccccatcctccttgtttctgaggaccagaggagtgtgcagcgtgccaaggagccccaggatctgccagacaaccctgagagatttaattggcattattgtgttctcggctgtgagagcttcatatcagggagacattactgggaggtggaggtaggggacaggaaagagtggcatataggggtgtgcagtaagaatgtgcagagaaaaggctgggtcaaaatgacacctgagaatggattctggactatggggctgactgatgggaataagtatcggactctaactgagcccagaaccaacctgaaacttcctaagccccctaagaaagtgggggtcttcctggactatgagactggagatatctcattctacaatgctgtggatggatcgcatattcatactttcctggacgtctccttctctgaggctctatatcctgttttcagaattttgaccttggagcccacggccctgactatttgtccagcgtgaaaagaagaagagagttcctccaattctgaccgagtgctgatcattccctagagacaccagtaaccccgggcttagctaacgaaagtggggagcctcaggctgaagtaacttttctctgcttctccctgcccagctcagagctgagggcctccccctccacagcaaccaatcacaaccataaagctacaagcacg

SEQ ID NO: 429519 - DNA, 1044 bp, Homo sapiens
tccacctatctgcttagcagtgtctcgtgacattcacctctgtctgtcccttgcaggatggagaagaacattcttacatgctgaaggagatttaaccatagtagaaagaatggagaactattaactgcctttcttctgtgggctgtgattttcagaggggaatgctaagagtatctcctgatatgcagcatgaatgaaaatggcaagtttcctggccttccttctgctcaactttcgtgtctgcctccttttgcttcagctgctcatgcctcactcagctcagttttctgtgcttggaccctctgggcccatcctggccatggtgggtgaagacgctgatctgccctgtcacctgttcccgaccatgagtgcagagaccatggagctgaagtgggtaagttccagcctaaggcaggtggtgaacgtgtatgcagatggaaaggaagtggaagacaggcagagtgcaccgtatcgagggagaacttcgattctgcgggatggcatcactgcagggaaggctgctctccgaatacacaacgtcacagcctctgacagtggaaagtacctgtgttatttccaagatggtgacttctatgaaaaagccctggtggagctgaaggttgcagcactgggttctgatcttcacgttgatgtgaagggttacaaggatggagggatccatctggagtgcaggtccactggctggtacccccaaccccaaatacagtggagcaacaacaagggagagaacatcccgactgtggaagcacctgtggttgcagacggagtgggcctgtatgcagtagcagcatctgtgatcatgagaggcagctctggggagggtgtatcctgtaccatcagaagttccctcctcggcctggaaaagacagccagcatttccatcgcagaccccttcttcaggagcgcccagcctggatcgcagcctgggagggaccgcctatcttgctggtgatctcggcggagcagttatcttgtgggaccccggaagggattactggcgtccgtgggacaatgggcaattac

SEQ ID NO: 429520 - DNA, 543 bp, Homo sapiens
ctcttactgtttctcatggtgagaagacaatatttgctttctctttttcctttcttccggatgagaggctaagccataatagaaagaatggagaattattgattgaccgtctttattctgtgggctctgattctccaatgggaataccaagggatggttttccatactggaacccaaaggtaaagacactcaaggacagacatttttggcagagcatagatgaaaatggcaagttccctggctttccttctgctcaactttcatgtctccctcctcttggtccagctgctcactccttgctcagcacagccctaccccgccccagtatcatgcgatggtcccccacaccggttccctgaacccctcttggattaaggaagactgaagacttactttcctcctccctgtgttaactggggctgttggggacagtgcgtgatttctcagtgatttcctacagtgttgttccctccctcaaggctgggaggagataaacaccaacccaggaattctcaataaatttttattacttaacgctgaaaa

SEQ ID NO: 429521 - DNA, 902 bp, Homo sapiens
atctaaacagcaataactaacattaatggagaacttaaaatgctctgagtgctgtgttatgagctttggtggatgtcactcctttaatcctcgcaacaccctgtcgggtagtctcatttagcaagtatggaagttgaggcagggcaacattaagcaacttacataactcatgcagtaatttctgcagttgggagatgttcagcttcagtccccggccctatggccgttcttttccaccctgtttcttcccccataggaagaacccacctgtagccctgaggttcttttcccaggatggctccaggataaggatcactgtaggtggttgtggagttgacacccctgttgactccttcccagctgattgtcagagccttagacccagcacgccttggattagctctgcagagtgtcttggttgagagaataacctcaccgtacccacatgacacgtgatttggaaagagactagaggccacacttgataaatcatggggaacagatgtgttccacccaacaaatgtgataagtgatcgtgcagccagagccagccttccttcaatcaaggtttccaggcagagcaaataccctagagattctctgtgatataggaaatttggatgaagggagctagaagaaatacagggatttttttttttttttaagatggagtcttactctgttgctaggctggagtgcagtggtgcgatctcagctccctgcaacctccacctcctgggttcaaacaattctcctgcctcagcctcccgagtactgggaatataggtgcacgccaccacacccaacaaatttttgtacttttagtacagatgagggttcactatgttggccaggatggtctcgatctcttgacctcatgatccacccacctcggtctccca

SEQ ID NO: 429522 - DNA, 286 bp, Homo sapiens
gcgactcttactgtttctcatggtgagaagacaatatttgctttctctttttcctttcttccggatgagaggctaagccataatagaaagaatggagaattattgattgaccgtctttattctgtgggctctgattctccaatgggaataccaaggggtaagtgcaggaaattgattagagcctgggctacaacgcatgggaggagcggggctgaatcgctgagagtggtgagtgggcatgcagggagagtactctcccagagaaaggggtgcagtgcctgtgtgt

SEQ ID NO: 429523 - DNA, 627 bp, Homo sapiens
ctggccatgcatcctgcaccccccatgacacagggagccaagcctgacatttttgagaaggtgccacctctgatccatcagagctgtagaggagggaagctggaccctggaagagactctaaagaaaaggagagaaaacatgtagtgagaggagaatggagtgggaaaagtacaaaaatactgacctttttcttatctgtgtctccttcctttcagaatggaaaaatggccctcttcaagcctggtgagtaaatcactgcatgttccctggaccaacaacctgagggactatattcctttttccttttttcttctccaactcttgtgatttggagcagaaaagttcccttgacttccttcgtgggtaggaagacgcataaagggtggaggtgaagggaaggagacacacactgagtaatactgcagggagagtgaggatggaaatgccaaggagaggaggtgatgcctgcccaaagaactttgtccttcccaggcttctcatgccacctactgcctgtatctcctcaaaggatttaatgcttccaagctttggcctccacatttttagatgatgattgcaatctgtttttcatgggggttgaggtgaagactgaaggaataatgaac

SEQ ID NO: 429524 - DNA, 4086 bp, Homo sapiens
ctcttactgtttctcatggtgagaagacaatatttgctttctctttttcctttcttccggatgagaggctaagccataatagaaagaatggagaattattgattgaccgtctttattctgtgggctctgattctccaatgggaataccaagggatggttttccatactggaacccaaaggtaaagacactcaaggacagacatttttggcagagcatagatgaaaatggcaagttccctggctttccttctgctcaactttcatgtctccctcctcttggtccagctgctcactccttgctcagctcagttttctgtgcttggaccctctgggcccatcctggccatggtgggtgaagacgctgatctgccctgtcacctgttcccgaccatgagtgcagagaccatggagctgaagtgggtaagttccagcctaaggcaggtggtgaacgtgtatgcagatggaaaggaagtggaagacaggcagagtgcaccgtatcgagggagaacttcgattctgcgggatggcatcactgcagggaaggctgctctccgaatacacaacgtcacagcctctgacagtggaaagtacttgtgttatttccaagatggtgacttctatgaaaaagccctggtggagctgaaggttgcagcactgggttctaatcttcacgtcgaagtgaagggttatgaggatggagggatccatctggagtgcaggtccaccggctggtacccccaaccccaaatacagtggagcaacgccaagggagagaacatcccagctgtggaagcacctgtggttgcagatggagtgggcctatatgaagtagcagcatctgtgatcatgagaggcggctccggggagggtgtatcctgcatcatcagaaattccctcctcggcctggaaaagacagccagcatttccatcgcagaccccttcttcaggagcgcccagccctggatcgcagccctggcagggaccctgcctatcttgctgctgcttctcgccggagccagttacttcttgtggagacaacagaaggaaataactgctctgtccagtgagatagaaagtgagcaagagatgaaagaaatgggatatgctgcaacagagcgggaaataagcctaagagagagcctccaggaggaactcaagaggaaaaaaatccagtacttgactcgtggagaggagtcttcgtccgataccaataagtcagcctgatgctctaatggaaaaatggccctcttcaagcctggtgaggaaatgcttcagatgaggctccaccttgttaaataaattggatgtatggaaaaatagactgcagaaaaggggaactcatttagctcacgagtggtcgagtgaagattgaaaattaacctctgagggccagcacagcagctcatgcctgtaatcctagcactttggaaggctgaggagggcggatcacaaggtcaggagatcaagaccatcctggctaacacggtgaaaccccgtctctactaaaaatacaaaaaataaaaaattagccgggcatggtgacgggcacctgtagtcccagctactcgggaggctgaggcaggagaatggcatgaacccggaaggcagagcttgcagtgagccgagatcacgccactgcactccagcctgggagacagagcgagactctgtctcaagaaaaaaaaaaaaaaaaaaaaagaaaagaaaattaacctctgagtataaagcatcagtgggcagaatcaatgtggggagggaaacaacaaaaatgtagaaagaggatccttgttgcttcttggggccgcatcagggtattgggttaggcagatactgaccttactttcatttcccctctggtcactagacccctggggctttcaccaatgacattgatgagagaatcacattcagggcaggctagggacacggggttctggaaggacctcctcagcatggcccaagccttgcatgctgtggctcttaaatccaggaaaaatggctgaccccatggacacctcctcaaactctctgcagcagatgtaattctgtatccagacatggcaaatgccatcctccttgtttctgaggaccagaggagtgtacagcgtgctgaggagccccatgacctaccagacaaccctgagagatttgaatggcgttactgtgtgcttggctgtgaaagcttcatgtcagagagacactactgggaggtggaagtgggggacagaaaagagtggcatattggggtatgtagtaagaacgtggagaggaaaaaagtttgggtcaaaatgacaccggagaacggatactggactatgggcctgactgatgggaataagtatcgggctctcactgagcccagaaccaacctgaaacttcctgagcctcctaggaaagtgggggtcatcctggactatgagactggacatatctcgttctacaatgccacggatggatctcatatctacacatttctgcacgcctcttcctctgagcctctgtatcctgtattcagaattttgaccttggagcccactgccctgaccgtttgcccaataccaaaagtagagagttcccccgatcccgacctagtgcctgatcattccctggagataccactgaccccaggcttagctaatgaaagtggggagcctcaggctgaagtaacatctctgcttctccctgcccagcctggagctaagggtctcaccctccacaacagccagtcagaaccataaagctacaggcacacactgaagcactttactgatattcattcaattattccataggacagttgtttgagtttggtgccaccttattggcccctttatacagataaggaaactggggtgtagaaaagtgtattgactttacaaagcagacaggaatagtgaacaacagagctgggatctgaacaacaatgactaacattaatggagaatttaaaacgttctgagtgctgtgttatgagctttggtgggtgtcactcctttaatcctcacaacaccctgtcaggtagtctcatttggcaagtatggaagcagaggcagggcaacattaagtagcttacataactcacacggtaatttgtgcagttgggagatgttcagcttcagtccctggccaattgcccgttcttttccagcctgatttttcctgcatgggaagagcccacatgtagccctgaggttcttttcccaggatggctccaggataaggatcactgtaggtggttgtggagttgacacccctgttgactccttcccagctgattgtcagagccttagacccagcacgccttggattagctctgcagagtgtcttggttgagagaataacctcaccgtacccacatgacacgtgatttggaaagagactagaggccacacttgataaatcatggggaacagatgtgttccacccaacaaatgtgataagtgatcgtgcagccagagccagccttccttcaatcaaggtttccaggcagagcaaataccctagagattctctgtgatataggaaatttggatgaagggagctagaagaaatacagggatttttttttttttttaagatggagtcttactctgttgctaggctggagtgcagtggtgcgatctcagctccctgcaacctccacctcctgggttcaaacaattctcctgcctcagcctcccgagtactgggaatataggtgcacgccaccacacccaacaaatttttgtacttttagtacagatgagggttcactatgttggccaggatggtctcgatctcttgacctcatgatccacccacctcggtctcccaaagtgctgggattacaggcttgagccaccgggtgaccggcttacagggatatttttaatcccgttatggactctgtctccaggagaggggtctatccacccctgctcattggtggatgttaaaccaatattcctttcaactgctgcctgctagggaaaaactactcctcattatcatcattattattgctctccactgtatcccctctacctggcatgtgcttgtcaagttctagttgttcaataaatttgttaataatgctgactcttcaac

SEQ ID NO: 429525 - DNA, 3717 bp, Homo sapiens
ctcttactgtttctcatggtgagaagacaatatttgctttctctttttcctttcttccggatgagaggctaagccataatagaaagaatggagaattattgattgaccgtctttattctgtgggctctgattctccaatgggaataccaagggatggttttccatactggaacccaaaggtaaagacactcaaggacagacatttttggcagagcatagatgaaaatggcaagttccctggctttccttctgctcaactttcatgtctccctcctcttggtccagctgctcactccttgctcagctcagttttctgtgcttggaccctctgggcccatcctggccatggtgggtgaagacgctgatctgccctgtcacctgttcccgaccatgagtgcagagaccatggagctgaagtgggtaagttccagcctaaggcaggtggtgaacgtgtatgcagatggaaaggaagtggaagacaggcagagtgcaccgtatcgagggagaacttcgattctgcgggatggcatcactgcagggaaggctgctctccgaatacacaacgtcacagcctctgacagtggaaagtacttgtgttatttccaagatggtgacttctatgaaaaaggttatgaggatggagggatccatctggagtgcaggtccaccggctggtacccccaaccccaaatacagtggagcaacgccaagggagagaacatcccagctgtggaagcacctgtggttgcagatggagtgggcctatatgaagtagcagcatctgtgatcatgagaggcggctccggggagggtgtatcctgcatcatcagaaattccctcctcggcctggaaaagacagccagcatttccatcgcagaccccttcttcaggagcgcccagccctggatcgcagccctggcagggaccctgcctatcttgctgctgcttctcgccggagccagttacttcttgtggagacaacagaaggaaataactgctctgtccagtgagatagaaagtgagcaagagatgaaagaaatgggatatgctgcaacagagcgggaaataagcctaagagagagcctccaggaggaactcaagaggaaaaaaatccagtacttgactcgtggagaggagtcttcgtccgataccaataagtcagcctgatgctctaatggaaaaatggccctcttcaagcctggtgaggaaatgcttcagatgaggctccaccttgttaaataaattggatgtatggaaaaatagactgcagaaaaggggaactcatttagctcacgagtggtcgagtgaagattgaaaattaacctctgagggccagcacagcagctcatgcctgtaatcctagcactttggaaggctgaggagggcggatcacaaggtcaggagatcaagaccatcctggctaacacggtgaaaccccgtctctactaaaaatacaaaaaataaaaaattagccgggcatggtgacgggcacctgtagtcccagctactcgggaggctgaggcaggagaatggcatgaacccggaaggcagagcttgcagtgagccgagatcacgccactgcactccagcctgggagacagagcgagactctgtctcaagaaaaaaaaaaaaaaaaaaaaagaaaagaaaattaacctctgagtataaagcatcagtgggcagaatcaatgtggggagggaaacaacaaaaatgtagaaagaggatccttgttgcttcttggggccgcatcagggtattgggttaggcagatactgaccttactttcatttcccctctggtcactagacccctggggctttcaccaatgacattgatgagagaatcacattcagggcaggctagggacacggggttctggaaggacctcctcagcatggcccaagccttgcatgctgtggctcttaaatccaggaaaaatggctgaccccatggacacctcctcaaactctctgcagcagatgtaattctgtatccagacatggcaaatgccatcctccttgtttctgaggaccagaggagtgtacagcgtgctgaggagccccatgacctaccagacaaccctgagagatttgaatggcgttactgtgtgcttggctgtgaaagcttcatgtcagagagacactactgggaggtggaagtgggggacagaaaagagtggcatattggggtatgtagtaagaacgtggagaggaaaaaagtttgggtcaaaatgacaccggagaacggatactggactatgggcctgactgatgggaataagtatcgggctctcactgagcccagaaccaacctgaaacttcctgagcctcctaggaaagtgggggtcatcctggactatgagactggacatatctcgttctacaatgccacggatggatctcatatctacacatttctgcacgcctcttcctctgagcctctgtatcctgtattcagaattttgaccttggagcccactgccctgaccgtttgcccaataccaaaagtagagagttcccccgatcccgacctagtgcctgatcattccctggagataccactgaccccaggcttagctaatgaaagtggggagcctcaggctgaagtaacatctctgcttctccctgcccagcctggagctaagggtctcaccctccacaacagccagtcagaaccataaagctacaggcacacactgaagcactttactgatattcattcaattattccataggacagttgtttgagtttggtgccaccttattggcccctttatacagataaggaaactggggtgtagaaaagtgtattgactttacaaagcagacaggaatagtgaacaacagagctgggatctgaacaacaatgactaacattaatggagaatttaaaacgttctgagtgctgtgttatgagctttggtgggtgtcactcctttaatcctcacaacaccctgtcaggtagtctcatttggcaagtatggaagcagaggcagggcaacattaagtagcttacataactcacacggtaatttgtgcagttgggagatgttcagcttcagtccctggccaattgcccgttcttttccagcctgatttttcctgcatgggaagagcccacatgtagccctgaggttcccttcccaggacagctccaggatcgagatcactgtgagtggttgtggagttaagacccctatggactccttcccagctgattatcagagccttagacccagcactccttggattggctctgcagagtgtcttggttgagagaataacgttgcagttcccacagggcatgtgactttgaaagagactagaggccacactcagttaataatggggcacagatgtgttcccacccaacaaatgtgataagtgatcgtgcagccagagccagccttccttcagtcaaggtttccaggcagagcaaataccctagagattctctgtaatattggtaatttggatgaaggaagctagaagaattacagggatgtttttaatcccactatggactcagtctcctggaaaaggatctgtccactcctggtcattggtggatgttaaacccatattcctttcaactgctgcctgctagggaaaactgctcctcattatcatcactattattgctcaccactgtatcccctctactgggcaagtgcttgtcaagttctagttgttcaataaatttgttaataatgctga

SEQ ID NO: 429526 - DNA, 2940 bp, Homo sapiens
ctagaggttacccagttccttctctaaatttcccttcatgtcgaagtgaagggttatgaggatggagggatccatctggagtgcaggtccaccggctggtacccccaaccccaaatacagtggagcaacgccaagggagagaacatcccagctgtggaagcacctgtggttgcagatggagtgggcctatatgaagtagcagcatctgtgatcatgagaggcggctccggggagggtgtatcctgcatcatcagaaattccctcctcggcctggaaaagacagccagcatttccatcgcagagagcctccaggaggaactcaagaggaaaaaaatccagtacttgactcgtggagaggagtcttcgtccgataccaataagtcagcctgatgctctaatggaaaaatggccctcttcaagcctggtgaggaaatgcttcagatgaggctccaccttgttaaataaattggatgtatggaaaaatagactgcagaaaaggggaactcatttagctcacgagtggtcgagtgaagattgaaaattaacctctgagggccagcacagcagctcatgcctgtaatcctagcactttggaaggctgaggagggcggatcacaaggtcaggagatcaagaccatcctggctaacacggtgaaaccccgtctctactaaaaatacaaaaaataaaaaattagccgggcatggtgacgggcacctgtagtcccagctactcgggaggctgaggcaggagaatggcatgaacccggaaggcagagcttgcagtgagccgagatcacgccactgcactccagcctgggagacagagcgagactctgtctcaagaaaaaaaaaaaaaaaaaaaaagaaaagaaaattaacctctgagtataaagcatcagtgggcagaatcaatgtggggagggaaacaacaaaaatgtagaaagaggatccttgttgcttcttggggccgcatcagggtattgggttaggcagatactgaccttactttcatttcccctctggtcactagacccctggggctttcaccaatgacattgatgagagaatcacattcagggcaggctagggacacggggttctggaaggacctcctcagcatggcccaagccttgcatgctgtggctcttaaatccaggaaaaatggctgaccccatggacacctcctcaaactctctgcagcagatgtaattctgtatccagacatggcaaatgccatcctccttgtttctgaggaccagaggagtgtacagcgtgctgaggagccccatgacctaccagacaaccctgagagatttgaatggcgttactgtgtgcttggctgtgaaagcttcatgtcagagagacactactgggaggtggaagtgggggacagaaaagagtggcatattggggtatgtagtaagaacgtggagaggaaaaaagtttgggtcaaaatgacaccggagaacggatactggactatgggcctgactgatgggaataagtatcgggctctcactgagcccagaaccaacctgaaacttcctgagcctcctaggaaagtgggggtcatcctggactatgagactggacatatctcgttctacaatgccacggatggatctcatatctacacatttctgcacgcctcttcctctgagcctctgtatcctgtattcagaattttgaccttggagcccactgccctgaccgtttgcccaataccaaaagtagagagttcccccgatcccgacctagtgcctgatcattccctggagataccactgaccccaggcttagctaatgaaagtggggagcctcaggctgaagtaacatctctgcttctccctgcccagcctggagctaagggtctcaccctccacaacagccagtcagaaccataaagctacaggcacacactgaagcactttactgatattcattcaattattccataggacagttgtttgagtttggtgccaccttattggcccctttatacagataaggaaactggggtgtagaaaagtgtattgactttacaaagcagacaggaatagtgaacaacagagctgggatctgaacaacaatgactaacattaatggagaatttaaaacgttctgagtgctgtgttatgagctttggtgggtgtcactcctttaatcctcacaacaccctgtcaggtagtctcatttggcaagtatggaagcagaggcagggcaacattaagtagcttacataactcacacggtaatttgtgcagttgggagatgttcagcttcagtccctggccaattgcccgttcttttccagcctgatttttcctgcatgggaagagcccacatgtagccctgaggttcccttcccaggacagctccaggatcgagatcactgtgagtggttgtggagttaagacccctatggactccttcccagctgattatcagagccttagacccagcactccttggattggctctgcagagtgtcttggttgagagaataacgttgcagttcccacagggcatgtgactttgaaagagactagaggccacactcagttaataatggggcacagatgtgttcccacccaacaaatgtgataagtgatcgtgcagccagagccagccttccttcagtcaaggtttccaggcagagcaaataccctagagattctctgtaatattggtaatttggatgaaggaagctagaagaattacagggatgtttttaatcccactatggactcagtctcctggaaaaggatctgtccactcctggtcattggtggatgttaaacccatattcctttcaactgctgcctgctagggaaaactgctcctcattatcatcactattattgctcaccactgtatcccctctactgggcaagtgcttgtcaagttctagttgttcaataaatttgttaataatgctga

SEQ ID NO: 429527 - DNA, 1726 bp, Homo sapiens
gtcagcatttttcctggatttaagagcacagcatgcaaggttgggcatgctgaggaggtcttccagaaacccgtgtccctagcctgccctgaatgttgatttgaatggcgttactgtgtgcttggctgtgaaagcttcatgtcagagagacactactgggaggtggaagtgggggacagaaaagagtggcatattggggtatgtagtaagaacgtggagaggaaaaaagtttgggtcaaaatgacaccggagaacggatactggactatgggcctgactgatgggaataagtatcgggctctcactgagcccagaaccaacctgaaacttcctgagcctcctaggaaagtgggggtcatcctggactatgagactggacatatctcgttctacaatgccacggatggatctcatatctacacatttctgcacgcctcttcctctgagcctctgtatcctgtattcagaattttgaccttggagcccactgccctgaccgtttgcccaataccaaaagtagagagttcccccgatcccgacctagtgcctgatcattccctggagataccactgaccccaggcttagctaatgaaagtggggagcctcaggctgaagtaacatctctgcttctccctgcccagcctggagctaagggtctcaccctccacaacagccagtcagaaccataaagctacaggcacacactgaagcactttactgatattcattcaattattccataggacagttgtttgagtttggtgccaccttattggcccctttatacagataaggaaactggggtgtagaaaagtgtattgactttacaaagcagacaggaatagtgaacaacagagctgggatctgaacaacaatgactaacattaatggagaatttaaaacgttctgagtgctgtgttatgagctttggtgggtgtcactcctttaatcctcacaacaccctgtcaggtagtctcatttggcaagtatggaagcagaggcagggcaacattaagtagcttacataactcacacggtaatttgtgcagttgggagatgttcagcttcagtccctggccaattgcccgttcttttccagcctgatttttcctgcatgggaagagcccacatgtagccctgaggttcccttcccaggacagctccaggatcgagatcactgtgagtggttgtggagttaagacccctatggactccttcccagctgattatcagagccttagacccagcactccttggattggctctgcagagtgtcttggttgagagaataacgttgcagttcccacagggcatgtgactttgaaagagactagaggccacactcagttaataatggggcacagatgtgttcccacccaacaaatgtgataagtgatcgtgcagccagagccagccttccttcagtcaaggtttccaggcagagcaaataccctagagattctctgtaatattggtaatttggatgaaggaagctagaagaattacagggatgtttttaatcccactatggactcagtctcctggaaaaggatctgtccactcctggtcattggtggatgttaaacccatattcctttcaactgctgcctgctagggaaaactgctcctcattatcatcactattattgctcaccactgtatcccctctactgggcaagtgcttgtcaagttctagttgttcaataaatttgttaataatgctga

SEQ ID NO: 429528 - DNA, 1972 bp, Homo sapiens
ctcttactgtttctcatggtgagaagacaatatttgctttctctttttcctttcttccggatgagaggctaagccataatagaaagaatggagaattattgattgaccgtctttattctgtgggctctgattctccaatgggaataccaagggatggttttccatactggaacccaaaggtaaagacactcaaggacagacatttttggcagagcatagatgaaaatggcaagttccctggctttccttctgctcaactttcatgtctccctcctcttggtccagctgctcactccttgctcagctcagttttctgtgcttggaccctctgggcccatcctggccatggtgggtgaagacgctgatctgccctgtcacctgttcccgaccatgagtgcagagaccatggagctgaagtgggtaagttccagcctaaggcaggtggtgaacgtgtatgcagatggaaaggaagtggaagacaggcagagtgcaccgtatcgagggagaacttcgattctgcgggatggcatcactgcagggaaggctgctctccgaatacacaacgtcacagcctctgacagtggaaagtacttgtgttatttccaagatggtgacttctatgaaaaagccctggtggagctgaaggttgcagcactgggttctaatcttcacgtcgaagtgaagggttatgaggatggagggatccatctggagtgcaggtccaccggctggtacccccaaccccaaatacagtggagcaacgccaagggagagaacatcccagctgtggaagcacctgtggttgcagatggagtgggcctatatgaagtagcagcatctgtgatcatgagaggcggctccggggagggtgtatcctgcatcatcagaaattccctcctcggcctggaaaagacagccagcatttccatcgcagaccccttcttcaggagcgcccagccctggatcgcagccctggcagggaccctgcctatcttgctgctgcttctcgccggagccagttacttcttgtggagacaacagaaggaaataactgctctgtccagtgagatagaaagtgagcaagagatgaaagaaatgggatatgctgcaacagagcgggaaataagcctaagagagagcctccaggaggaactcaagaggaaaaaaatccagtacttgactcgtgagtggctttgacattttctctgaattcaaatctgttactctctctctgcttcattattttccagcccataagtcatagcccagggttgaaaagtggtcttggatccctttacccagaaaaagaaaacaagtgtggctctttggagaaaccacccagtgctttttctctctagaaaaaaaaaaaaaaaaaaaagaggtcttcaatctctttgtactaggggctacagacccttaagctctaaaaagcactgaggaatatccaggggtacacttcaaaaggaagagggaagagaaggatgaggtgcattttctatggcaggaaacttacttgttgtttcccataatctagaggctgttgaaaggaaaacaagaatggaagatttaagaaataagaaaatcagaaaagagagagggagggagaaaagtgtgtctaataaagaggagtagctacagtggctcagttggtacagatagatcataactgctttcaaaaactagtccctgaaattgctcattaaatttcccaaattctttttagagcaaggtacgaaatgatacagattgagaaggatgaatcttgtactcctaggcatacacatatagacatggtgacacctatgcccaggtacacattcaaaacagatgagctggaccccattgggaaggaactctcacagtgcctgccctgccactagcgttcaaccgatgttcccagacttgatattaagaagaggtgaagaaagaattgtacctgaagatggagaccatggggaagggtgggatggta

SEQ ID NO: 429529 - DNA, 1955 bp, Homo sapiens
ctcttactgtttctcatggtgagaagacaatatttgctttctctttttcctttcttccggatgagaggctaagccataatagaaagaatggagaattattgattgaccgtctttattctgtgggctctgattctccaatgggaataccaagggatggttttccatactggaacccaaaggtaaagacactcaaggacagacatttttggcagagcatagatgaaaatggcaagttccctggctttccttctgctcaactttcatgtctccctcctcttggtccagctgctcactccttgctcagctcagttttctgtgcttggaccctctgggcccatcctggccatggtgggtgaagacgctgatctgccctgtcacctgttcccgaccatgagtgcagagaccatggagctgaagtgggtaagttccagcctaaggcaggtggtgaacgtgtatgcagatggaaaggaagtggaagacaggcagagtgcaccgtatcgagggagaacttcgattctgcgggatggcatcactgcagggaaggctgctctccgaatacacaacgtcacagcctctgacagtggaaagtacttgtgttatttccaagatggtgacttctatgaaaaagccctggtggagctgaaggttgcagcactgggttctaatcttcacgtcgaagtgaagggttatgaggatggagggatccatctggagtgcaggtccaccggctggtacccccaaccccaaatacagtggagcaacgccaagggagagaacatcccagctgtggaagcacctgtggttgcagatggagtgggcctatatgaagtagcagcatctgtgatcatgagaggcggctccggggagggtgtatcctgcatcatcagaaattccctcctcggcctggaaaagacagccagcatttccatcgcagaccccttcttcaggagcgcccagaggtggatcgccgccctggcagggaccctgcctgtcttgctgctgcttcttgggggagccggttacttcctgtggcaacagcaggaggaaaaaaagactcagttcagaaagaaaaagagagagcaagagttgagagaaatggcatggagcacaatgaagcaagaacaaagcacaagagtgaagctcctggaggaactcagatggagaagtatccagtatgcatctcggggagagagacattcagcctataatgaatggaaaaaggccctcttcaagcctgcggatgtgattctggatccaaaaacagcaaaccccatcctccttgtttctgaggaccagaggagtgtgcagcgtgccaaggagccccaggatctgccagacaaccctgagagatttaattggcattattgtgttctcggctgtgagagcttcatatcagggagacattactgggaggtggaggtaggggacaggaaagagtggcatataggggtgtgcagtaagaatgtgcagagaaaaggctgggtcaaaatgacacctgagaatggattctggactatggggctgactgatgggaataagtatcggactctaactgagcccagaaccaacctgaaacttcctaagccccctaagaaagtgggggtcttcctggactatgagactggagatatctcattctacaatgctgtggatggatcgcatattcatactttcctggacgtctccttctctgaggctctatatcctgttttcagaattttgaccttggagcccacggccctgactatttgtccagcgtgaaaagaagaagagagttcctccaattctgaccgagtgctgatcattccctagagacaccagtaaccccgggcttagctaacgaaagtggggagcctcaggctgaagtaacttttctctgcttctccctgcccagctcagagctgagggcctccccctccacagcaaccaatcacaaccataaagctacaagcacg

SEQ ID NO: 429530 - DNA, 1268 bp, Homo sapiens
tccacctatctgcttagcagtgtctcgtgacattcacctctgtctgtcccttgcaggatggagaagaacattcttacatgctgaaggagatttaaccatagtagaaagaatggagaactattaactgcctttcttctgtgggctgtgattttcagaggggaatgctaagagtatctcctgatatgcagcatgaatgaaaatggcaagtttcctggccttccttctgctcaactttcgtgtctgcctccttttgcttcagctgctcatgcctcactcagctcagttttctgtgcttggaccctctgggcccatcctggccatggtgggtgaagacgctgatctgccctgtcacctgttcccgaccatgagtgcagagaccatggagctgaagtgggtaagttccagcctaaggcaggtggtgaacgtgtatgcagatggaaaggaagtggaagacaggcagagtgcaccgtatcgagggagaacttcgattctgcgggatggcatcactgcagggaaggctgctctccgaatacacaacgtcacagcctctgacagtggaaagtacctgtgttatttccaagatggtgacttctatgaaaaagccctggtggagctgaaggttgcagcactgggttctgatcttcacgttgatgtgaagggttacaaggatggagggatccatctggagtgcaggtccactggctggtacccccaaccccaaatacagtggagcaacaacaagggagagaacatcccgactgtggaagcacctgtggttgcagacggagtgggcctgtatgcagtagcagcatctgtgatcatgagaggcagctctggggagggtgtatcctgtaccatcagaagttccctcctcggcctggaaaagacagccagcatttccatcgcagaccccttcttcaggagcgcccagaggtggatcgccgccctggcagggaccctgcctgtcttgctgctgcttcttgggggagccggttacttcctgtggcaacagcaggaggaaaaaaagactcagttcagaaagaaaaagagagagcaagagttgagagaaatggcatggagcacaatgaagcaagaacaaagcacaagagtgaagctcctggaggaactcagatggagaagtatccagtatgcatctcggggagagagacattcagcctataatgaatggaaaaaggccctcttcaagcctggtgaggaaatgcttcagatgaggctccactttgttaaataaaatggatgaatgaaaa

SEQ ID NO: 429531 - DNA, 2050 bp, Homo sapiens
gttattattcctcacgatgacccgacagtctctgctttctttttcctttcttccagaaggagatttaaccatagtagaaagaatggagaactattaactgcctttcttctgtgggctgtgattttcagaggggaatgctaagaggtgattttcaatgttgggactcaaaggtgaagacactgaaggacagaatttttggcagaggaaagatcttcttcggtcaccatacttgagttagctctagggaagtggaggtttccatttggaattctatagcttcttccaggtcatagtgtctgccccccaccttccagtatctcctgatatgcagcatgaatgaaaatggcaagtttcctggccttccttctgctcaactttcgtgtctgcctccttttgcttcagctgctcatgcctcactcagctcagttttctgtgcttggaccctctgggcccatcctggccatggtgggtgaagacgctgatctgccctgtcacctgttcccgaccatgagtgcagagaccatggagctgaagtgggtaagttccagcctaaggcaggtggtgaacgtgtatgcagatggaaaggaagtggaagacaggcagagtgcaccgtatcgagggagaacttcgattctgcgggatggcatcactgcagggaaggctgctctccgaatacacaacgtcacagcctctgacagtggaaagtacctgtgttatttccaagatggtgacttctatgaaaaagccctggtggagctgaaggttgcagcactgggttctgatcttcacgttgatgtgaagggttacaaggatggagggatccatctggagtgcaggtccactggctggtacccccaaccccaaatacagtggagcaacaacaagggagagaacatcccgactgtggaagcacctgtggttgcagacggagtgggcctgtatgcagtagcagcatctgtgatcatgagaggcagctctggggagggtgtatcctgtaccatcagaagttccctcctcggcctggaaaagacagccagcatttccatcgcagaccccttcttcaggagcgcccagaggtggatcgccgccctggcagggaccctgcctgtcttgctgctgcttcttgggggagccggttacttcctgtggcaacagcaggaggaaaaaaagactcagttcagaaagaaaaagagagagcaagagttgagagaaatggcatggagcacaatgaagcaagaacaaagcacaagagatggagaagtatccagtatgcatctcggggagagagacattcagcctataatgaatggaaaaaggccctcttcaagcctgcggatgtgattctggatccaaaaacagcaaaccccatcctccttgtttctgaggaccagaggagtgtgcagcgtgccaaggagccccaggatctgccagacaaccctgagagatttaattggcattattgtgttctcggctgtgagagcttcatatcagggagacattactgggaggtggaggtaggggacaggaaagagtggcatataggggtgtgcagtaagaatgtgcagagaaaaggctgggtcaaaatgacacctgagaatggattctggactatggggctgactgatgggaataagtatcggactctaactgagcccagaaccaacctgaaacttcctaagccccctaagaaagtgggggtcttcctggactatgagactggagatatctcattctacaatgctgtggatggatcgcatattcatactttcctggacgtctccttctctgaggctctatatcctgttttcagaattttgaccttggagcccacggccctgactatttgtccagcgtgaaaagaagaagagagttcctccaattctgaccgagtgctgatcattccctagagacaccagtaaccccgggcttagctaacgaaagtggggagcctcaggctgaagtaacttttctctgcttctccctgcccagctcagagctgagggcctccccctccacagcaaccaatcacaaccataaagctacaagcacg

SEQ ID NO: 429532 - DNA, 1206 bp, Homo sapiens
ctcttactgtttctcatggtgagaagacaatatttgctttctctttttcctttcttccggatgagaggctaagccataatagaaagaatggagaattattgattgaccgtctttattctgtgggctctgattctccaatgggaataccaagggatggttttccatactggaacccaaaggtaaagacactcaaggacagacatttttggcagagcatagatgaaaatggcaagttccctggctttccttctgctcaactttcatgtctccctcctcttggtccagctgctcactccttgctcagctcagttttctgtgcttggaccctctgggcccatcctggccatggtgggtgaagacgctgatctgccctgtcacctgttcccgaccatgagtgcagagaccatggagctgaagtgggtaagttccagcctaaggcaggtggtgaacgtgtatgcagatggaaaggaagtggaagacaggcagagtgcaccgtatcgagggagaacttcgattctgcgggatggcatcactgcagggaaggctgctctccgaatacacaacgtcacagcctctgacagtggaaagtacttgtgttatttccaagatggtgacttctatgaaaaagccctggtggagctgaaggttgcagcactgggttctgatcttcacgttgatgtgaagggttacaaggatggagggatccatctggagtgcaggtccactggctggtacccccaaccccaaatacagtggagcaacaacaagggagagaacatcccgactgtggaagcacctgtggttgcagacggagtgggcctgtatgcagtagcagcatctgtgatcatgagaggcagctctggggagggtgtatcctgtaccatcagaagttccctcctcggcctggaaaagacagccagcatttccatcgcaggtcagtacctgcttggcctcaggttttctgagctgggctgtggcagttgaatgaagggggaggtgttagtgtctgcagtcaacctgggtctctgcactgaatataaggcccaaagcacagacctggaggctcctccttgcaccgggggagcttctcttctccataaagctgttcatgacgcaaacatttactgaacatttcctgtctgccagaagtataacagtaattggaattaggggataattgttaagataagctgcgtatgtaaagtc

SEQ ID NO: 429533 - DNA, 1097 bp, Homo sapiens
tccacctatctgcttagcagtgtctcgtgacattcacctctgtctgtcccttgcaggatggagaagaacattcttacatgctgaaggagatttaaccatagtagaaagaatggagaactattaactgcctttcttctgtgggctgtgattttcagaggggaatgctaagagtatctcctgatatgcagcatgaatgaaaatggcaagtttcctggccttccttctgctcaactttcgtgtctgcctccttttgcttcagctgctcatgcctcactcagctcagttttctgtgcttggaccctctgggcccatcctggccatggtgggtgaagacgctgatctgccctgtcacctgttcccgaccatgagtgcagagaccatggagctgaagtgggtaagttccagcctaaggcaggtggtgaacgtgtatgcagatggaaaggaagtggaagacaggcagagtgcaccgtatcgagggagaacttcgattctgcgggatggcatcactgcagggaaggctgctctccgaatacacaacgtcacagcctctgacagtggaaagtacctgtgttatttccaagatggtgacttctatgaaaaagccctggtggagctgaaggttgcagcactgggttctgatcttcacgttgatgtgaagggttacaaggatggagggatccatctggagtgcaggtccactggctggtacccccaaccccaaatacagtggagcaacaacaagggagagaacatcccgactgtggaagcacctgtggttgcagacggagtgggcctgtatgcagtagcagcatctcggtctcccaaagtgctgggattacaggcttgagccaccgggtgaccggcttacagggatatttttaatcccgttatggactctgtctccaggagaggggtctatccacccctgctcattggtggatgttaaaccaatattcctttcaactgctgcctgctagggaaaaactactcctcattatcatcattattattgctctccactgtatcccctctacctggcatgtgcttgtcaagttctagttgttcaataaatttgttaataatgctgactcttcaac

SEQ ID NO: 429534 - DNA, 1457 bp, Homo sapiens
accctgggatactgcactcattcatgtagctttctcctcactaggaccacacttttgtaagcagctctaaaatgaaattgttcttgaattatggaatgtgagtgtgccatgattccttttgagaccctctctgatacaggcctctcaagaatttaggctaattcatccttccacagcactgggttctgatcttcacgttgatgtgaagggttacaaggatggagggatccatctggagtgcaggtccactggctggtacccccaaccccaaatacagtggagcaacaacaagggagagaacatcccgactgtggaagcacctgtggttgcagacggagtgggcctgtatgcagtagcagcatctgtgatcatgagaggcagctctggggagggtgtatcctgtaccatcagaagttccctcctcggcctggaaaagacagccagcatttccatcgcagaccccttcttcaggagcgcccagaggtggatcgccgccctggcagggaccctgcctgtcttgctgctgcttcttgggggagccggttacttcctgtggcaacagcaggaggaaaaaaagactcagttcagaaagaaaaagagagagcaagagttgagagaaatggcatggagcacaatgaagcaagaacaaagcacaagagatggagaagtatccagtatgcatctcggggagagagacattcagcctataatgaatggaaaaaggccctcttcaagcctgcggatgtgattctggatccaaaaacagcaaaccccatcctccttgtttctgaggaccagaggagtgtgcagcgtgccaaggagccccaggatctgccagacaaccctgagagatttaattggcattattgtgttctcggctgtgagagcttcatatcagggagacattactgggaggtggaggtaggggacaggaaagagtggcatataggggtgtgcagtaagaatgtgcagagaaaaggctgggtcaaaatgacacctgagaatggattctggactatggggctgactgatgggaataagtatcggactctaactgagcccagaaccaacctgaaacttcctaagccccctaagaaagtgggggtcttcctggactatgagactggagatatctcattctacaatgctgtggatggatcgcatattcatactttcctggacgtctccttctctgaggctctatatcctgttttcagaattttgaccttggagcccacggccctgactatttgtccagcgtgaaaagaagaagagagttcctccaattctgaccgagtgctgatcattccctagagacaccagtaaccccgggcttagctaacgaaagtggggagcctcaggctgaagtaacttttctctgcttctccctgcccagctcagagctgagggcctccccctccacagcaaccaatcacaaccataaagctacaagcacg

SEQ ID NO: 429535 - DNA, 871 bp, Homo sapiens
tggaccggattttgggctgtagcacaatgaagcaagaacaatgcacaagagtgaagctcctggaggaactcagatggagaagtatccagtatgcatctcggggagagagacattcagcctataatgaatggaaaaaggccctcttcaagcctgcggatgtgattctggatccaaaaacagcaaaccccatcctccttgtttctgaggaccagaggagtgtgcagcgtgccaaggagccccaggatctgccagacaaccctgagagatttaattggcattattgtgttctcggctgtgagagcttcatatcagggagacattactgggaggtggaggtaggggacaggaaagagtggcatataggggtgtgcagtaagaatgtgcagagaaaaggctgggtcaaaatgacacctgagaatggattctggactatggggctgactgatgggaataagtatcggactctaactgagcccagaaccaacctgaaacttcctaagccccctaagaaagtgggggtcttcctggactatgagactggagatatctcattctacaatgctgtggatggatcgcatattcatactttcctggacgtctccttctctgaggctctatatcctgttttcagaattttgaccttggagcccacggccctgactatttgtccagcgtgaaaagaagaagagagttcctccaattctgaccgagtgctgatcattccctagagacaccagtaaccccgggcttagctaacgaaagtggggagcctcaggctgaagtaacttttctctgcttctccctgcccagctcagagctgagggcctccccctccacagcaaccaatcacaaccataaagctacaagcacg

SEQ ID NO: 429536 - DNA, 645 bp, Homo sapiens
tgcagggagacagtgcctccagcgggtgctgccgcgagcggccagccgaggggctggaaatgaaagtaaagcgctccagagccacatggacggagctgccggggcggcggcgccgggagcaggatgcggccgcccgtaattaaatagcatttactcttattattactaataataataacgtaatcatacctctagtcatagcataccatttatcgggctcggcgcaggcccgcggggagcgcagcccggcggagagactgatggagaggcagaaacggaaggcggacatcgagaaagggctgcagttcattcagccttagttcccatggccctgaaacacacacatttcccccttcctttcccagaagccactggccccccatagcacccagtgcatcctttttacaagtggaagaactaggatggctttccaaagtcttctagaaatgaagttctttctctgtgcagctttcccccttggagcaggagtgaagatgtttcattatcttgggcctgggaaaccacttccccaggcttctccctccccccacccccataggaacaggatttggccttagcttctgggcctatcggctgccttccctctacttcctaccacctcttctgccttcctttgagctctgt

SEQ ID NO: 429537 - DNA, 5868 bp, Homo sapiens
  misc_feature (3330)..(3330): n is a, c, g, or t
  misc_feature (3364)..(3364): n is a, c, g, or t
tgcagggagacagtgcctccagcgggtgctgccgcgagcggccagccgaggggctggaaatgaaagtaaagcgctccagagccacatggacggagctgccggggcggcggcgccgggagcaggatgcggccgcccgtaattaaatagcatttactcttattattactaataataataacgtaatcatacctctagtcatagcataccatttatcgggctcggcgcaggcccgcggggagcgcagcccggcggagagactgatggagaggcagaaacggaaggcggacatcgagaaagggctgcagttcattcagtcgacactacccctaaagcaagaagaatatgaggcctttctgctcaagctggtgcagaatctgtttgctgagggcaatgatctgttccgggagaaggactataagcaggctctggtgcagtacatggaagggctgaacgtggccgactacgctgcctctgaccaggtggccctgccccgggagctgctgtgcaagctgcatgtcaatagggccgcctgctacttcaccatgggcctgtatgagaaggcgctggaggacagcgagaaggcgctgggcctggacagtgagagtatccgggcgttgttccgcaaggcacgcgctctcaatgaactgggacgccacaaggaggcctacgagtgcagcagccggtgttccctcgccctgccccacgatgaaagcgtgactcagcttggtcaggagctggcccagaaactggggctgcgagttcgcaaggcgtataagaggccccaggaattggaaaccttttctctgctcagtaacggcactgcggctggcgtggcagatcagggaacttctaatggattggggtccatagatgacatcgaaacagactgctacgtggaccctcgaggctccccagcccttctcccctccacgcccacgatgcccctgttccctcacgttctggacctgctggcccccctggacagcagcaggaccctccccagcaccgacagcctggatgacttctcagacggggatgtctttggcccagagctggacaccctcctggactcgctgtctctggtccagggtggcctgtctggcagcggcgtgcctagtgagttgccccagctgatacccgtgttccccggcgggaccccactgctaccacctgtggtgggtggctccatccctgtctccagcccactgccccccgcctccttcggcttggtcatggacccctccaagaagctggccgcctctgtgctggatgccctcgatcccccgggccccacgctggaccccctggacctgctgccgtactcggagacccggctggatgcactcgacagctttgggtcgacacgaggctccctggacaaacctgactccttcatggaggagaccaactcacaggaccaccgtccccctagcggtgctcagaaaccagccccctcgccagagccctgcatgcccaacactgccttgctcatcaagaaccccttggctgccacccacgagttcaagcaggcctgccagctctgctaccccaagacaggcccccgggctggcgactacacctaccgtgagggccttgagcacaagtgcaagcgggacatcctgctcggccggctccggagctcggaggaccagacctggaagcggatccggccccggcccactaagaccagcttcgtgggctcctactacctgtgcaaagacatgattaacaagcaggactgtaagtacggggataactgcaccttcgcctaccatcaggaggagatcgacgtgtggaccgaggagcggaagggcaccctcaaccgcgacctgctcttcgacccgctggggggtgttaagcgcggcagcctcaccatcgccaagctcctgaaggagcaccagggcatcttcaccttcctctgcgagatctgctttgacagtaaaccccggatcatcagcaaaggcaccaaggactctccgtctgtctgctccaacctggctgccaagcacagcttctacaacaacaagtgcctggtgcacatcgtccgctccacctccctcaagtactccaagatccgccagttccaggagcacttccagttcgacgtgtgccgccatgaggtgcgctacggctgcctgcgggaggacagctgccacttcgcccacagcttcatcgagctcaaggtctggctgctgcagcagtactcaggcatgacccacgaagacatcgttcaggagtctaagaagtactggcagcagatggaggcgcatgcggggaaggccagcagcagcatgggtgctccgaggacacatgggcccagcacctttgacctgcagatgaagtttgtatgtggccagtgctggagaaacgggcaggtggtggagcctgacaaggacctcaagtactgtagtgccaaggcccggcactgctggaccaaggagcggcgggtccttctggtgatgtccaaggccaagaggaaatgggtgtcagtgaggccactgccatccattcgtaacttcccacagcaatacgatctctgcatccatgcacagaacggccgcaagtgccaatatgtggggaactgctccttcgcacacagcccggaggagagggacatgtggaccttcatgaaggagaacaagatcctggacatgcagcagacctatgacatgtggctgaaaaaacacaacccaggaaagcctggagaagggacccccatcagttctcgggaaggggagaagcagatccagatgcccacggactacgcggacatcatgatgggctaccactgctggctctgcggcaagaacagcaacagcaagaagcagtggcagcagcacatccagtccgagaagcacaaggagaaggtcttcacgtccgacagtgacgccagcggctgggccttccgcttccccatgggcgagttccggctctgcgacaggctccagaagggcaaagcctgcccagatggggacaagtgccgctgcgcccatggacaggaggagctcaacgagtggctggaccggcgcgaggtgctgaagcagaagttggccaaggctcgcaaggacatgctgctgtgcccacgggacgacgactttggcaaatacaacttcctgctgcaagaggacggggaccttgccggtgccaccccagaagcccctgctgctgctgccaccgccaccactggggagtagggccaggtgttggccgtgggtgaagtcctggggtcagggggtggggtggggccagaaggcctgatagaagggtcagggcaggccaggggggtggggggccgccctcatcaggcagcccccagccccctgaggcccngtccatcttctccccaccaccgccccggtgtgcntacccaggcgcacgtgctgcagcccccggaggccccgctgaaacctgggctgcccttcccccacccccacggctctcctggttgaggagggaggggcctggctgacccctccagcttcagcctccagctttaacttctgtctgctcctaatgggggcccaaagctcagggctggggagcctggggtccccacttgaatctccagcaggagggtccttctctccctggcccgtcctcctcccaccccctccccctgggggcaaatcaggacacaacagagggcagaggccccattagctttaaaatgtagccccaggttggagctgggaacactgtactggccacttaccctctggggcctcagctttccctccggaaggctgggaggaggtgggctagatgatctttggagcttaaggagtcccagccctttctctgatgccaccacctgaaccctgctccctcgtgggccagtgaaaatagactgtaggtcctcagagccttcagagatgatccagcccaaaccccattttgcagagaggaaaactgaggcctagaagggaggagtggtccacccacggtcccagcacaaggcagagctgggatgaaaacagggctgaaaagactcagggccaattattggctgagcccacggtcccctcagcagggatgcgatggtctctgaatcagtgtgcagctggggtcccaggcagcgctgcctgggggctggggaggggaggcccagaggagggctggccatgtgagcaccccatgaagggaccgccccctcccaaggatggtccctttgggtgcagcagcagaggtcacctcctgacatgcgctctgggaaaggtggcagagggcaggacaccatgagctcaggatctgtgtgaggtgtgggaggtgggaagggtgagggtctgggggaatgcggagaaaagggaggcttgaccccgggcaccatgggccactccaggatgggacacggcccctctttcttggggacccagtatgtcctctcctctagacccagacatacagttataaccgtctgtcctagcccctccctaatccctggccctcccagctgtctgggacttcagtggacccccagcccctgcccccactcaccaaggcctcgctcgtccctctcgtctgacatgtctgtgtgcacccccctcctctccaccctaccttccatcaaccagggcagatccaccgtgccctggttccccagacattccagaatgccccacatcattggcacaggagtggggcagccccggaaggaaccagggattaggctgtaggggggtgagaaggagagaagggaccaccccattcttctcaagcaaggattgccagcgcgcgctgacacagtgatgggctgcccagggctggaggggacgctgttcctcccgccgccactgcccaacctttcctgataatcgtggcatgcgccctttcctcttccctgccccaccccctggccgcagcaggccagcactgcagagtttgggtgctggtggtgtggctgtaggggaggggagaccacacccaaggtgggggctgtggccatgtgtggccgtgatgtcgatgatactcgttttccctgatccgtggtgttgcagtccgttgtcaccagccttgtttctagtgtgtatatatgtcgcccccgtgatgcatatatacacaggtattaaatatatcgctctatataatattatatatgtgtgtggtatccaaggaatcacttttatgagggctaaagataaagaatttggccagaaaatgcagccatccttgtgtgattaggagggtttcaggggccactggactatttgcaaggtgacagggactggagccatggctcagaggtgattcgggcagccagggacaggagccaccctccccaggcccaactctgctagcttcccagaccacccccatcgagtgcggagagagtgggagtgctcagggaaagaaggtgatttgtatttgtctccccgctgaaaagaacaggattcaagtccagagttttcatcttcagcctgtgatctgtccagggacccttgggatctggggcttcctggcctggccagagctggagcccccacagggtaaggaagagagagtgggaggcagagtgtgatggggaggagggacaggaagacccttttaatgatgagggtaactatttcagttgtgagccttctagggccccaggctgggaggctcagaggactgaatctgggacctgtgttccccccggcaggcagggacaagatggcatggcaagcatgggggcggggtgggtggggagggatgctgcatttctcagctgggcagtaatcaatttaatggtcctttaaaatgtctgtgtattaaaaatttaagaataccacactttaatattaaatattcataaggtctagtatcttgataataatgtagatgttttaataacaatttttgtccttcttaaaataaaatgaaagaaacttg

SEQ ID NO: 429538 - DNA, 6938 bp, Homo sapiens
  misc_feature (1948)..(1948): n is a, c, g, or t
  misc_feature (4400)..(4400): n is a, c, g, or t
  misc_feature (4434)..(4434): n is a, c, g, or t
tgcagggagacagtgcctccagcgggtgctgccgcgagcggccagccgaggggctggaaatgaaagtaaagcgctccagagccacatggacggagctgccggggcggcggcgccgggagcaggatgcggccgcccgtaattaaatagcatttactcttattattactaataataataacgtaatcatacctctagtcatagcataccatttatcgggctcggcgcaggcccgcggggagcgcagcccggcggagagactgatggagaggcagaaacggaaggcggacatcgagaaagggctgcagttcattcagtcgacactacccctaaagcaagaagaatatgaggcctttctgctcaagctggtgcagaatctgtttgctgagggcaatgatctgttccgggagaaggactataagcaggctctggtgcagtacatggaagggctgaacgtggccgactacgctgcctctgaccaggtggccctgccccgggagctgctgtgcaagctgcatgtcaatagggccgcctgctacttcaccatgggcctgtatgagaaggcgctggaggacagcgagaaggcgctgggcctggacagtgagagtatccgggcgttgttccgcaaggcacgcgctctcaatgaactgggacgccacaaggaggcctacgagtgcagcagccggtgttccctcgccctgccccacgatgaaagcgtgactcagcttggtcaggagctggcccagaaactggggctgcgagttcgcaaggcgtataagaggccccaggaattggaaaccttttctctgctcagtaacggcactgcggctggcgtggcagatcagggaacttctaatggattggggtccatagatgacatcgaaacagactgctacgtggaccctcgaggctccccagcccttctcccctccacgcccacgatgcccctgttccctcacgttctggacctgctggcccccctggacagcagcaggaccctccccagcaccgacagcctggatgacttctcagacggggatgtctttggcccagagctggacaccctcctggactcgctgtctctggtccagggtggcctgtctggcagcggcgtgcctagtgagttgccccagctgatacccgtgttccccggcgggaccccactgctaccacctgtggtgggtggctccatccctgtctccagcccactgccccccgcctccttcggcttggtcatggacccctccaagaagctggccgcctctgtgctggatgccctcgatcccccgggccccacgctggaccccctggacctgctgccgtactcggagacccggctggatgcactcgacagctttgggtcgacacgaggctccctggacaaacctgactccttcatggaggagaccaactcacaggaccaccgtccccctagcggtgctcagaaaccagccccctcggtgagtgacttgagtggggatccaggcctctcattccctgctgggggttgtgggttctagagtcggggaatgagccctctgcatggggtaaggcactgcactccccacggcggggcactcccagagtggatggatcaaagatgatcacctcgtgcccttcctcaccaagccatatgctgggcgggcacacagagggcaccactgcccttgtctgatggaagaattcaagtctcagagagtgaagtgacttccccagtgttagtagcatccctggtctccagactcagtccggtcctgagtttaaaagagcatctgggccgggcgcggtggctcatgcctgtaatcccagcactttgggaggccgagttgggcggatcacaaggtcaggagattgagaccatcctggctaacacagtgaaaccccgtctctactaaaaatacaaaaaattagccgggtgtggtggtgggcacctgtagtcccagctactcgngaggctgaggcagaagaatggcatgaacccgggaggcagagtttgcagtgagccgagatcgcgccactgcattccagcctgggcgacagagcgagactccgtctcaaaaaaaagaaaataataataaaagaacatctgatgaggggccaggcgtggtggctcatgcctataatcccagcactttgggaggccgaggtgtgcagatcacaaggtcaggagttcgagaccagcctggccaacatggtgataccccgtctctattaaaaatacaaaaattagctgggtgtagtggcggacacctgtaatcccaggtactcaggaggctgaggcaggagaatcacttgaatccaggaggcggaggttgcagtgagctgaaatcgtgccattgcactccagcatgggcaacaagagcaaaactccatctcaaaaaaaaatcccttctatttatttagagacttgtatacttctacaaaagcaatcctgtggggtgagtggggtaggagtgattactgtactctgcaggtgtggagtgcagaagcgggccttgtatttggaaaggaattttcagccctgccaagtcctggcagcagggggtgcagcagaccctgcctcacctgcgttggggtgcagaagggggcctggtatttggaaaggacttcccagctctgccaagtcctggcagggggtgcagcagcccctggctcacctagctgtgttggggtggagcgaagccctgcctggctcatggggccagagccccacaggccgcagcggggtggcgagggtgctgcgggctgctatccccgcctggcggaacgtgtgtcctgttgcctctttgcagacatgattaacaagcaggactgtaagtacggggataactgcaccttcgcctaccatcaggaggagatcgacgtgtggaccgaggagcggaagggcaccctcaaccgcgacctgctcttcgacccgctggggggtgttaagcgcggcagcctcaccatcgccaagctcctgaaggagcaccagggcatcttcaccttcctctgcgagatctgctttgacagtaaaccccggatcatcagcaaaggcaccaaggactctccgtctgtctgctccaacctggctgccaagcacagcttctacaacaacaagtgcctggtgcacatcgtccgctccacctccctcaagtactccaagatccgccagttccaggagcacttccagttcgacgtgtgccgccatgaggtgcgctacggctgcctgcgggaggacagctgccacttcgcccacagcttcatcgagctcaaggtctggctgctgcagcagtactcaggcatgacccacgaagacatcgttcaggagtctaagaagtactggcagcagatggaggcgcatgcggggaaggccagcagcagcatgggtgctccgaggacacatgggcccagcacctttgacctgcagatgaagtttgtatgtggccagtgctggagaaacgggcaggtggtggagcctgacaaggacctcaagtactgtagtgccaaggcccggcactgctggaccaaggagcggcgggtccttctggtgatgtccaaggccaagaggaaatgggtgtcagtgaggccactgccatccattcgtaacttcccacagcaatacgatctctgcatccatgcacagaacggccgcaagtgccaatatgtggggaactgctccttcgcacacagcccggaggagagggacatgtggaccttcatgaaggagaacaagatcctggacatgcagcagacctatgacatgtggctgaaaaaacacaacccaggaaagcctggagaagggacccccatcagttctcgggaaggggagaagcagatccagatgcccacggactacgcggacatcatgatgggctaccactgctggctctgcggcaagaacagcaacagcaagaagcagtggcagcagcacatccagtccgagaagcacaaggagaaggtcttcacgtccgacagtgacgccagcggctgggccttccgcttccccatgggcgagttccggctctgcgacaggctccagaagggcaaagcctgcccagatggggacaagtgccgctgcgcccatggacaggaggagctcaacgagtggctggaccggcgcgaggtgctgaagcagaagttggccaaggctcgcaaggacatgctgctgtgcccacgggacgacgactttggcaaatacaacttcctgctgcaagaggacggggaccttgccggtgccaccccagaagcccctgctgctgctgccaccgccaccactggggagtagggccaggtgttggccgtgggtgaagtcctggggtcagggggtggggtggggccagaaggcctgatagaagggtcagggcaggccaggggggtggggggccgccctcatcaggcagcccccagccccctgaggcccngtccatcttctccccaccaccgccccggtgtgcntacccaggcgcacgtgctgcagcccccggaggccccgctgaaacctgggctgcccttcccccacccccacggctctcctggttgaggagggaggggcctggctgacccctccagcttcagcctccagctttaacttctgtctgctcctaatgggggcccaaagctcagggctggggagcctggggtccccacttgaatctccagcaggagggtccttctctccctggcccgtcctcctcccaccccctccccctgggggcaaatcaggacacaacagagggcagaggccccattagctttaaaatgtagccccaggttggagctgggaacactgtactggccacttaccctctggggcctcagctttccctccggaaggctgggaggaggtgggctagatgatctttggagcttaaggagtcccagccctttctctgatgccaccacctgaaccctgctccctcgtgggccagtgaaaatagactgtaggtcctcagagccttcagagatgatccagcccaaaccccattttgcagagaggaaaactgaggcctagaagggaggagtggtccacccacggtcccagcacaaggcagagctgggatgaaaacagggctgaaaagactcagggccaattattggctgagcccacggtcccctcagcagggatgcgatggtctctgaatcagtgtgcagctggggtcccaggcagcgctgcctgggggctggggaggggaggcccagaggagggctggccatgtgagcaccccatgaagggaccgccccctcccaaggatggtccctttgggtgcagcagcagaggtcacctcctgacatgcgctctgggaaaggtggcagagggcaggacaccatgagctcaggatctgtgtgaggtgtgggaggtgggaagggtgagggtctgggggaatgcggagaaaagggaggcttgaccccgggcaccatgggccactccaggatgggacacggcccctctttcttggggacccagtatgtcctctcctctagacccagacatacagttataaccgtctgtcctagcccctccctaatccctggccctcccagctgtctgggacttcagtggacccccagcccctgcccccactcaccaaggcctcgctcgtccctctcgtctgacatgtctgtgtgcacccccctcctctccaccctaccttccatcaaccagggcagatccaccgtgccctggttccccagacattccagaatgccccacatcattggcacaggagtggggcagccccggaaggaaccagggattaggctgtaggggggtgagaaggagagaagggaccaccccattcttctcaagcaaggattgccagcgcgcgctgacacagtgatgggctgcccagggctggaggggacgctgttcctcccgccgccactgcccaacctttcctgataatcgtggcatgcgccctttcctcttccctgccccaccccctggccgcagcaggccagcactgcagagtttgggtgctggtggtgtggctgtaggggaggggagaccacacccaaggtgggggctgtggccatgtgtggccgtgatgtcgatgatactcgttttccctgatccgtggtgttgcagtccgttgtcaccagccttgtttctagtgtgtatatatgtcgcccccgtgatgcatatatacacaggtattaaatatatcgctctatataatattatatatgtgtgtggtatccaaggaatcacttttatgagggctaaagataaagaatttggccagaaaatgcagccatccttgtgtgattaggagggtttcaggggccactggactatttgcaaggtgacagggactggagccatggctcagaggtgattcgggcagccagggacaggagccaccctccccaggcccaactctgctagcttcccagaccacccccatcgagtgcggagagagtgggagtgctcagggaaagaaggtgatttgtatttgtctccccgctgaaaagaacaggattcaagtccagagttttcatcttcagcctgtgatctgtccagggacccttgggatctggggcttcctggcctggccagagctggagcccccacagggtaaggaagagagagtgggaggcagagtgtgatggggaggagggacaggaagacccttttaatgatgagggtaactatttcagttgtgagccttctagggccccaggctgggaggctcagaggactgaatctgggacctgtgttccccccggcaggcagggacaagatggcatggcaagcatgggggcggggtgggtggggagggatgctgcatttctcagctgggcagtaatcaatttaatggtcctttaaaatgtctgtgtattaaaaatttaagaataccacactttaatattaaatattcataaggtctagtatcttgataataatgtagatgttttaataacaatttttgtccttcttaaaataaaatgaaagaaacttg

SEQ ID NO: 429539 - DNA, 6059 bp, Homo sapiens
  misc_feature (1069)..(1069): n is a, c, g, or t
  misc_feature (3521)..(3521): n is a, c, g, or t
  misc_feature (3555)..(3555): n is a, c, g, or t
gtcggcagtcggacacagcccagggcactcgactgagagggcttaacgggactgtcggggcacggaggggacttcactcagcctcagggccaaaggaggcttcctggaggaagtgatgactaggcagggtcttgaaggaaaagttcacctgccaggcagaggaagcaggggcactagcctggcatggcatggcgcggggctggctgatgagcggagcagctggggtgggggccttggtctccgaggacctgggagcaagctaaggaacttgggctttctcctacgggcagcgggaagccctggcaagtttaagcaaagagtggacacactcaggctgggaggcgtctttacccctggggagtggagaggagaggatagagtcaggggttcagcaggagtaggagaggatgtgtggcctgggggcttctccgagtcagcaatacataaggggaagccctaggaaggcccctcacgcctcagagccagagccactgacccctgtgtcttctccctgcccagaggagaccaactcacaggaccaccgtccccctagcggtgctcagaaaccagccccctcggtgagtgacttgagtggggatccaggcctctcattccctgctgggggttgtgggttctagagtcggggaatgagccctctgcatggggtaaggcactgcactccccacggcggggcactcccagagtggatggatcaaagatgatcacctcgtgcccttcctcaccaagccatatgctgggcgggcacacagagggcaccactgcccttgtctgatggaagaattcaagtctcagagagtgaagtgacttccccagtgttagtagcatccctggtctccagactcagtccggtcctgagtttaaaagagcatctgggccgggcgcggtggctcatgcctgtaatcccagcactttgggaggccgagttgggcggatcacaaggtcaggagattgagaccatcctggctaacacagtgaaaccccgtctctactaaaaatacaaaaaattagccgggtgtggtggtgggcacctgtagtcccagctactcgngaggctgaggcagaagaatggcatgaacccgggaggcagagtttgcagtgagccgagatcgcgccactgcattccagcctgggcgacagagcgagactccgtctcaaaaaaaagaaaataataataaaagaacatctgatgaggggccaggcgtggtggctcatgcctataatcccagcactttgggaggccgaggtgtgcagatcacaaggtcaggagttcgagaccagcctggccaacatggtgataccccgtctctattaaaaatacaaaaattagctgggtgtagtggcggacacctgtaatcccaggtactcaggaggctgaggcaggagaatcacttgaatccaggaggcggaggttgcagtgagctgaaatcgtgccattgcactccagcatgggcaacaagagcaaaactccatctcaaaaaaaaatcccttctatttatttagagacttgtatacttctacaaaagcaatcctgtggggtgagtggggtaggagtgattactgtactctgcaggtgtggagtgcagaagcgggccttgtatttggaaaggaattttcagccctgccaagtcctggcagcagggggtgcagcagaccctgcctcacctgcgttggggtgcagaagggggcctggtatttggaaaggacttcccagctctgccaagtcctggcagggggtgcagcagcccctggctcacctagctgtgttggggtggagcgaagccctgcctggctcatggggccagagccccacaggccgcagcggggtggcgagggtgctgcgggctgctatccccgcctggcggaacgtgtgtcctgttgcctctttgcagacatgattaacaagcaggactgtaagtacggggataactgcaccttcgcctaccatcaggaggagatcgacgtgtggaccgaggagcggaagggcaccctcaaccgcgacctgctcttcgacccgctggggggtgttaagcgcggcagcctcaccatcgccaagctcctgaaggagcaccagggcatcttcaccttcctctgcgagatctgctttgacagtaaaccccggatcatcagcaaaggcaccaaggactctccgtctgtctgctccaacctggctgccaagcacagcttctacaacaacaagtgcctggtgcacatcgtccgctccacctccctcaagtactccaagatccgccagttccaggagcacttccagttcgacgtgtgccgccatgaggtgcgctacggctgcctgcgggaggacagctgccacttcgcccacagcttcatcgagctcaaggtctggctgctgcagcagtactcaggcatgacccacgaagacatcgttcaggagtctaagaagtactggcagcagatggaggcgcatgcggggaaggccagcagcagcatgggtgctccgaggacacatgggcccagcacctttgacctgcagatgaagtttgtatgtggccagtgctggagaaacgggcaggtggtggagcctgacaaggacctcaagtactgtagtgccaaggcccggcactgctggaccaaggagcggcgggtccttctggtgatgtccaaggccaagaggaaatgggtgtcagtgaggccactgccatccattcgtaacttcccacagcaatacgatctctgcatccatgcacagaacggccgcaagtgccaatatgtggggaactgctccttcgcacacagcccggaggagagggacatgtggaccttcatgaaggagaacaagatcctggacatgcagcagacctatgacatgtggctgaaaaaacacaacccaggaaagcctggagaagggacccccatcagttctcgggaaggggagaagcagatccagatgcccacggactacgcggacatcatgatgggctaccactgctggctctgcggcaagaacagcaacagcaagaagcagtggcagcagcacatccagtccgagaagcacaaggagaaggtcttcacgtccgacagtgacgccagcggctgggccttccgcttccccatgggcgagttccggctctgcgacaggctccagaagggcaaagcctgcccagatggggacaagtgccgctgcgcccatggacaggaggagctcaacgagtggctggaccggcgcgaggtgctgaagcagaagttggccaaggctcgcaaggacatgctgctgtgcccacgggacgacgactttggcaaatacaacttcctgctgcaagaggacggggaccttgccggtgccaccccagaagcccctgctgctgctgccaccgccaccactggggagtagggccaggtgttggccgtgggtgaagtcctggggtcagggggtggggtggggccagaaggcctgatagaagggtcagggcaggccaggggggtggggggccgccctcatcaggcagcccccagccccctgaggcccngtccatcttctccccaccaccgccccggtgtgcntacccaggcgcacgtgctgcagcccccggaggccccgctgaaacctgggctgcccttcccccacccccacggctctcctggttgaggagggaggggcctggctgacccctccagcttcagcctccagctttaacttctgtctgctcctaatgggggcccaaagctcagggctggggagcctggggtccccacttgaatctccagcaggagggtccttctctccctggcccgtcctcctcccaccccctccccctgggggcaaatcaggacacaacagagggcagaggccccattagctttaaaatgtagccccaggttggagctgggaacactgtactggccacttaccctctggggcctcagctttccctccggaaggctgggaggaggtgggctagatgatctttggagcttaaggagtcccagccctttctctgatgccaccacctgaaccctgctccctcgtgggccagtgaaaatagactgtaggtcctcagagccttcagagatgatccagcccaaaccccattttgcagagaggaaaactgaggcctagaagggaggagtggtccacccacggtcccagcacaaggcagagctgggatgaaaacagggctgaaaagactcagggccaattattggctgagcccacggtcccctcagcagggatgcgatggtctctgaatcagtgtgcagctggggtcccaggcagcgctgcctgggggctggggaggggaggcccagaggagggctggccatgtgagcaccccatgaagggaccgccccctcccaaggatggtccctttgggtgcagcagcagaggtcacctcctgacatgcgctctgggaaaggtggcagagggcaggacaccatgagctcaggatctgtgtgaggtgtgggaggtgggaagggtgagggtctgggggaatgcggagaaaagggaggcttgaccccgggcaccatgggccactccaggatgggacacggcccctctttcttggggacccagtatgtcctctcctctagacccagacatacagttataaccgtctgtcctagcccctccctaatccctggccctcccagctgtctgggacttcagtggacccccagcccctgcccccactcaccaaggcctcgctcgtccctctcgtctgacatgtctgtgtgcacccccctcctctccaccctaccttccatcaaccagggcagatccaccgtgccctggttccccagacattccagaatgccccacatcattggcacaggagtggggcagccccggaaggaaccagggattaggctgtaggggggtgagaaggagagaagggaccaccccattcttctcaagcaaggattgccagcgcgcgctgacacagtgatgggctgcccagggctggaggggacgctgttcctcccgccgccactgcccaacctttcctgataatcgtggcatgcgccctttcctcttccctgccccaccccctggccgcagcaggccagcactgcagagtttgggtgctggtggtgtggctgtaggggaggggagaccacacccaaggtgggggctgtggccatgtgtggccgtgatgtcgatgatactcgttttccctgatccgtggtgttgcagtccgttgtcaccagccttgtttctagtgtgtatatatgtcgcccccgtgatgcatatatacacaggtattaaatatatcgctctatataatattatatatgtgtgtggtatccaaggaatcacttttatgagggctaaagataaagaatttggccagaaaatgcagccatccttgtgtgattaggagggtttcaggggccactggactatttgcaaggtgacagggactggagccatggctcagaggtgattcgggcagccagggacaggagccaccctccccaggcccaactctgctagcttcccagaccacccccatcgagtgcggagagagtgggagtgctcagggaaagaaggtgatttgtatttgtctccccgctgaaaagaacaggattcaagtccagagttttcatcttcagcctgtgatctgtccagggacccttgggatctggggcttcctggcctggccagagctggagcccccacagggtaaggaagagagagtgggaggcagagtgtgatggggaggagggacaggaagacccttttaatgatgagggtaactatttcagttgtgagccttctagggccccaggctgggaggctcagaggactgaatctgggacctgtgttccccccggcaggcagggacaagatggcatggcaagcatgggggcggggtgggtggggagggatgctgcatttctcagctgggcagtaatcaatttaatggtcctttaaaatgtctgtgtattaaaaatttaagaataccacactttaatattaaatattcataaggtctagtatcttgataataatgtagatgttttaataacaatttttgtccttcttaaaataaaatgaaagaaacttg

SEQ ID NO: 429540 - DNA, 5913 bp, Homo sapiens
  misc_feature (3330)..(3330): n is a, c, g, or t
  misc_feature (3364)..(3364): n is a, c, g, or t
tgcagggagacagtgcctccagcgggtgctgccgcgagcggccagccgaggggctggaaatgaaagtaaagcgctccagagccacatggacggagctgccggggcggcggcgccgggagcaggatgcggccgcccgtaattaaatagcatttactcttattattactaataataataacgtaatcatacctctagtcatagcataccatttatcgggctcggcgcaggcccgcggggagcgcagcccggcggagagactgatggagaggcagaaacggaaggcggacatcgagaaagggctgcagttcattcagtcgacactacccctaaagcaagaagaatatgaggcctttctgctcaagctggtgcagaatctgtttgctgagggcaatgatctgttccgggagaaggactataagcaggctctggtgcagtacatggaagggctgaacgtggccgactacgctgcctctgaccaggtggccctgccccgggagctgctgtgcaagctgcatgtcaatagggccgcctgctacttcaccatgggcctgtatgagaaggcgctggaggacagcgagaaggcgctgggcctggacagtgagagtatccgggcgttgttccgcaaggcacgcgctctcaatgaactgggacgccacaaggaggcctacgagtgcagcagccggtgttccctcgccctgccccacgatgaaagcgtgactcagcttggtcaggagctggcccagaaactggggctgcgagttcgcaaggcgtataagaggccccaggaattggaaaccttttctctgctcagtaacggcactgcggctggcgtggcagatcagggaacttctaatggattggggtccatagatgacatcgaaacagactgctacgtggaccctcgaggctccccagcccttctcccctccacgcccacgatgcccctgttccctcacgttctggacctgctggcccccctggacagcagcaggaccctccccagcaccgacagcctggatgacttctcagacggggatgtctttggcccagagctggacaccctcctggactcgctgtctctggtccagggtggcctgtctggcagcggcgtgcctagtgagttgccccagctgatacccgtgttccccggcgggaccccactgctaccacctgtggtgggtggctccatccctgtctccagcccactgccccccgcctccttcggcttggtcatggacccctccaagaagctggccgcctctgtgctggatgccctcgatcccccgggccccacgctggaccccctggacctgctgccgtactcggagacccggctggatgcactcgacagctttgggtcgacacgaggctccctggacaaacctgactccttcatggaggagaccaactcacaggaccaccgtccccctagcggtgctcagaaaccagccccctcgccagagccctgcatgcccaacactgccttgctcatcaagaaccccttggctgccacccacgagttcaagcaggcctgccagctctgctaccccaagacaggcccccgggctggcgactacacctaccgtgagggccttgagcacaagtgcaagcgggacatcctgctcggccggctccggagctcggaggaccagacctggaagcggatccggccccggcccactaagaccagcttcgtgggctcctactacctgtgcaaagacatgattaacaagcaggactgtaagtacggggataactgcaccttcgcctaccatcaggaggagatcgacgtgtggaccgaggagcggaagggcaccctcaaccgcgacctgctcttcgacccgctggggggtgttaagcgcggcagcctcaccatcgccaagctcctgaaggagcaccagggcatcttcaccttcctctgcgagatctgctttgacagtaaaccccggatcatcagcaaaggcaccaaggactctccgtctgtctgctccaacctggctgccaagcacagcttctacaacaacaagtgcctggtgcacatcgtccgctccacctccctcaagtactccaagatccgccagttccaggagcacttccagttcgacgtgtgccgccatgaggtgcgctacggctgcctgcgggaggacagctgccacttcgcccacagcttcatcgagctcaaggtctggctgctgcagcagtactcaggcatgacccacgaagacatcgttcaggagtctaagaagtactggcagcagatggaggcgcatgcggggaaggccagcagcagcatgggtgctccgaggacacatgggcccagcacctttgacctgcagatgaagtttgtatgtggccagtgctggagaaacgggcaggtggtggagcctgacaaggacctcaagtactgtagtgccaaggcccggcactgctggaccaaggagcggcgggtccttctggtgatgtccaaggccaagaggaaatgggtgtcagtgaggccactgccatccattcgtaacttcccacagcaatacgatctctgcatccatgcacagaacggccgcaagtgccaatatgtggggaactgctccttcgcacacagcccggaggagagggacatgtggaccttcatgaaggagaacaagatcctggacatgcagcagacctatgacatgtggctgaaaaaacacaacccaggaaagcctggagaagggacccccatcagttctcgggaaggggagaagcagatccagatgcccacggactacgcggacatcatgatgggctaccactgctggctctgcggcaagaacagcaacagcaagaagcagtggcagcagcacatccagtccgagaagcacaaggagaaggtcttcacgtccgacagtgacgccagcggctgggccttccgcttccccatgggcgagttccggctctgcgacaggctccagaagggcaaagcctgcccagatggggacaagtgccgctgcgcccatggacaggaggagctcaacgagtggctggaccggcgcgaggtgctgaagcagaagttggccaaggctcgcaaggacatgctgctgtgcccacgggacgacgactttggcaaatacaacttcctgctgcaagaggacggggaccttgccggtgccaccccagaagcccctgctgctgctgccaccgccaccactggggagtagggccaggtgttggccgtgggtgaagtcctggggtcagggggtggggtggggccagaaggcctgatagaagggtcagggcaggccaggggggtggggggccgccctcatcaggcagcccccagccccctgaggcccngtccatcttctccccaccaccgccccggtgtgcntacccaggcgcacgtgctgcagcccccggaggccccgctgaaacctgggctgcccttcccccacccccacggctctcctggttgaggagggaggggcctggctgacccctccagcttcagcctccagctttaacttctgtctgctcctaatgggggcccaaagctcagggctggggagcctggggtccccacttgaatctccagcaggagggtccttctctccctggcccgtcctcctcccaccccctccccctgggggcaaatcaggacacaacagagggcagaggccccattagctttaaaatgtagccccaggttggagctgggaacactgtactggccacttaccctctggggcctcagctttccctccggaaggctgggaggaggtgggctagatgatctttggagcttaaggagtcccagccctttctctgatgccaccacctgaaccctgctccctcgtgggccagtgaaaatagactgtaggtcctcagagccttcagagatgatccagcccaaaccccattttgcagagaggaaaactgaggcctagaagggaggagtggtccacccacggtcccagcacaaggcagagctgggatgaaaacagggctgaaaagactcagggccaattattggctgagcccacggtcccctcagcagggatgcgatggtctctgaatcagtgtgcagctggggtcccaggcagcgctgcctgggggctggggaggggaggcccagaggagggctggccatgtgagcaccccatgaagggaccgccccctcccaaggatggtccctttgggtgcagcagcagaggtcacctcctgacatgcgctctgggaaaggtggcagagggcaggacaccatgagctcaggatctgtgtgaggtgtgggaggtgggaagggtgagggtctgggggaatgcggagaaaagggaggcttgaccccgggcaccatgggccactccaggatgggacacggcccctctttcttggggacccagtatgtcctctcctctagacccagacatacagttataaccgtctgtcctagcccctccctaatccctggccctcccagctgtctgggacttcagtggacccccagcccctgcccccactcaccaaggcctcgctcgtccctctcgtctgacatgtctgtgtgcacccccctcctctccaccctaccttccatcaaccagggcagatccaccgtgccctggttccccagacattccagaatgccccacatcattggcacaggagtggggcagccccggaaggaaccagggattaggctgtaggggggtgagaaggagagaagggaccaccccattcttctcaagcaaggattgccagcgcgcgctgacacagtgatgggctgcccagggctggaggggacgctgttcctcccgccgccactgcccaacctttcctgataatcgtggcatgcgccctttcctcttccctgccccaccccctggccgcagcaggccagcactgcagagtttgggtgctggtggtgtggctgtaggggaggggagaccacacccaaggtgggggctgtggccatgtgtggccgtgatgtcgatgatactcgttttccctgatccgtggtgttgcagtccgttgtcaccagccttgtttctagtgtgtatatatgtcgcccccgtgatgcatatatacacaggtattaaatatatcgctctatataatattatatatgtgtgtggtatccaaggaatcacttttatgagggctaaagataaagaatttggccagaaaatgcagccatccttgtgtgattaggagggtttcaggggccactggactatttgcaaggtgacagggactggagccatggctcagaggtgattcgggcagccagggacaggagccaccctccccaggcccaactctgctagcttcccagaccacccccatcgagtgcggagagagtgggagtgctcagggaaagaaggtgatttgtatttgtctccccgctgaaaagaacaggattcaagtccagagttttcatcttcagcctgtgatctgtccagggacccttgggatctggggcttcctggcctggccagagctggagcccccacagggtaaggaagagagagtgggaggcagagtgtgatggggaggagggacaggaagacccttttaatgatgagggtaactatttcagttgtgagccttctagggccccaggctgggaggctcagaggactgaatctgggacctgtgttccccccggcaggcagggacaagatggcatggcaagcatgggggcggggtgggtggggagggatgctgcatttctcagctgggcagtaatcaatttaatggtcctttaaaatgtctgtgtattaaaaatttaagaataccacactttaatattaaatattcataaggtctagtatcttgataataatgtagatgttttaataacaatttttgtccttcttaaaataaaatgaaagaaacttgcttcccttagcctttgttctagaaaataaacttgtgcactttgac

SEQ ID NO: 429541 - DNA, 1357 bp, Homo sapiens
gaaaagaggttggggggaacttctttttttaacccctatttttttcttttaaaaaaggggggattttctcccgtgccctggttccccagacattccagaatgccccacatcattggcacaggagtggggcagccccggaaggaaccagggattaggctgtaggggggtgagaaggagagaagggaccaccccattcttctcaagcaaggattgccagcgcgcgctgacacagtgatgggctgcccagggctggaggggacgctgttcctcccgccgccactgcccaacctttcctgataatcgtggcatgcgccctttcctcttccctgccccaccccctggccgcagcaggccagcactgcagagtttgggtgctggtggtgtggctgtaggggaggggagaccacacccaaggtgggggctgtggccatgtgtggccgtgatgtcgatgatactcgttttccctgatccgtggtgttgcagtccgttgtcaccagccttgtttctagtgtgtatatatgtcgcccccgtgatgcatatatacacaggtattaaatatatcgctctatataatattatatatgtgtgtggtatccaaggaatcacttttatgagggctaaagataaagaatttggccagaaaatgcagccatccttgtgtgattaggagggtttcaggggccactggactatttgcaaggtgacagggactggagccatggctcagaggtgattcgggcagccagggacaggagccaccctccccaggcccaactctgctagcttcccagaccacccccatcgagtgcggagagagtgggagtgctcagggaaagaaggtgatttgtatttgtctccccgctgaaaagaacaggattcaagtccagagttttcatcttcagcctgtgatctgtccagggacccttgggatctggggcttcctggcctggccagagctggagcccccacagggtaaggaagagagagtgggaggcagagtgtgatggggaggagggacaggaagacccttttaatgatgagggtaactatttcagttgtgagccttctagggccccaggctgggaggctcagaggactgaatctgggacctgtgttccccccggcaggcagggacaagatggcatggcaagcatgggggcggggtgggtggggagggatgctgcatttctcagctgggcagtaatcaatttaatggtcctttaaaatgtctgtgtattaaaaatttaagaataccacactttaatattaaatattcataaggtctagtatcttgataataatgtagatgttttaataacaatttttgtccttcttaaaataaaatgaaagaaacttg

SEQ ID NO: 429542 - DNA, 966 bp, Homo sapiens
tcactctctcaatcttatccatcatagcaggcagttgagtgtgtggccgtgatgtcgatgatactcgttttccctgatccgtggtgttgcagtccgttgtcaccagccttgtttctagtgtgtatatatgtcgcccccgtgatgcatatatacacaggtattaaatatatcgctctatataatattatatatgtgtgtggtatccaaggaatcacttttatgagggctaaagataaagaatttggccagaaaatgcagccatccttgtgtgattaggagggtttcaggggccactggactatttgcaaggtgacagggactggagccatggctcagaggtgattcgggcagccagggacaggagccaccctccccaggcccaactctgctagcttcccagaccacccccatcgagtgcggagagagtgggagtgctcagggaaagaaggtgatttgtatttgtctccccgctgaaaagaacaggattcaagtccagagttttcatcttcagcctgtgatctgtccagggacccttgggatctggggcttcctggcctggccagagctggagcccccacagggtaaggaagagagagtgggaggcagagtgtgatggggaggagggacaggaagacccttttaatgatgagggtaactatttcagttgtgagccttctagggccccaggctgggaggctcagaggactgaatctgggacctgtgttccccccggcaggcagggacaagatggcatggcaagcatgggggcggggtgggtggggagggatgctgcatttctcagctgggcagtaatcaatttaatggtcctttaaaatgtctgtgtattaaaaatttaagaataccacactttaatattaaatattcataaggtctagtatcttgataataatgtagatgttttaataacaatttttgtccttcttaaaataaaatgaaagaaacttg

SEQ ID NO: 429543 - DNA, 968 bp, Homo sapiens
  misc_feature (30)..(30): n is a, c, g, or t
gcggccgcatactactactactactactanattcgcggccgtgtgtggccgtgatgtcgatgatactcgttttccctgatccgtggtgttgcagtccgttgtcaccagccttgtttctagtgtgtatatatgtcgcccccgtgatgcatatatacacaggtattaaatatatcgctctatataatattatatatgtgtgtggtatccaaggaatcacttttatgagggctaaagataaagaatttggccagaaaatgcagccatccttgtgtgattaggagggtttcaggggccactggactatttgcaaggtgacagggactggagccatggctcagaggtgattcgggcagccagggacaggagccaccctccccaggcccaactctgctagcttcccagaccacccccatcgagtgcggagagagtgggagtgctcagggaaagaaggtgatttgtatttgtctccccgctgaaaagaacaggattcaagtccagagttttcatcttcagcctgtgatctgtccagggacccttgggatctggggcttcctggcctggccagagctggagcccccacagggtaaggaagagagagtgggaggcagagtgtgatggggaggagggacaggaagacccttttaatgatgagggtaactatttcagttgtgagccttctagggccccaggctgggaggctcagaggactgaatctgggacctgtgttccccccggcaggcagggacaagatggcatggcaagcatgggggcggggtgggtggggagggatgctgcatttctcagctgggcagtaatcaatttaatggtcctttaaaatgtctgtgtattaaaaatttaagaataccacactttaatattaaatattcataaggtctagtatcttgataataatgtagatgttttaataacaatttttgtccttcttaaaataaaatgaaagaaacttg

SEQ ID NO: 429544 - DNA, 1919 bp, Homo sapiens
tgcagggagacagtgcctccagcgggtgctgccgcgagcggccagccgaggggctggaaatgaaagtaaagcgctccagagccacatggacggagctgccggggcggcggcgccgggagcaggatgcggccgcccgtaattaaatagcatttactcttattattactaataataataacgtaatcatacctctagtcatagcataccatttatcgggctcggcgcaggcccgcggggagcgcagcccggcggagagactgatggagaggcagaaacggaaggcggacatcgagaaagggctgcagttcattcagtcgacactacccctaaagcaagaagaatatgaggcctttctgctcaagctggtgcagaatctgtttgctgagggcaatgatctgttccgggagaaggactataagcaggctctggtgcagtacatggaagggctgaacgtggccgactacgctgcctctgaccaggtggccctgccccgggagctgctgtgcaagctgcatgtcaatagggccgcctgctacttcaccatgggcctgtatgagaaggcgctggaggacagcgagaaggcgctgggcctggacagtgagagtatccgggcgttgttccgcaaggcacgcgctctcaatgaactgggacgccacaaggaggcctacgagtgcagcagccggtgttccctcgccctgccccacgatgaaagcgtgactcagcttggtcaggagctggcccagaaactggggctgcgagttcgcaaggcgtataagaggccccaggaattggaaaccttttctctgctcagtaacggcactgcggctggcgtggcagatcagggaacttctaatggattggggtccatagatgacatcgaaacagactgctacgtggaccctcgaggctccccagcccttctcccctccacgcccacgatgcccctgttccctcacgttctggacctgctggcccccctggacagcagcaggaccctccccagcaccgacagcctggatgacttctcagacggggatgtctttggcccagagctggacaccctcctggactcgctgtctctggtccagggtggcctgtctggcagcggcgtgcctagtgagttgccccagctgatacccgtgttccccggcgggaccccactgctaccacctgtggtgggtggctccatccctgtctccagcccactgccccccgcctccttcggcttggtcatggacccctccaagaagctggccgcctctgtgctggatgccctcgatcccccgggccccacgctggaccccctggacctgctgccgtactcggagacccggctggatgcactcgacagctttgggtcgacacgaggctccctggacaaacctgactccttcatggaggagaccaactcacaggaccaccgtccccctagcggtgctcagaaaccagccccctcgccagagccctgcatgcccaacactgccttgctcatcaagaaccccttggctgccacccacgagttcaagcaggcctgccagctctgctaccccaagacaggcccccgggctggcgactacacctaccgtgagggccttgagcacaagtgcaagcgggacatcctgctcggccggctccggagctcggaggaccagacctggaagcggatccggccccggcccactaagaccagcttcgtgggctcctactacctgtgcaaagacatgattaacaagcaggactgtaagtgtaggggataacatacgtgatgttatccccaacaccagtttgccctcaatgtgagacatggagttaaaggagattatttcggagatttaaggtttaataattgccctgctggattttggacttgcatgaggcctgtactcattcaccaaactttgtttgggctgatttctcca

SEQ ID NO: 429545 - DNA, 392 bp, Homo sapiens
tccaacctggctgccaagcacagcttctacaacaacaagtgagtgggaccctcagcccaggctgaggcctaggggccagtggagagtcccctcaggcagctcagatggctgaggaaaggctgaactgaaagggtggatgtagggtgcaaggaaaggggcagaatttgggaatcaaatccagcctccacctggaaaggatgagaatcacatttgtcgaacatctactatattccaagcgtcatcttgggtatgttaattatcttagcaatcctgtgagggaggagttactggccctgttgtacagaacaaaaagctgaggcttggaagtagcttacttagcttactcagcttactcagcagacagcaagcggggggcctcgtctctgactgta

SEQ ID NO: 429546 - DNA, 293 bp, Homo sapiens
ggaacttctaatggattggggtccatagatgacatcgaaacaggtaatgtccccgatacgagggaacaagtggaaattggggccccgagaggtcaggggagtcgagccccctccccatcccagccctgtagatgggagggcctccgaggggttccccaccctggtactccctgaggcatgggagaaaacagtgggttgagagctacagacccactcaaggaggggagggcatctctagtctggcagagaggggtgctgcctcttagctaggtgcaacagtcccatggccttca

SEQ ID NO: 429547 - DNA, 5462 bp, Homo sapiens
tgcagggagacagtgcctccagcgggtgctgccgcgagcggccagccgaggggctggaaatgaaagtaaagcgctccagagccacatggacggagctgccggggcggcggcgccgggagcaggatgcggccgcccgtaattaaatagcatttactcttattattactaataataataacgtaatcatacctctagtcatagcataccatttatcgggctcggcgcaggcccgcggggagcgcagcccggcggagagactgatggagaggcagaaacggaaggcggacatcgagaaagggctgcagttcattcagtcgacactacccctaaagcaagaagaatatgaggcctttctgctcaagctggtgcagaatctgtttgctgagggcaatgatctgttccgggagaaggactataagcaggctctggtgcagtacatggaagggctgaacgtggccgactacgctgcctctgaccaggtggccctgccccgggagctgctgtgcaagctgcatgtcaatagggccgcctgctacttcaccatgggcctgtatgagaaggcgctggaggacagcgagaaggcgctgggcctggacagtgagagtatccgggcgttgttccgcaaggcacgcgctctcaatgaactgggacgccacaaggaggcctacgagtgcagcagccggtgttccctcgccctgccccacgatgaaagcgtgactcagcttggtcaggagctggcccagaaactggggctgcgagttcgcaaggcgtataagaggccccaggaattggaaaccttttctctgctcagtaacggcactgcggctggcgtggcagatcaggtaggatcggggctgaaccaacctgtctcagtttatccgttatgagaggtttggattcactctctccgggtataaatgacctcaggcagtgggtccaggggcctccgcctccctaggaggtacctcccgtgtccacgggggcaggatgtggggacaggccatggctgctgttggcagggagtggtcattgccggggagccgccgggggcagcctcactcttgaaccctggccaggacacagtctgggcagcctggtcccacacgccttccttctgcctcctgccccacatttcctgctgtgttgccttttttctcaccagcctttctgcaggttcaggcccctgggcctcaaatgtcttcctcttccccaccctgcctttctctgtcttttcgcttttcaaagcccagctcaagggcatgcccctgccgtaacccatcctgctctccctggctcagtgactctgcttgggaggggcagccgagactgaggactctgacaaggaagagcccaactgggccctgcagccttggacaggtccttcagtttctgcattctgaaatgcggaccatccctcaacgggaacaagggaggaaagtgcttgataacctggcacacacgacccagcaggaaatgcagtgggcagtcactgtggatagctgctgtgctgtcctgagttggggactcctcccaagggccaagacacttgtgcaccccagtcaggcctggctcatcccagggggggtgaggcagggcctggcacacgactgagacccctgcccgctgctcaggtagactttgaggctttctggaaagtgagagatgggctataagagcactgatggagcctggggtcctgccaccttgtacattaagggaaactgaggcacagagtggggaggggacggggccagtgtcacacagcgaggcagcagcaggcctccctcctccagagctttgcagcactttctttcattcattccataaggaggcccacaaaacactctcggccctgggcctgagagagctgcgtccttgccctcagggacctcccagcctgcaaagtaggcagttgatgatctgcctttgtagcactcatggtttataatcagaaattataggtcaggcatggtggctcatgcctgtaatcccagcaatttgggaggccgaggtgggtgatcacttaatttcgggagttaaagaccagcctggccaacataatgaaaccccatccctgccaaaaatacaaaaattagccgggcatggtggcatgtgcctgtagttccagctacttgggaggctgaggcaggagaatcacttgaacccaggaggcacagtttgcagtgagccgagatcgcgccattacactccagcctgagagacagaatgagactccatctgaaaaataaaagaaattattaggcctggcacataccaggtgctccaacgagaaaacattaaatgaatgaaaggtgatttgtctaagtttacccagtatgggccaagcactgagcttggggttgggtatgtgataaacaaaacaaatctgtttcctgccctcaaagagctcacagtctaggatggacattaggacattaggcagatcatttctggtttcaaactgtgatgagggctgtgaaggcagagtatggggagacctgggccattgagactgggagccctgatttagacaggattcagtgacatttaagctgagaccggaaggttgaagagttaggggcagggtgtgcaggtgaaacagcattccagaccaggtggaaggtatgtgcaaaggccctgaggcctggaggagctcagagtgtgggaggaaccaacaccaaggcagagctgggggtcctggaacaggagatagaagccagaccgcttgacccctgataagaagctcagtcttagcattgggaaggcattgaggggaggcagcattaattctattcatttattcggaaggtatttattgagcactgctttgtacccagtgtcagttcagacactgggaatagagcaccaaggtagcgtctcatcacagcaagtggagctgggctgggcaggcacagcagatgctcaaaaaatatttgttgaatgattgaatgactgcggccagggggccacagcaaatatgggctgaatgcccagctctccagggccaaggccgcaaagccttgcttagtctgcagccagatgaccacagatggtgccatacctggcaccaggccccccccagtccctgccaggctgttcacccatccctgcaatcttgctgggctcctcctgcacattcatagaggtcaggaggggcatggttagggagggctctaagaagcccacagtggagaggaccagttcagaccctgcctcatgaactcagtttgcccaacatggtacagcacacatgtgagcacacacatgtgcacatgcacaaacggagtgccctaggacacatgagggcagggtggtgtcccagccagagcccctggccttccgtgagttgtgcacagacacaagtaaatgcaggctgcaggggtccctgtaggttctccaccatgagcaccatattcattcagccggctggtcatttcacatgtgcacctggaagtggggatggaccaggctgtgcccacagggagcttcttatgacctaggagccaggcagaggccctgcaagacagtgtctgtgcaagagctgtccctggcatcgtggggaacaagatgcaaggagggctgtgagttccaggaacagagagcccaaggcagccttggttggaaagggcttcagcgagccagggaagcaagactaagaggaagggagagctggagagggggaaatggcactcatgaccaggagcacagcctgcacaaaggctaagcagcaaaagagacagacaccccagatcacaagaccagttcctcctatggggctcggaatagcctgggctctgcagtggaacgtgcgttggatcagatcctgagcacgctccttatctacgcaggccactccacccctcagagccttggcttccttctcttttgcaggggtccggtacctgccattttgtgggggttatagaattacaatgggtcaatgtgaaagctcccagcagggcgtctgcagaagagatagagctccatagacctttgttgccaaacagatgtcaccagaaggagtgccatgcagaagggcaggaacagtgagcctggcaggctggggtgatggcatgggcaggagggctgagaaggtgactttgtcctgcgtggcctgggagccatgggcaggatctagcagggagaatcaccgctttccctagagatgttcatctggtacctctctttccctcaaagactttatgtacttaccatgaggatagcagctctgtgatccagcgtggcggccttggtttggcagccaatctatggtgggcagacactccggagactgaagtgcacacatttgccatgtgctctatggcaggctcaggtgtgggaaggaggtgcagggtgttggtgcaggtatggatgggggagtgtacagttccaggggacagagtcaggacaggctcttgggtcagacagccctgctctgatctgtgcatagcagctttctgggctgacatttccatgccgtgggatgatacctcgcagggcgcctggaccgagggctaaaccccacagtgggtgtgagatgctggcctgggctggcgtgaggcaggatgctggatgagtctagctgctggtcctgtggctgctggtcctgagaaaggaaggctagtggtggagtctggtcctccatccggctctccgtggggacacagaaagggtggggccacccagggcctcaccagggaagcaggacttgagctggactgtgaaggactcagagaaaaaggggagggtgttcaggacagggaaggatgcaccacagcctggaggttggagtgtgggaactgttgaacgaaacagcagctctcccagcccaacttccagaaactgtgcatctaatcaacacaggccgggcacggtggctcacgccagtaatcccagcacattgggaggccaaggcgggtggatcatttgaagtcaggagtttgagatcaacctggctaacatggtgaaaccccatctctactaaaaaattcaaaaattagctgggcgcggtggctcacacctataatcccagcactctgggaggccgaggcgggtggatcacgaggtcaggatatcgagaccatcctggctaacacggtgaaaccccatctctactaaaaatacaaaaaattagccaggcgtggtggcgggtgcctgtagtcccagctagtctggaggctgaggcaggagaatggcatgaacccaggaggcggagcttacagtgagctgagatcgtgccactgcactccagcctgggctacagagtgagactccatctcaaagaaaaaaaatatatatatatatattcaaaaattagctgggcatggtggcatgcttctgtaatcccagctactcaggaggccgagattagagaatcacttgaatgtgggagtcggaggttgtaatgagctgagatcacaccattgcactgcagcctgggtgaccaaacgagactccatctc

SEQ ID NO: 429548 - DNA, 6036 bp, Homo sapiens
  misc_feature (3498)..(3498): n is a, c, g, or t
  misc_feature (3532)..(3532): n is a, c, g, or t
tgcagggagacagtgcctccagcgggtgctgccgcgagcggccagccgaggggctggaaatgaaagtaaagcgctccagagccacatggacggagctgccggggcggcggcgccgggagcaggatgcggccgcccgtaattaaatagcatttactcttattattactaataataataacgtaatcatacctctagtcatagcataccatttatcgggctcggcgcaggcccgcggggagcgcagcccggcggagagactgatggagaggcagaaacggaaggcggacatcgagaaagggctgcagttcattcagtcgacactacccctaaagcaagaagaatatgaggcctttctgctcaagctggtgcagaatctgtttgctgagggcaatgatctgttccgggagaaggactataagcaggctctggtgcagtacatggaagggctgaacgtggccgactacgctgcctctgaccaggtggccctgccccgggagctgctgtgcaagctgcatgtcaatagggccgcctgctacttcaccatgggcctgtatgagaaggcgctggaggacagcgagaaggcgctgggcctggacagtgagagtatccgggcgttgttccgcaaggcacgcgctctcaatgaactgggacgccacaaggaggcctacgagtgcagcagccggtgttccctcgccctgccccacgatgaaagcgtgactcagcttggtcaggagctggcccagaaactggggctgcgagttcgcaaggcgtataagaggccccaggaattggaaaccttttctctgctcagtaacggcactgcggctggcgtggcagatcagggaacttctaatggattggggtccatagatgacatcgaaacagactgctacgtggaccctcgaggctccccagcccttctcccctccacgcccacgatgcccctgttccctcacgttctggacctgctggcccccctggacagcagcaggaccctccccagcaccgacagcctggatgacttctcagacggggatgtctttggcccagagctggacaccctcctggactcgctgtctctggtccagggtggcctgtctggcagcggcgtgcctagtgagttgccccagctgatacccgtgttccccggcgggaccccactgctaccacctgtggtgggtggctccatccctgtctccagcccactgccccccgcctccttcggcttggtcatggacccctccaagaagctggccgcctctgtgctggatgccctcgatcccccgggccccacgctggaccccctggacctgctgccgtactcggagacccggctggatgcactcgacagctttgggtcgacacgaggctccctggacaaacctgactccttcatggaggagaccaactcacaggaccaccgtccccctagcggtgctcagaaaccagccccctcgccagagccctgcatgcccaacactgccttgctcatcaagaaccccttggctgccacccacgagttcaagcaggcctgccagctctgctaccccaagacaggcccccgggctggcgactacacctaccgtgagggccttgagcacaagtgcaagcgggacatcctgctcggccggctccggagctcggaggaccagacctggaagcggatccggccccggcccactaagaccagcttcgtgggctcctactacctgtgcaaagacatgattaacaagcaggactgtaagtacggggataactgcaccttcgcctaccatcaggaggagatcgacgtgtggaccgaggagcggaagggcaccctcaaccgcgacctgctcttcgacccgctggggggtgttaagcgcggcagcctcaccatcgccaagctcctgaaggagcaccagggcatcttcaccttcctctgcgagatctgctttgacagtaaaccccggatcatcagcaaaggcaccaaggactctccgtctgtctgctccaacctggctgccaagcacagcttctacaacaacaagtgcctggtgcacatcgtccgctccacctccctcaagtactccaagatccgccagttccaggagcacttccagttcgacgtgtgccgccatgaggtgcgctacggctgcctgcgggaggacagctgccacttcgcccacagcttcatcgagctcaaggtctggctgctgcagcagtactcaggcatgacccacgaagacatcgttcaggagtctaagaagtactggcagcagatggaggcgcatgcggggaaggccagcagcagcatgggtgctccgaggacacatgggcccagcacctttgacctgcagatgaagtttgtatgtggccagtgctggagaaacgggcaggtggtggagcctgacaaggacctcaagtactgtagtgccaaggcccggcactgctggaccaaggagcggcgggtccttctggtgatgtccaaggccaagaggaaatgggtgtcagtgaggccactgccatccattcgtaacttcccacagcaatacgatctctgcatccatgcacagaacggccgcaagtgccaatatgtggggaactgctccttcgcacacagcccggaggagagggacatgtggaccttcatgaaggagaacaagatcctggacatgcagcagacctatgacatgtggctgaaaaaacacaacccaggaaagcctggagaagggacccccatcagttctcgggaaggggagaagcagatccagatgcccacggactacgcggacatcatggtaacgcctccgccctgcatgctcggggctgcggtcggggctgtggtctgagcctcacctgggaggggcagcctggagggcccagccggccagcgctcagcctctccgaggtgggtggtccgggcagaggtgtgggggagcaggcacccatgatggctgtgctcccagatgggctaccactgctggctctgcggcaagaacagcaacagcaagaagcagtggcagcagcacatccagtccgagaagcacaaggagaaggtcttcacgtccgacagtgacgccagcggctgggccttccgcttccccatgggcgagttccggctctgcgacaggctccagaagggcaaagcctgcccagatggggacaagtgccgctgcgcccatggacaggaggagctcaacgagtggctggaccggcgcgaggtgctgaagcagaagttggccaaggctcgcaaggacatgctgctgtgcccacgggacgacgactttggcaaatacaacttcctgctgcaagaggacggggaccttgccggtgccaccccagaagcccctgctgctgctgccaccgccaccactggggagtagggccaggtgttggccgtgggtgaagtcctggggtcagggggtggggtggggccagaaggcctgatagaagggtcagggcaggccaggggggtggggggccgccctcatcaggcagcccccagccccctgaggcccngtccatcttctccccaccaccgccccggtgtgcntacccaggcgcacgtgctgcagcccccggaggccccgctgaaacctgggctgcccttcccccacccccacggctctcctggttgaggagggaggggcctggctgacccctccagcttcagcctccagctttaacttctgtctgctcctaatgggggcccaaagctcagggctggggagcctggggtccccacttgaatctccagcaggagggtccttctctccctggcccgtcctcctcccaccccctccccctgggggcaaatcaggacacaacagagggcagaggccccattagctttaaaatgtagccccaggttggagctgggaacactgtactggccacttaccctctggggcctcagctttccctccggaaggctgggaggaggtgggctagatgatctttggagcttaaggagtcccagccctttctctgatgccaccacctgaaccctgctccctcgtgggccagtgaaaatagactgtaggtcctcagagccttcagagatgatccagcccaaaccccattttgcagagaggaaaactgaggcctagaagggaggagtggtccacccacggtcccagcacaaggcagagctgggatgaaaacagggctgaaaagactcagggccaattattggctgagcccacggtcccctcagcagggatgcgatggtctctgaatcagtgtgcagctggggtcccaggcagcgctgcctgggggctggggaggggaggcccagaggagggctggccatgtgagcaccccatgaagggaccgccccctcccaaggatggtccctttgggtgcagcagcagaggtcacctcctgacatgcgctctgggaaaggtggcagagggcaggacaccatgagctcaggatctgtgtgaggtgtgggaggtgggaagggtgagggtctgggggaatgcggagaaaagggaggcttgaccccgggcaccatgggccactccaggatgggacacggcccctctttcttggggacccagtatgtcctctcctctagacccagacatacagttataaccgtctgtcctagcccctccctaatccctggccctcccagctgtctgggacttcagtggacccccagcccctgcccccactcaccaaggcctcgctcgtccctctcgtctgacatgtctgtgtgcacccccctcctctccaccctaccttccatcaaccagggcagatccaccgtgccctggttccccagacattccagaatgccccacatcattggcacaggagtggggcagccccggaaggaaccagggattaggctgtaggggggtgagaaggagagaagggaccaccccattcttctcaagcaaggattgccagcgcgcgctgacacagtgatgggctgcccagggctggaggggacgctgttcctcccgccgccactgcccaacctttcctgataatcgtggcatgcgccctttcctcttccctgccccaccccctggccgcagcaggccagcactgcagagtttgggtgctggtggtgtggctgtaggggaggggagaccacacccaaggtgggggctgtggccatgtgtggccgtgatgtcgatgatactcgttttccctgatccgtggtgttgcagtccgttgtcaccagccttgtttctagtgtgtatatatgtcgcccccgtgatgcatatatacacaggtattaaatatatcgctctatataatattatatatgtgtgtggtatccaaggaatcacttttatgagggctaaagataaagaatttggccagaaaatgcagccatccttgtgtgattaggagggtttcaggggccactggactatttgcaaggtgacagggactggagccatggctcagaggtgattcgggcagccagggacaggagccaccctccccaggcccaactctgctagcttcccagaccacccccatcgagtgcggagagagtgggagtgctcagggaaagaaggtgatttgtatttgtctccccgctgaaaagaacaggattcaagtccagagttttcatcttcagcctgtgatctgtccagggacccttgggatctggggcttcctggcctggccagagctggagcccccacagggtaaggaagagagagtgggaggcagagtgtgatggggaggagggacaggaagacccttttaatgatgagggtaactatttcagttgtgagccttctagggccccaggctgggaggctcagaggactgaatctgggacctgtgttccccccggcaggcagggacaagatggcatggcaagcatgggggcggggtgggtggggagggatgctgcatttctcagctgggcagtaatcaatttaatggtcctttaaaatgtctgtgtattaaaaatttaagaataccacactttaatattaaatattcataaggtctagtatcttgataataatgtagatgttttaataacaatttttgtccttcttaaaataaaatgaaagaaacttg

SEQ ID NO: 429549 - DNA, 5809 bp, Homo sapiens
  misc_feature (3271)..(3271): n is a, c, g, or t
  misc_feature (3305)..(3305): n is a, c, g, or t
tgcagggagacagtgcctccagcgggtgctgccgcgagcggccagccgaggggctggaaatgaaagtaaagcgctccagagccacatggacggagctgccggggcggcggcgccgggagcaggatgcggccgcccgtaattaaatagcatttactcttattattactaataataataacgtaatcatacctctagtcatagcataccatttatcgggctcggcgcaggcccgcggggagcgcagcccggcggagagactgatggagaggcagaaacggaaggcggacatcgagaaagggctgcagttcattcagtcgacactacccctaaagcaagaagaatatgaggcctttctgctcaagctggtgcagaatctgtttgctgagggcaatgatctgttccgggagaaggactataagcaggctctggtgcagtacatggaagggctgaacgtggccgactacgctgcctctgaccaggtggccctgccccgggagctgctgtgcaagctgcatgtcaatagggccgcctgctacttcaccatgggcctgtatgagaaggcgctggaggacagcgagaaggcgctgggcctggacagtgagagtatccgggcgttgttccgcaaggcacgcgctctcaatgaactgggacgccacaaggaggcctacgagtgcagcagccggtgttccctcgccctgccccacgatgaaagcgtgactcagcttggtcaggagctggcccagaaactggggctgcgagttcgcaaggcgtataagaggccccaggaattggaaaccttttctctgctcagtaacggcactgcggctggcgtggcagatcagggaacttctaatggattggggtccatagatgacatcgaaacagactgctacgtggaccctcgaggctccccagcccttctcccctccacgcccacgatgcccctgttccctcacgttctggacctgctggcccccctggacagcagcaggaccctccccagcaccgacagcctggatgacttctcagacggggatgtctttggcccagagctggacaccctcctggactcgctgtctctggtccagggtggcctgtctggcagcggcgtgcctagtgagttgccccagctgatacccgtgttccccggcgggaccccactgctaccacctgtggtgggtggctccatccctgtctccagcccactgccccccgcctccttcggcttggtcatggacccctccaagaagctggccgcctctgtgctggatgccctcgatcccccgggccccacgctggaccccctggacctgctgccgtactcggagacccggctggatgcactcgacagctttgggtcgacacgaggctccctggacaaacctgactccttcatggaggagaccaactcacaggaccaccgtccccctagcggtgctcagaaaccagccccctcgccagagccctgcatgcccaacactgccttgctcatcaagaaccccttggctgccacccacgagttcaagcaggcctgccagctctgctaccccaagacaggcccccgggctggcgactacacctaccgtgagggccttgagcacaagtgcaagcgggacatcctgctcggccggctccggagctcggaggaccagacctggaagcggatccggccccggcccactaagaccagcttcgtgggctcctactacctgtgcaaaggaggagatcgacgtgtggaccgaggagcggaagggcaccctcaaccgcgacctgctcttcgacccgctggggggtgttaagcgcggcagcctcaccatcgccaagctcctgaaggagcaccagggcatcttcaccttcctctgcgagatctgctttgacagtaaaccccggatcatcagcaaaggcaccaaggactctccgtctgtctgctccaacctggctgccaagcacagcttctacaacaacaagtgcctggtgcacatcgtccgctccacctccctcaagtactccaagatccgccagttccaggagcacttccagttcgacgtgtgccgccatgaggtgcgctacggctgcctgcgggaggacagctgccacttcgcccacagcttcatcgagctcaaggtctggctgctgcagcagtactcaggcatgacccacgaagacatcgttcaggagtctaagaagtactggcagcagatggaggcgcatgcggggaaggccagcagcagcatgggtgctccgaggacacatgggcccagcacctttgacctgcagatgaagtttgtatgtggccagtgctggagaaacgggcaggtggtggagcctgacaaggacctcaagtactgtagtgccaaggcccggcactgctggaccaaggagcggcgggtccttctggtgatgtccaaggccaagaggaaatgggtgtcagtgaggccactgccatccattcgtaacttcccacagcaatacgatctctgcatccatgcacagaacggccgcaagtgccaatatgtggggaactgctccttcgcacacagcccggaggagagggacatgtggaccttcatgaaggagaacaagatcctggacatgcagcagacctatgacatgtggctgaaaaaacacaacccaggaaagcctggagaagggacccccatcagttctcgggaaggggagaagcagatccagatgcccacggactacgcggacatcatgatgggctaccactgctggctctgcggcaagaacagcaacagcaagaagcagtggcagcagcacatccagtccgagaagcacaaggagaaggtcttcacgtccgacagtgacgccagcggctgggccttccgcttccccatgggcgagttccggctctgcgacaggctccagaagggcaaagcctgcccagatggggacaagtgccgctgcgcccatggacaggaggagctcaacgagtggctggaccggcgcgaggtgctgaagcagaagttggccaaggctcgcaaggacatgctgctgtgcccacgggacgacgactttggcaaatacaacttcctgctgcaagaggacggggaccttgccggtgccaccccagaagcccctgctgctgctgccaccgccaccactggggagtagggccaggtgttggccgtgggtgaagtcctggggtcagggggtggggtggggccagaaggcctgatagaagggtcagggcaggccaggggggtggggggccgccctcatcaggcagcccccagccccctgaggcccngtccatcttctccccaccaccgccccggtgtgcntacccaggcgcacgtgctgcagcccccggaggccccgctgaaacctgggctgcccttcccccacccccacggctctcctggttgaggagggaggggcctggctgacccctccagcttcagcctccagctttaacttctgtctgctcctaatgggggcccaaagctcagggctggggagcctggggtccccacttgaatctccagcaggagggtccttctctccctggcccgtcctcctcccaccccctccccctgggggcaaatcaggacacaacagagggcagaggccccattagctttaaaatgtagccccaggttggagctgggaacactgtactggccacttaccctctggggcctcagctttccctccggaaggctgggaggaggtgggctagatgatctttggagcttaaggagtcccagccctttctctgatgccaccacctgaaccctgctccctcgtgggccagtgaaaatagactgtaggtcctcagagccttcagagatgatccagcccaaaccccattttgcagagaggaaaactgaggcctagaagggaggagtggtccacccacggtcccagcacaaggcagagctgggatgaaaacagggctgaaaagactcagggccaattattggctgagcccacggtcccctcagcagggatgcgatggtctctgaatcagtgtgcagctggggtcccaggcagcgctgcctgggggctggggaggggaggcccagaggagggctggccatgtgagcaccccatgaagggaccgccccctcccaaggatggtccctttgggtgcagcagcagaggtcacctcctgacatgcgctctgggaaaggtggcagagggcaggacaccatgagctcaggatctgtgtgaggtgtgggaggtgggaagggtgagggtctgggggaatgcggagaaaagggaggcttgaccccgggcaccatgggccactccaggatgggacacggcccctctttcttggggacccagtatgtcctctcctctagacccagacatacagttataaccgtctgtcctagcccctccctaatccctggccctcccagctgtctgggacttcagtggacccccagcccctgcccccactcaccaaggcctcgctcgtccctctcgtctgacatgtctgtgtgcacccccctcctctccaccctaccttccatcaaccagggcagatccaccgtgccctggttccccagacattccagaatgccccacatcattggcacaggagtggggcagccccggaaggaaccagggattaggctgtaggggggtgagaaggagagaagggaccaccccattcttctcaagcaaggattgccagcgcgcgctgacacagtgatgggctgcccagggctggaggggacgctgttcctcccgccgccactgcccaacctttcctgataatcgtggcatgcgccctttcctcttccctgccccaccccctggccgcagcaggccagcactgcagagtttgggtgctggtggtgtggctgtaggggaggggagaccacacccaaggtgggggctgtggccatgtgtggccgtgatgtcgatgatactcgttttccctgatccgtggtgttgcagtccgttgtcaccagccttgtttctagtgtgtatatatgtcgcccccgtgatgcatatatacacaggtattaaatatatcgctctatataatattatatatgtgtgtggtatccaaggaatcacttttatgagggctaaagataaagaatttggccagaaaatgcagccatccttgtgtgattaggagggtttcaggggccactggactatttgcaaggtgacagggactggagccatggctcagaggtgattcgggcagccagggacaggagccaccctccccaggcccaactctgctagcttcccagaccacccccatcgagtgcggagagagtgggagtgctcagggaaagaaggtgatttgtatttgtctccccgctgaaaagaacaggattcaagtccagagttttcatcttcagcctgtgatctgtccagggacccttgggatctggggcttcctggcctggccagagctggagcccccacagggtaaggaagagagagtgggaggcagagtgtgatggggaggagggacaggaagacccttttaatgatgagggtaactatttcagttgtgagccttctagggccccaggctgggaggctcagaggactgaatctgggacctgtgttccccccggcaggcagggacaagatggcatggcaagcatgggggcggggtgggtggggagggatgctgcatttctcagctgggcagtaatcaatttaatggtcctttaaaatgtctgtgtattaaaaatttaagaataccacactttaatattaaatattcataaggtctagtatcttgataataatgtagatgttttaataacaatttttgtccttcttaaaataaaatgaaagaaacttg

SEQ ID NO: 429550 - DNA, 3614 bp, Homo sapiens
tgcagggagacagtgcctccagcgggtgctgccgcgagcggccagccgaggggctggaaatgaaagtaaagcgctccagagccacatggacggagctgccggggcggcggcgccgggagcaggatgcggccgcccgtaattaaatagcatttactcttattattactaataataataacgtaatcatacctctagtcatagcataccatttatcgggctcggcgcaggcccgcggggagcgcagcccggcggagagactgatggagaggcagaaacggaaggcggacatcgagaaagggctgcagttcattcagtcgacactacccctaaagcaagaagaatatgaggcctttctgctcaagctggtgcagaatctgtttgctgagggcaatgatctgttccgggagaaggactataagcaggctctggtgcagtacatggaagggctgaacgtggccgactacgctgcctctgaccaggtggccctgccccgggagctgctgtgcaagctgcatgtcaatagggccgcctgctacttcaccatgggcctgtatgagaaggcgctggaggacagcgagaaggcgctgggcctggacagtgagagtatccgggcgttgttccgcaaggcacgcgctctcaatgaactgggacgccacaaggaggcctacgagtgcagcagccggtgttccctcgccctgccccacgatgaaagcgtgactcagcttggtcaggagctggcccagaaactggggctgcgagttcgcaaggcgtataagaggccccaggaattggaaaccttttctctgctcagtaacggcactgcggctggcgtggcagatcagggaacttctaatggattggggtccatagatgacatcgaaacagactgctacgtggaccctcgaggctccccagcccttctcccctccacgcccacgatgcccctgttccctcacgttctggacctgctggcccccctggacagcagcaggaccctccccagcaccgacagcctggatgacttctcagacggggatgtctttggcccagagctggacaccctcctggactcgctgtctctggtccagggtggcctgtctggcagcggcgtgcctagtgagttgccccagctgatacccgtgttccccggcgggaccccactgctaccacctgtggtgggtggctccatccctgtctccagcccactgccccccgcctccttcggcttggtcatggacccctccaagaagctggccgcctctgtgctggatgccctcgatcccccgggccccacgctggaccccctggacctgctgccgtactcggagacccggctggatgcactcgacagctttgggtcgacacgaggctccctggacaaacctgactccttcatggaggagaccaactcacaggaccaccgtccccctagcggtgctcagaaaccagccccctcgccagagccctgcatgcccaacactgccttgctcatcaagaaccccttggctgccacccacgagttcaagcaggcctgccagctctgctaccccaagacaggcccccgggctggcgactacacctaccgtgagggccttgagcacaagtgcaagcgggacatcctgctcggccggctccggagctcggaggaccagacctggaagcggatccggccccggcccactaagaccagcttcgtgggctcctactacctgtgcaaagacatgattaacaagcaggactgtaagtacggggataactgcaccttcgcctaccatcaggaggagatcgacgtgtggaccgaggagcggaagggcaccctcaaccgcgacctgctcttcgacccgctggggggtgttaagcgcggcagcctcaccatcgccaagctcctgaaggagcaccagggcatcttcaccttcctctgcgagatctgctttgacagtaaaccccggatcatcagcaaaggcaccaaggactctccgtctgtctgctccaacctggctgccaagcacagcttctacaacaacaagtgcctggtgcacatcgtccgctccacctccctcaagtactccaagatccgccagttccaggagcacttccagttcgacgtgtgccgccatgaggtgcgctacggctgcctgcgggaggacagctgccacttcgcccacagcttcatcgagctcaaggtctggctgctgcagcagtactcaggcatgacccacgaagacatcgttcaggagtctaagaagtactggcagcagatggaggcgcatgcggggaaggccagcagcagcatgggtgctccgaggacacatgggcccagcacctttgacctgcagatgaagtttgtatgtggccagtgctggagaaacgggcaggtggtggagcctgacaaggacctcaagtactgtagtgccaaggcccggcactgctggaccaaggagcggcgggtccttctggtgatgtccaaggccaagaggaaatgggtgtcagtgaggccactgccatccattcgtaacttcccacagcaatacgatctctgcatccatgcacagaacggccgcaagtgccaatatgtggggaactgctccttcgcacacagcccggaggagagggacatgtggaccttcatgaaggagaacaagatcctggacatgcagcagacctatgacatgtggctgaaaaaacacaacccaggaaagcctggagaagggacccccatcagttctcgggaaggggagaagcagatccagatgcccacggactacgcggacatcatggtaacgcctccgccctgcatgctcggggctgcggtcggggctgtggtctgagcctcacctgggaggggcagcctggagggcccagccggccagcgctcagcctctccgaggtgggtggtccgggcagaggtgtgggggagcaggcacccatgatggctgtgctcccagatgggctaccactgctggctctgcggcaagaacagcaacagcaagaagcagtggcagcagcacatccagtccgagaagcacaaggagaaggtcttcacgtccgacagtgacgccagcggctgggccttccgcttccccatgggcgagttccggctctgcgacaggctccagaagggcaaagcctgcccagatggggacaagtgccgctgcgcccatggacaggaggagctcaacgagtggctggaccggcgcgaggtgctgaagcagaagttggccaaggctcgcaaggacatgctgctgtgcccacgggacgacgactttggcaaatacaacttcctgctgcaagaggacggggaccttcctctggagttgggccacccagcagctggactcctttctgactgcccccagccaaacttctcttggcattcagatgttcctcctcttctctttttctctgccacgttgttccaccattccatcatctggtctgctggcttgctggtctgtccctggagcctgggattcatggcttatatgggtgcaggacaggaggcatggcgggccaaaaggcaacttttggggcataaaaacaggaatgcctattctcatttagggccccaggatccaggcttggaggctgggcctttgcatggagatcatcctctt

SEQ ID NO: 429551 - DNA, 860 bp, Homo sapiens
tgcagggagacagtgcctccagcgggtgctgccgcgagcggccagccgaggggctggaaatgaaagtaaagcgctccagagccacatggacggagctgccggggcggcggcgccgggagcaggatgcggccgcccgtaattaaatagcatttactcttattattactaataataataacgtaatcatacctctagtcatagcataccatttatcgggctcggcgcaggcccgcggggagcgcagcccggcggagagactgatggagaggcagaaacggaaggcggacatcgagaaagggctgcagttcattcagtcgacactacccctaaagcaagaagaatatgaggcctttctgctcaagctggtgcagaatctgtttgctgagggcaatgatctgttccgggagaaggactataagcaggctctggtgcagtacatggaagggctgaacgtggccgactacgctgcctctgaccaggtggccctgccccgggagctgctgtgcaagctgcatgtcaatagggccgcctgctacttcaccatgggcctgtatgagaaggcgctggaggacagcgagaaggcgctgggcctggacagtgagagtatccgggcgttgttccgcaagagaggattggaggcatctaaagtatccagttgtggggccaaagaacgcacatgttctgacaaggaagtgacgccactgctgtttcttctcttgcagggagtacagaagtaggtttacgagtgaagagaccctgatgttctgcatgagggtgatggtgggagtcatcatcctctatgaccatgtccaccctgtgggagctttctgcaagacatccaagatcgatatgaaaggctg

SEQ ID NO: 429552 - DNA, 3364 bp, Homo sapiens
  misc_feature (903)..(903): n is a, c, g, or t
cgcggggcggacgccgcagggcgtgtcacgaggtgagcggggcgggccgagcgccggcgcggggcgcggcgaggctcccgcaccccccgccgcagtcgcgggcctctcccggagaagatggcggatcgcgcggagatgttttctctctccaccttccactcgctgtcgccgccgggctgcaggcctccccaggacataagcctggaagaatttgacgacgaagatctgtctgagatcactgatgactgtggcctgggcctcagctacgactcagaccactgtgagaaggacagcctctccctggggcgctcggagcagccgcaccccatctgctccttccaggatgacttccaggagtttgagatgatcgatgacaatgaagaggaggacgatgaggacgaggaagaggaggaggaggaggaggagggagatggggaaggccaggagggaggagaccctggctcagaggcacctgcccccgggccccttatcccctccccttccgtggaggagccccacaagcaccggcccaccaccctccgtctgaccacactgggggcccaggactccctaaacaacaacggaggctttgacctggtgcgtccggcctcctggcaggagacagcgctatgctcacccgccccggaggccctcagagagctcccgggccccctccctgccacggacaccgggcccggcggggcgcagtcgccagtgcgcccgggttgcgactgcgaagggaaccggcctgcggaaccccctgcgccaggggggacttcgccctcctcagatcccggcatcgaggctgacctgagaagccgctcgagcggcggccgcgggggacgtcgcagcagccaggagctgtcctcgcccggctccgactcggaggacgcgggcggcgcncgcctggggcgcatgatctcgtccatctcggagacggagctggagctgagcagcgatggcggaagcagcagcagcggccgctcctcgcacctcaccaactccatcgaggaggcctcgtcgcccgcctcggagccggagcccccgcgcgaacccccgcgccgccccgccttcctgcccgtgggccccgacgacaccaacagcgagtacgagtcggggtcggagtcggagccggacctcagcgaggacgcggactcgccctggctgctcagcaacctggtgagccgcatgatctccgagggctcctcgcccatccgctgccccggccagtgcctgtctcctgcgccgcgcccgcccggggagcccgtgtcgccggccggcggggccgcccaggactcccaggaccccgaggcggccgcggggcccggcggcgtggagctggtggacatggagacgctgtgcgcgccgccgccgcccgcgcccgccgcgcctcgacccggccccgcgcagcccgggccctgcctattcctcagcaaccccacgcgtgacaccatcacgccgctgtgggccgcgcccggccgcgccgcccgcccgggacgagcctgctccgccgcctgctccgaggaggaggacgaagaggacgacgaggaagaggaggatgccgaggacagtgcggggtcccccgggggcaggggcacgggcccctcggcgccgcgggacgcgtcgctggtgtacgacgcggtcaagtacacgctggtggtggatgagcacacgcagctggagctggtgagcctgcggcgctgtgctgggctgggccacgacagcgaagaggacagcggcggggaggccagcgaggaggaggcgggcgcggcgctgctaggcggcggtcaggtctcgggggacacctcgccggacagccctgacctcactttctccaagaagttcctcaatgtcttcgtcaacagcacatctcggtcctccagcaccgagtcctttggccttttctcctgtctggtcaacggcgaggagcgagagcagactcaccgggctgtgttcaggttcatcccgcggcatccagacgagctggagctggatgtggatgaccctgtgttggtggaggccgaggaggacgacttctggttccgtggcttcaacatgcgcacgggggagcgcggtgtgtttcctgccttctacgcccatgcggtgcccggccctgccaaggacctgctggggagtaagcggagcccctgctgggtggagcgctttgacgtgcagttcctgggctccgtggaggtgccctgccaccagggcaacggcatcctgtgtgcagccatgcagaagattgccactgcccggaaactgaccgtccacctgcgccctcctgcctcctgtgacctcgagatctctcttcggggggtcaagctgagtctgagcggaggagggcctgagttccagcgctgcagccatttcttccagatgaagaacatctccttctgcggctgccatccccgcaacagctgctatttcggcttcatcaccaaacaccccctgctgagccgcttcgcctgccacgtctttgtctcccaggagtccatgaggccggtggcgcagagtgtgggccgcgccttcctggagtactaccaagagcacctggcgtacgcctgccccacggaggacatctacctggagtagcctgcccaccgctctgtctcctggccgtctgctccaggcgcagctggggctgaggatgtctcaagaggccaccatggctttggcaaggactggattggggggacatgggaccttacgcttgtgggggtctgcgggctgggaactctcgtcctcggtccccagggcgcagctgttggggctgcgggggagtggagcccccgtgcccctgcttttcctcagatccgttctttctctgtgttgtcctcctccttcccttcccagtctcccttttctctctcctggtgtctctgcccctctctgtgcctgcaaaccttatcctctattcttcactttggggtcagaacttcgggggtgtggaggaggtgcggctctagggacaggtaatgtcggcttccaagtgatgccctcctgccactcccctgcgatttataagggaattttaatttttatagtgaatctcaagggatcatcccatccttgaccacagggacaagaggggccccctcgccccagccccaccccacatggagctcagggggaagcagggaggggttcccaaaagagccctgcggaggctaggagtggttcttgatgctcacctgaagcccctagacgctgctaggagggggggccctcctgggcccccaatacccctccgcttgccgctgctagcgcacccctgcagtccagcgtgcatccaccccacgcacgccccgtgctgtgttcctgggccctgcccatggcctcaataaactctctgcttggtgtgaaa

SEQ ID NO: 429553 - DNA, 3166 bp, Homo sapiens
  misc_feature (705)..(705): n is a, c, g, or t
atgctccccgatttcccttctcctagcacctgggcccctgggctactgctgccctctggcccagccctgctatctccctccgtcctgcaggacagcctctccctggggcgctcggagcagccgcaccccatctgctccttccaggatgacttccaggagtttgagatgatcgatgacaatgaagaggaggacgatgaggacgaggaagaggaggaggaggaggaggagggagatggggaaggccaggagggaggagaccctggctcagaggcacctgcccccgggccccttatcccctccccttccgtggaggagccccacaagcaccggcccaccaccctccgtctgaccacactgggggcccaggactccctaaacaacaacggaggctttgacctggtgcgtccggcctcctggcaggagacagcgctatgctcacccgccccggaggccctcagagagctcccgggccccctccctgccacggacaccgggcccggcggggcgcagtcgccagtgcgcccgggttgcgactgcgaagggaaccggcctgcggaaccccctgcgccaggggggacttcgccctcctcagatcccggcatcgaggctgacctgagaagccgctcgagcggcggccgcgggggacgtcgcagcagccaggagctgtcctcgcccggctccgactcggaggacgcgggcggcgcncgcctggggcgcatgatctcgtccatctcggagacggagctggagctgagcagcgatggcggaagcagcagcagcggccgctcctcgcacctcaccaactccatcgaggaggcctcgtcgcccgcctcggagccggagcccccgcgcgaacccccgcgccgccccgccttcctgcccgtgggccccgacgacaccaacagcgagtacgagtcggggtcggagtcggagccggacctcagcgaggacgcggactcgccctggctgctcagcaacctggtgagccgcatgatctccgagggctcctcgcccatccgctgccccggccagtgcctgtctcctgcgccgcgcccgcccggggagcccgtgtcgccggccggcggggccgcccaggactcccaggaccccgaggcggccgcggggcccggcggcgtggagctggtggacatggagacgctgtgcgcgccgccgccgcccgcgcccgccgcgcctcgacccggccccgcgcagcccgggccctgcctattcctcagcaaccccacgcgtgacaccatcacgccgctgtgggccgcgcccggccgcgccgcccgcccgggacgagcctgctccgccgcctgctccgaggaggaggacgaagaggacgacgaggaagaggaggatgccgaggacagtgcggggtcccccgggggcaggggcacgggcccctcggcgccgcgggacgcgtcgctggtgtacgacgcggtcaagtacacgctggtggtggatgagcacacgcagctggagctggtgagcctgcggcgctgtgctgggctgggccacgacagcgaagaggacagcggcggggaggccagcgaggaggaggcgggcgcggcgctgctaggcggcggtcaggtctcgggggacacctcgccggacagccctgacctcactttctccaagaagttcctcaatgtcttcgtcaacagcacatctcggtcctccagcaccgagtcctttggccttttctcctgtctggtcaacggcgaggagcgagagcagactcaccgggctgtgttcaggttcatcccgcggcatccagacgagctggagctggatgtggatgaccctgtgttggtggaggccgaggaggacgacttctggttccgtggcttcaacatgcgcacgggggagcgcggtgtgtttcctgccttctacgcccatgcggtgcccggccctgccaaggacctgctggggagtaagcggagcccctgctgggtggagcgctttgacgtgcagttcctgggctccgtggaggtgccctgccaccagggcaacggcatcctgtgtgcagccatgcagaagattgccactgcccggaaactgaccgtccacctgcgccctcctgcctcctgtgacctcgagatctctcttcggggggtcaagctgagtctgagcggaggagggcctgagttccagcgctgcagccatttcttccagatgaagaacatctccttctgcggctgccatccccgcaacagctgctatttcggcttcatcaccaaacaccccctgctgagccgcttcgcctgccacgtctttgtctcccaggagtccatgaggccggtggcgcagagtgtgggccgcgccttcctggagtactaccaagagcacctggcgtacgcctgccccacggaggacatctacctggagtagcctgcccaccgctctgtctcctggccgtctgctccaggcgcagctggggctgaggatgtctcaagaggccaccatggctttggcaaggactggattggggggacatgggaccttacgcttgtgggggtctgcgggctgggaactctcgtcctcggtccccagggcgcagctgttggggctgcgggggagtggagcccccgtgcccctgcttttcctcagatccgttctttctctgtgttgtcctcctccttcccttcccagtctcccttttctctctcctggtgtctctgcccctctctgtgcctgcaaaccttatcctctattcttcactttggggtcagaacttcgggggtgtggaggaggtgcggctctagggacaggtaatgtcggcttccaagtgatgccctcctgccactcccctgcgatttataagggaattttaatttttatagtgaatctcaagggatcatcccatccttgaccacagggacaagaggggccccctcgccccagccccaccccacatggagctcagggggaagcagggaggggttcccaaaagagccctgcggaggctaggagtggttcttgatgctcacctgaagcccctagacgctgctaggagggggggccctcctgggcccccaatacccctccgcttgccgctgctagcgcacccctgcagtccagcgtgcatccaccccacgcacgccccgtgctgtgttcctgggccctgcccatggcctcaataaactctctgcttggtgtgaaa

SEQ ID NO: 429554 - DNA, 1363 bp, Homo sapiens
cgcggggcggacgccgcagggcgtgtcacgaggtgagcggggcgggccgagcgccggcgcggggcgcggcgaggctcccgcaccccccgccgcagtcgcgggcctctcccggagaagatggcggatcgcgcggagatgttttctctctccaccttccactcgctgtcgccgccgggctgcaggcctccccaggacataagcctggaagaatttgacgacgaagatctgtctgagatcactgatgactgtggcctgggcctcagctacgactcagaccactgtgagaaggacagcctctccctggggcgctcggagcagccgcaccccatctgctccttccaggatgacttccaggagtttgagatgatcgatgacaatgaagaggaggacgatgaggacgaggaagaggaggaggaggaggaggagggagatggggaaggccaggagggaggagaccctggctcagaggcacctgcccccgggccccttatcccctccccttccgtggaggagccccacaagcaccggcccaccaccctccgtctgaccacactgggggcccaggactccctaaacaacaacggaggctttgacctggtgcgtccggcctcctggccgtctgctccaggcgcagctggggctgaggatgtctcaagaggccaccatggctttggcaaggactggattggggggacatgggaccttacgcttgtgggggtctgcgggctgggaactctcgtcctcggtccccagggcgcagctgttggggctgcgggggagtggagcccccgtgcccctgcttttcctcagatccgttctttctctgtgttgtcctcctccttcccttcccagtctcccttttctctctcctggtgtctctgcccctctctgtgcctgcaaaccttatcctctattcttcactttggggtcagaacttcgggggtgtggaggaggtgcggctctagggacaggtaatgtcggcttccaagtgatgccctcctgccactcccctgcgatttataagggaattttaatttttatagtgaatctcaagggatcatcccatccttgaccacagggacaagaggggccccctcgccccagccccaccccacatggagctcagggggaagcagggaggggttcccaaaagagccctgcggaggctaggagtggttcttgatgctcacctgaagcccctagacgctgctaggagggggggccctcctgggcccccaatacccctccgcttgccgctgctagcgcacccctgcagtccagcgtgcatccaccccacgcacgccccgtgctgtgttcctgggccctgcccatggcctcaataaactctctgcttggtgtgaaa

SEQ ID NO: 429555 - DNA, 367 bp, Homo sapiens
gtgggagtgtgggggactggggaccggggactgggggatagggttaggccacggagtccgacggggccaggctggcaggggtgtccagtaggtgggaggcaggggtggcgccaggcctcctttgacacagggacttctgcccacctctgctctagttccagcgctgcagccatttcttccagatgaagaacatctccttctgcggctgccatccccgcaacagctggtgagagtctgaccgtccccgagtcccccaaccgcccccacaaaccctgagagtccaaccgccccctgagtccccacagaccctgagggctgcccgtgcccagccctgagagctccacctgcacccacttagctctgtgag

SEQ ID NO: 429556 - DNA, 2221 bp, Homo sapiens
cgcggggcggacgccgcagggcgtgtcacgaggtgagcggggcgggccgagcgccggcgcggggcgcggcgaggctcccgcaccccccgccgcagtcgcgggcctctcccggagaagatggcggatcgcgcggagatgttttctctctccaccttccactcgctgtcgccgccgggctgcaggcctccccaggacataagcctggaagaatttgacgacgaagatctgtctgagatcactgatgactgtggcctgggcctcagctacgactcagaccactgtgagaaggacagcctctccctggggcgctcggagcagccgcaccccatctgctccttccaggatgacttccaggagtttgagatgatcgatgacaatgaagaggaggacgaagaggacgacgaggaagaggaggatgccgaggacagtgcggggtcccccgggggcaggggcacgggcccctcggcgccgcgggacgcgtcgctggtgtacgacgcggtcaagtacacgctggtggtggatgagcacacgcagctggagctggtgagcctgcggcgctgtgctgggctgggccacgacagcgaagaggacagcggcggggaggccagcgaggaggaggcgggcgcggcgctgctaggcggcggtcaggtctcgggggacacctcgccggacagccctgacctcactttctccaagaagttcctcaatgtcttcgtcaacagcacatctcggtcctccagcaccgagtcctttggccttttctcctgtctggtcaacggcgaggagcgagagcagactcaccgggctgtgttcaggttcatcccgcggcatccagacgagctggagctggatgtggatgaccctgtgttggtggaggccgaggaggacgacttctggttccgtggcttcaacatgcgcacgggggagcgcggtgtgtttcctgccttctacgcccatgcggtgcccggccctgccaaggacctgctggggagtaagcggagcccctgctgggtggagcgctttgacgtgcagttcctgggctccgtggaggtgccctgccaccagggcaacggcatcctgtgtgcagccatgcagaagattgccactgcccggaaactgaccgtccacctgcgccctcctgcctcctgtgacctcgagatctctcttcggggggtcaagctgagtctgagcggaggagggcctgagttccagcgctgcagccatttcttccagatgaagaacatctccttctgcggctgccatccccgcaacagctgctatttcggcttcatcaccaaacaccccctgctgagccgcttcgcctgccacgtctttgtctcccaggagtccatgaggccggtggcgcagagtgtgggccgcgccttcctggagtactaccaagagcacctggcgtacgcctgccccacggaggacatctacctggagtagcctgcccaccgctctgtctcctggccgtctgctccaggcgcagctggggctgaggatgtctcaagaggccaccatggctttggcaaggactggattggggggacatgggaccttacgcttgtgggggtctgcgggctgggaactctcgtcctcggtccccagggcgcagctgttggggctgcgggggagtggagcccccgtgcccctgcttttcctcagatccgttctttctctgtgttgtcctcctccttcccttcccagtctcccttttctctctcctggtgtctctgcccctctctgtgcctgcaaaccttatcctctattcttcactttggggtcagaacttcgggggtgtggaggaggtgcggctctagggacaggtaatgtcggcttccaagtgatgccctcctgccactcccctgcgatttataagggaattttaatttttatagtgaatctcaagggatcatcccatccttgaccacagggacaagaggggccccctcgccccagccccaccccacatggagctcagggggaagcagggaggggttcccaaaagagccctgcggaggctaggagtggttcttgatgctcacctgaagcccctagacgctgctaggagggggggccctcctgggcccccaatacccctccgcttgccgctgctagcgcacccctgcagtccagcgtgcatccaccccacgcacgccccgtgctgtgttcctgggccctgcccatggcctcaataaactctctgcttggtgtgaaa

SEQ ID NO: 429557 - DNA, 1137 bp, Homo sapiens
ggtgcccagccctgtgcttgggctgaaaccaaaaaaagacaacttcagatcttgaaattgtgcgacccccacactcctgtcccttaccctctccccaagccctttgttcctgcctcttctctctacatcatttgtggggtggccaaggctgggccagggctctgacgtgccctccacactgacttgcccgcagctatttcggcttcatcaccaaacaccccctgctgagccgcttcgcctgccacgtctttgtctcccaggagtccatgaggccggtggcgcagagtgtgggccgcgccttcctggagtactaccaagagcacctggcgtacgcctgccccacggaggacatctacctggagtagcctgcccaccgctctgtctcctggccgtctgctccaggcgcagctggggctgaggatgtctcaagaggccaccatggctttggcaaggactggattggggggacatgggaccttacgcttgtgggggtctgcgggctgggaactctcgtcctcggtccccagggcgcagctgttggggctgcgggggagtggagcccccgtgcccctgcttttcctcagatccgttctttctctgtgttgtcctcctccttcccttcccagtctcccttttctctctcctggtgtctctgcccctctctgtgcctgcaaaccttatcctctattcttcactttggggtcagaacttcgggggtgtggaggaggtgcggctctagggacaggtaatgtcggcttccaagtgatgccctcctgccactcccctgcgatttataagggaattttaatttttatagtgaatctcaagggatcatcccatccttgaccacagggacaagaggggccccctcgccccagccccaccccacatggagctcagggggaagcagggaggggttcccaaaagagccctgcggaggctaggagtggttcttgatgctcacctgaagcccctagacgctgctaggagggggggccctcctgggcccccaatacccctccgcttgccgctgctagcgcacccctgcagtccagcgtgcatccaccccacgcacgccccgtgctgtgttcctgggccctgcccatggcctcaataaactctctgcttggtgtgaaa

SEQ ID NO: 429558 - DNA, 1691 bp, Homo sapiens
aagacggcggccgcttgcccaacccgaggctcgggaggtggctggggagtgaattttctggaaggcgactttaaaggcgccgggactgagcgaagggcgtttgggtactgccgtcgccgccgcccaggccggggaggggtgcgttagtgtcaggaagcgggctgcgccgaggtcgtagcggaaccagctggcgaccccgcagaatgaaccacaagagcaagaagcgcatccgcgaggccaagcggagtgcgcggccggagctcaaggactcgctggattggacccggcacaactactacgagagcttctcgctgagcccggcggccgtggcggataacgtggaaagggcagatgctttacagctgtctgtggaagaatttgtggagcggtatgaaagaccttacaagcccgtggttttgttgaatgcgcaagagggctggtctgcgcaggagaaatggactctggagcgcctaaaaaggaaatatcggaaccagaagttcaagtgtggtgaggataacgatggctactcagtgaagatgaagatgaaatactacatcgagtacatggagagcactcgagatgatagtcccctttacatctttgacagcagctatggtgaacaccctaaaagaaggaaacttttggaagactacaaggtgccaaagtttttcactgatgaccttttccagtatgctggggagaagcgcaggcccccttacaggtggtttgtgatggggccaccacgctccggaactgggattcacatcgaccctctgggaaccagtgcctggaatgccttagttcagggccacaagcgctggtgcctgtttcctaccagcactcccagggaactcatcaaagtgacccgagacgaaggagggaaccagcaagacgaagctattacctggtttaatgttatttatccccggacacagcttccaacctggccacctgaattcaaacccctggaaatcttacaaaaaccaggagagactgtctttgtaccaggaggctggtggcatgttgtcctcaatctcgacactactatcgccatcacccaaaattttgccagcagcaccaacttccctgtggtatggcacaagacggtaagagggagaccaaagttatcaaggaaatggtataggattttgaagcaagagcaccccgagttggcagtcctcgcagactcggttgaccttcaggagtccacagggatagcttccgacagctccagcgactcttccagctcctccagctccagttcgtcagactccgactcagagtgcgagtctggatccgagggcgatgggacagtgcaccgcaggaagaagaggaggacgtgcagcatggtgggaaacggggacaccacctcccaggacgactgtgtcagcaaagagcgcagctcctccaggtgacccagcaaggctgttgtctgtatggaaggacacgctcgcggcaagggcagggcctggggagggtggcctgtccagtcctgcagacaaggggaggcctgacagagcccaagaatgaggacaccctcggcacgggaacccattcacttagcgtttgctccagtagctttccctctgctaccaatgcagataaacgcggcttgttttactcaggcaagagaatgtgaatagtgccaagaaaatcctttacattatttaataaaaattgaatccattttc

SEQ ID NO: 429559 - DNA, 564 bp, Homo sapiens
taatgactgctttgcatttgggagaaagtgaccaatatctgtgctgtctcccgaggtcagaggtttgtttaatgaagaagtgggttgcatccaggttgactccttgttttctgtcctcctgtgtccagtgcgagtctggatccgagggcgatgggacagtgcaccgcaggaagaagaggaggacgtgcagcatggtgggaaacggggacaccacctcccaggacgactgtgtcagcaaagagcgcagctcctccaggtgacccagcaaggctgttgtctgtatggaaggacacgctcgcggcaagggcagggcctggggagggtggcctgtccagtcctgcagacaaggggaggcctgacagagcccaagaatgaggacaccctcggcacgggaacccattcacttagcgtttgctccagtagctttccctctgctaccaatgcagataaacgcggcttgttttactcaggcaagagaatgtgaatagtgccaagaaaatcctttacattatttaataaaaattgaatccattttcaaaaaaaaccccacaaagggcggccgct

SEQ ID NO: 429560 - DNA, 491 bp, Homo sapiens
aagacggcggccgcttgcccaacccgaggctcgggaggtggctggggagtgaattttctggaaggcgactttaaaggcgccgggactgagcgaagggcgtttgggtactgccgtcgccgccgcccaggccggggaggggtgcgttagtgtcaggaagcgggctgcgccgaggtcgtagcggaaccagctggcgaccccgcagaatgaaccacaagagcaagaagcgcatccgcgaggccaagcggagtgcgcggccggagctcaaggactcgctggattggacccggcacaactactacgagagcttctcgctgagcccggcggccgtggcggtgagcgggtcgggcgggggtggccaggccgggcatcggcacctccagccgctacgcacctttctctgggcccgaggctgccctcgccccgagcgcccgggacctcgtagaggctcacccgcaccccgcggagtttggggtccccgaggcgcggattcc

SEQ ID NO: 429561 - DNA, 379 bp, Homo sapiens
gcctccattctctgtggtttagctgaaattccatggggaaattcaagtgacttactcaagtgaatttatcaaactggaatgtgcatttctcaaccctcgatgtcctttcacagccatacttagactcttcctgcctttttaaattgtttctattattacatatttatagatttatatctgcacttgatctgtgactttgtaatttgtaagaaaactctggagttgtcagaacactgagcagtctcctagttctgcgtccgtctagccatggggtctgccatgaaagcctgtggatctgctattgggttggtattttaaactttcacttgggtgaaacttgttcatcattttaaataaagcaacatgatttggagttgtg

SEQ ID NO: 429562 - DNA, 2229 bp, Homo sapiens
aagacggcggccgcttgcccaacccgaggctcgggaggtggctggggagtgaattttctggaaggcgactttaaaggcgccgggactgagcgaagggcgtttgggtactgccgtcgccgccgcccaggccggggaggggtgcgttagtgtcaggaagcgggctgcgccgaggtcgtagcggaaccagctggcgaccccgcagaatgaaccacaagagcaagaagcgcatccgcgaggccaagcggagtgcgcggccggagctcaaggactcgctggattggacccggcacaactactacgagagcttctcgctgagcccggcggccgtggcggataacgtggaaagggcagatgctttacagctgtctgtggaagaatttgtggagcggtatgaaagaccttacaagcccgtggttttgttgaatgcgcaagagggctggtctgcgcaggagaaatggactctggagcgcctaaaaaggaaatatcggaaccagaagttcaagtgtggtgaggataacgatggctactcagtgaagatgaagatgaaatactacatcgagtacatggagagcactcgagatgatagtcccctttacatctttgacagcagctatggtgaacaccctaaaagaaggaaacttttggaagactacaaggtgccaaagtttttcactgatgaccttttccagtatgctggggagaagcgcaggcccccttacaggtggtttgtgatggggccaccacgctccggaactgggattcacatcgaccctctgggaaccagtgcctggaatgccttagttcagggccacaagcgctggtgcctgtttcctaccagcactcccagggaactcatcaaagtgacccgagacgaaggagggaaccagcaagacgaagctattacctggtttaatgttatttatccccggacacagcttccaacctggccacctgaattcaaacccctggaaatcttacaaaaaccaggagagactgtctttgtaccaggaggctggtggcatgttgtcctcaatctcgacactactatcgccatcacccaaaattttgccagcagcaccaacttccctgtggtatggcacaagacggtaagagggagaccaaagttatcaaggaaatggtatagtaggtgagagtcatttttttcttatttctgcttggtttcaatttcgaccccagagataaaatggctagtccactgctgcgatgatgtgtgctgatcgtacacaggcctgggcaaagctggggctgccgaccctctgggtagaggagagaggggccaaggtcagggcaagtcctcagggtgttcgccagcctcgaggtggcagggtgagactctgcatgttgaatccaagccactcagtcaagacgtcataattgggattgtttctcgttttgttttgtattttgtttttcaaagctagcgctagctaaaatcattttatttgggttttatttgggttgtttctttttcttacctagaagcattattcccatttgaacttaataccttcagttcttgtgagtgaggtgactgccctggagacttagctcctctgtttatccacagaacagatacagcacgggcagcggcagtgcaagccacccacagccaccccgtgccactgtgtcccaaccctgacctggagggaccagctctcggggattttgaagcaagagcaccccgagttggcagtcctcgcagactcggttgaccttcaggagtccacagggatagcttccgacagctccagcgactcttccagctcctccagctccagttcgtcagactccgactcagagtgcgagtctggatccgagggcgatgggacagtgcaccgcaggaagaagaggaggacgtgcagcatggtgggaaacggggacaccacctcccaggacgactgtgtcagcaaagagcgcagctcctccaggtgacccagcaaggctgttgtctgtatggaaggacacgctcgcggcaagggcagggcctggggagggtggcctgtccagtcctgcagacaaggggaggcctgacagagcccaagaatgaggacaccctcggcacgggaacccattcacttagcgtttgctccagtagctttccctctgctaccaatgcagataaacgcggcttgttttactcaggcaagagaatgtgaatagtgccaagaaaatcctttacattatttaataaaaattgaatccattttc

SEQ ID NO: 429563 - DNA, 1719 bp, Homo sapiens
aagacggcggccgcttgcccaacccgaggctcgggaggtggctggggagtgaattttctggaaggcgactttaaaggcgccgggactgagcgaagggcgtttgggtactgccgtcgccgccgcccaggccggggaggggtgcgttagtgtcaggaagcgggctgcgccgaggtcgtagcggaaccagctggcgaccccgcagaatgaaccacaagagcaagaagcgcatccgcgaggccaagcggagtgcgcggccggagctcaaggactcgctggattggacccggcacaactactacgagagcttctcgctgagcccggcggccgtggcggataacgtggaaagggcagatgctttacagctgtctgtggaagaatttgtggagcggtatgaaagaccttacaagcccgtggttttgttgaatgcgcaagagggctggtctgcgcaggagaaatggactctggagcgcctaaaaaggaaatatcggaaccagaagttcaagtgtggtgaggataacgatggctactcagtgaagatgaagatgaaatactacatcgagtacatggagagcactcgagatgatagtcccctttacatctttgacagcagctatggtgaacaccctaaaagaaggaaacttttggaagactacaaggtgccaaagtttttcactgatgaccttttccagtatgctggggagaagcgcaggcccccttacaggtggtttgtgatggggccaccacgctccggaactgggattcacatcgaccctctgggaaccagtgcctggaatgccttagttcagggccacaagcgctggtgcctgtttcctaccagcactcccagggaactcatcaaagtgacccgagacgaaggagggaaccagcaagacgaagctattacctggtttaatgttatttatccccggacacagcttccaacctggccacctgaattcaaacccctggaaatcttacaaaaaccaggagagactgtctttgtaccaggaggctggtggcatgttgtcctcaatctcgacactactatcgccatcacccaaaattttgccagcagcaccaacttccctgtggtatggcacaagacggtaagagggagaccaaagttatcaaggaaatggtataggattttgaagcaagagcaccccgagttggcagtcctcgcagactcggttgaccttcaggagtccacagggatagcttccgacagctccagcgactcttccagctcctccagctccagttcgtcagactccgactcagagtgcgagtctggatccgagggcgatgggacagtgcaccgcaggaagaagaggaggacgtgcagcatggtgggaaacggggacaccacctcccaggacgactgtgtcagcaaagagcgcagctcctccaggtgacccagcaaggctgttgtctgtatggaaggacacgctcgcggcaagggcagggcctggggagggtggcctgtccagtcctgcagacaaggggaggcctgacagagcccaagaatgaggacaccctcggcacgggaacccattcacttagcgtttgctccagtagctttccctctgctaccaatgcagataaacgcggcttgttttactcaggcaagagaatgtgaatagtgccaagaaaatcctttacattatttaataaaaattgaatccattttcaaaaaaaaccccacaaagggcggccgct

SEQ ID NO: 429564 - DNA, 6032 bp, Homo sapiens
  misc_feature (4194)..(4194): n is a, c, g, or t
aagacggcggccgcttgcccaacccgaggctcgggaggtggctggggagtgaattttctggaaggcgactttaaaggcgccgggactgagcgaagggcgtttgggtactgccgtcgccgccgcccaggccggggaggggtgcgttagtgtcaggaagcgggctgcgccgaggtcgtagcggaaccagctggcgaccccgcagaatgaaccacaagagcaagaagcgcatccgcgaggccaagcggagtgcgcggccggagctcaaggactcgctggattggacccggcacaactactacgagagcttctcgctgagcccggcggccgtggcggataacgtggaaagggcagatgctttacagctgtctgtggaagaatttgtggagcggtatgaaagaccttacaagcccgtggttttgttgaatgcgcaagagggctggtctgcgcaggagaaatggactctggagcgcctaaaaaggaaatatcggaaccagaagttcaagtgtggtgaggataacgatggctactcagtgaagatgaagatgaaatactacatcgagtacatggagagcactcgagatgatagtcccctttacatctttgacagcagctatggtgaacaccctaaaagaaggaaacttttggaagactacaaggtgccaaagtttttcactgatgaccttttccagtatgctggggagaagcgcaggcccccttacaggtggtttgtgatggggccaccacgctccggaactgggattcacatcgaccctctgggaaccagtgcctggaatgccttagttcagggccacaagcgctggtgcctgtttcctaccagcactcccagggaactcatcaaagtgacccgagacgaaggagggaaccagcaagacgaagctattacctggtttaatgttatttatccccggacacagcttccaacctggccacctgaattcaaacccctggaaatcttacaaaaaccaggagagactgtctttgtaccaggaggctggtggcatgttgtcctcaatctcgacactactatcgccatcacccaaaattttgccagcagcaccaacttccctgtggtatggcacaagacggtaagagggagaccaaagttatcaaggaaatggtatagtaggtgagagtcatttttttcttatttctgcttggtttcaatttcgaccccagagataaaatggctagtccactgctgcgatgatgtgtgctgatcgtacacaggcctgggcaaagctggggctgccgaccctctgggtagaggagagaggggccaaggtcagggcaagtcctcagggtgttcgccagcctcgaggtggcagggtgagactctgcatgttgaatccaagccactcagtcaagacgtcataattgggattgtttctcgttttgttttgtattttgtttttcaaagctagcgctagctaaaatcattttatttgggttttatttgggttgtttctttttcttacctagaagcattattcccatttgaacttaataccttcagttcttgtgagtgaggtgactgccctggagacttagctcctctgtttatccacagaacagatacagcacgggcagcggcagtgcaagccacccacagccaccccgtgccactgtgtcccaaccctgacctggagggaccagctctcggggtaagagagggattctggcttgttccatgctcagcctccctgctgagagggccagtaagggtggtggcttctgttctccctggactcttgggcatctgaggcccacttaccccgccccgtaggccactgcgtgctgtgatttggtcacaccgcaggccttatgatacaacaggtcttttgtcactggatacagtggatgccagataaggtttctgaaggggagggctgctgctcttcagttcagttttacgctcccagtgaggggggaccatctctgttatttgacacctcgtatttcttacaaatctaattgtttctactcttagaaatagaatctaaccaatgcaactctgatcattatgtgctgtgctgtggaaaggaaagatttttttaaaaatcaactgggaaggaggaggacgtgcagcatggtgggaaacggggacaccacctcccaggacgactgtgtcagcaaagagcgcagctcctccaggattagggacacttgtggaggccgggctcacccctgagcagataaagagactctccctgaggtgctttcagcgtaagcttttggcagccacccaactcagttctcgcatcttctgctcctaccttctcctctgtcttctttgaatttggatattccttccctggtccaagctcctatcttcggtcaaatgctgtttttactgcttcctaaggatagattatcaagaaatttaacagctcggccagctcagtgaaacactgaagctaatgggatgttgggtaagaaggttctgtgctgtctcattgaaaaccgagccagtcaaccacaaggctggcagggtgtgatccttgtaacgtcttgtgtctgttacctcacggatgtcggtaaggagtttccacagagccagctgtgtaccacagagactgagagtggtgagtggactttgtgagccaattatgtgtcggaaggacttggagtctgcccttcttcctgtatgtcatcatcagcccacaaatgcattcagtggcagtgacccagcaccatcaccatcacccactgctcagtctgtcttaggattccttatctttttctccatcatcatagagactgaaatttcaggggtgtttttgtacagtgtatttttttgtgggggggtgatacattggggttttttgtttgcatagagtgggaacggtgtgcaatgtgctcttaccacagaacttaaagtatgaataggctccattcttccgcaccatgggatccataagaagtgctcactttgcgaggtactctgagattagcgttccccatttgtttgacctacagacgttaagtgggtgacttgtgttacacacggggagtaaattcagagatggcacctgtagtctttgcagtctgttgatacttctaaataactaactggatgactttttggggattgaccagcagatgccatctcttgccctcttgattcacctgcttgccttaatttgtccctaaattcaactaaacttcaataagaggggttgtcaaggccatggggcgcacttggaagcactgcctgggctggagcgttggaggcattggcaggcaggtgggaaggagctctcactgcagtgttcacaggcagggaggctgtgtgtggatgtgttagaattgtgtgctgttgcctctcaaaatatccactagaaacaggtgtaaccaggaaaatacaggtctctgctcactgttattaacagactgtcatttcctgacattgggtcatgtggctttactctaggaggctggttctctatttttgtcttagttcaattttctgcatcctcaaatgccaaccccagtatgtggctgggtaggtagaactgtgctgcctgcctgccatgggggctgctctccctccttacccccacgcccacagcccccttggttctgtggtgggcacaggatgtgtttgggtgtgagtaaagtcaaactctgaatgtataatctcttggtagtaatatctgagtggtgttgctactcctgctttttaaaaagacttttcttgccatctataaaaagcttttttctttttcccagcattgctcctgtgctgccacgcttgccctttttccttaccttcctttcagttttctatcaacaactcctctaaacttcagtttaaaataaaaaacagcccaaaaaggctctttgccaccagggggcgtggtaggacacgttgccagtggtctggataggggagcagaaattttgaattttaaaaattagccaccaaggccaggtgcagtggctcacacctgtaatcccagcactttgggaagctgaggcagggggattgcttgagtccaggagttcaagaccagtctgggcaacatagtgagatcccatctctcaaaaaaataataatctagaaaataaagattagccacccagttttctttctccagatgctaaagttgattcctgtttgataacagtattccagaaatgaggggaataacatatctgataggcccaagtcanctctggatagtacagtgtctggatagtacagattctgtgctcctgggacatgctttgtttattcctgccaggccagggattcagcagccctattccccaacccccgttactgtctctgtgggctagccaggctgtccgttatgtaagcacaacaggggcaaggtggggaaaccgtgtgtggaaaaggagtggagtggtggcgggtggccaaggtagactaggaagagtgggtacccagagaccacttgttcagaagttaactcctcttcccatctggcgtgagctactccattgaatggtgccaacaacagtaaagtgaaggagataatgttagattattttcagggatgattctccaagatgacagcagatcttaaaaccaaagagctgggtcctggaagaagggatcttggattattaacttctgatggaaggaccagagtgggagagagaagagttggggacctagaacatcaggaggaccctgggtctttggggatgaggcttcaccatcagctggaagaatccatgcttcacacacatgcctctgccattagtggtactgggatgtttagggtgacatccttgaggggagagccactgaaaagagggacattcacattttgctgtattcttgcagctgtccgtgtcttaataattcaagcgttcaataggtgtttgagggccaggcactgctcttgaggtgctggagataacggtgacaagcccaggtccctgacaagctccacaagcttaatggacagtgaatgtgcggctgttgcggctgttcacagggccgctggtgagggcaggtagaagaaagtgcagaccttcttaaatgcaggtgtaacggatctacatgaaagagcataattaacaccaatgtatacttaaggtagtaacagcttcttcataaagtagcaaaactaaggatctgtgggaaggttgctggtgcaaatgctttataagcttactagagactgagccttggatttaggactttagacgagtataggatggaacaaaatttttgcagtaaatgtaaaaaatgctgtgtaggaggaaggcgtataaggatgccccagctgtaggttctttagattgtctgtagtatttccacgagtaagttgtttttgatgtgtgtactggtattgctggtagatttgaagtggagtctggcggcttcttccacactcccctcccactagcttgtgtcaagatgtgacatcctatgcagcaaaactaggtgagcttgcacccccaggcggtggctctcaactttgtctcattgttcagaaatttcggccaggcgccgtagctcacccctgtaatcccagcactttgggaggccatggcaggtggatcacttgaggtcaggagttcaagaccagcctggccaacacggtgaaaccccgtctctactaaaaatacaaaaattagccaggtgtggtggcacatgcctgtagtcccagctacttggtcaactcaggcaggagaatcacttgaacccaggaggcagaggttgcagtgagctgagatcaagccactccagcctgggtgacagaccgagactctgtctttaaaaaaaaagaaatgtcatctaagccccagtgaacctcctgggaggagagctagccctggccagctgtctccaaagtgactggatgctacagaagaactgggactgtcttctgcacactcgtgcctcctgagtagctgggcccagctactcaggaggctacggactaagaagaagggtggcactgagcatgtgctgtagtccaggaatagtcagggacgcagataatttggttaaactgtctgatataataagggac

SEQ ID NO: 429565 - DNA, 4226 bp, Homo sapiens
aagacggcggccgcttgcccaacccgaggctcgggaggtggctggggagtgaattttctggaaggcgactttaaaggcgccgggactgagcgaagggcgtttgggtactgccgtcgccgccgcccaggccggggaggggtgcgttagtgtcaggaagcgggctgcgccgaggtcgtagcggaaccagctggcgaccccgcagaatgaaccacaagagcaagaagcgcatccgcgaggccaagcggagtgcgcggccggagctcaaggactcgctggattggacccggcacaactactacgagagcttctcgctgagcccggcggccgtggcggataacgtggaaagggcagatgctttacagctgtctgtggaagaatttgtggagcggtatgaaagaccttacaagcccgtggttttgttgaatgcgcaagagggctggtctgcgcaggagaaatggactctggagcgcctaaaaaggaaatatcggaaccagaagttcaagtgtggtgaggataacgatggctactcagtgaagatgaagatgaaatactacatcgagtacatggagagcactcgagatgatagtcccctttacatctttgacagcagctatggtgaacaccctaaaagaaggaaacttttggaagactacaaggtgccaaagtttttcactgatgaccttttccagtatgctggggagaagcgcaggcccccttacaggtggtttgtgatggggccaccacgctccggaactgggattcacatcgaccctctgggaaccagtgcctggaatgccttagttcagggccacaagcgctggtgcctgtttcctaccagcactcccagggaactcatcaaagtgacccgagacgaaggagggaaccagcaagacgaagctattacctggtttaatgttatttatccccggacacagcttccaacctggccacctgaattcaaacccctggaaatcttacaaaaaccaggagagactgtctttgtaccaggaggctggtggcatgttgtcctcaatctcgacactactatcgccatcacccaaaattttgccagcagcaccaacttccctgtggtatggcacaagacggtaagagggagaccaaagttatcaaggaaatggtatagtaggtgagagtcatttttttcttatttctgcttggtttcaatttcgaccccagagataaaatggctagtccactgctgcgatgatgtgtgctgatcgtacacaggcctgggcaaagctggggctgccgaccctctgggtagaggagagaggggccaaggtcagggcaagtcctcagggtgttcgccagcctcgaggtggcagggtgagactctgcatgttgaatccaagccactcagtcaagacgtcataattgggattgtttctcgttttgttttgtattttgtttttcaaagctagcgctagctaaaatcattttatttgggttttatttgggttgtttctttttcttacctagaagcattattcccatttgaacttaataccttcagttcttgtgagtgaggtgactgccctggagacttagctcctctgtttatccacagaacagatacagcacgggcagcggcagtgcaagccacccacagccaccccgtgccactgtgtcccaaccctgacctggagggaccagctctcggggtaagagagggattctggcttgttccatgctcagcctccctgctgagagggccagtaagggtggtggcttctgttctccctggactcttgggcatctgaggcccacttaccccgccccgtaggccactgcgtgctgtgatttggtcacaccgcaggccttatgatacaacaggtcttttgtcactggatacagtggatgccagataaggtttctgaaggggagggctgctgctcttcagttcagttttacgctcccagtgaggggggaccatctctgttatttgacacctcgtatttcttacaaatctaattgtttctactcttagaaatagaatctaaccaatgcaactctgatcattatgtgctgtgctgtggaaaggaaagatttttttaaaaatcaactgggaaggaggaggacgtgcagcatggtgggaaacggggacaccacctcccaggacgactgtgtcagcaaagagcgcagctcctccaggattagggacacttgtggaggccgggctcacccctgagcagataaagagactctccctgaggtgctttcagcgtaagcttttggcagccacccaactcagttctcgcatcttctgctcctaccttctcctctgtcttctttgaatttggatattccttccctggtccaagctcctatcttcggtcaaatgctgtttttactgcttcctaaggatagattatcaagaaatttaacagctcggccagctcagtgaaacactgaagctaatgggatgttgggtaagaaggttctgtgctgtctcattgaaaaccgagccagtcaaccacaaggctggcagggtgtgatccttgtaacgtcttgtgtctgttacctcacggatgtcggtaaggagtttccacagagccagctgtgtaccacagagactgagagtggtgagtggactttgtgagccaattatgtgtcggaaggacttggagtctgcccttcttcctgtatgtcatcatcagcccacaaatgcattcagtggcagtgacccagcaccatcaccatcacccactgctcagtctgtcttaggattccttatctttttctccatcatcatagagactgaaatttcaggggtgtttttgtacagtgtatttttttgtgggggggtgatacattggggttttttgtttgcatagagtgggaacggtgtgcaatgtgctcttaccacagaacttaaagtatgaataggctccattcttccgcaccatgggatccataagaagtgctcactttgcgaggtactctgagattagcgttccccatttgtttgacctacagacgttaagtgggtgacttgtgttacacacggggagtaaattcagagatggcacctgtagtctttgcagtctgttgatacttctaaataactaactggatgactttttggggattgaccagcagatgccatctcttgccctcttgattcacctgcttgccttaatttgtccctaaattcaactaaacttcaataagaggggttgtcaaggccatggggcgcacttggaagcactgcctgggctggagcgttggaggcattggcaggcaggtgggaaggagctctcactgcagtgttcacaggcagggaggctgtgtgtggatgtgttagaattgtgtgctgttgcctctcaaaatatccactagaaacaggtgtaaccaggaaaatacaggtctctgctcactgttattaacagactgtcatttcctgacattgggtcatgtggctttactctaggaggctggttctctatttttgtcttagttcaattttctgcatcctcaaatgccaaccccagtatgtggctgggtaggtagaactgtgctgcctgcctgccatgggggctgctctccctccttacccccacgcccacagcccccttggttctgtggtgggcacaggatgtgtttgggtgtgagtaaagtcaaactctgaatgtataatctcttggtagtaatatctgagtggtgttgctactcctgctttttaaaaagacttttcttgccatctataaaaagcttttttctttttcccagcattgctcctgtgctgccacgcttgccctttttccttaccttcctttcagttttctatcaacaactcctctaaacttcagtttaaaataaaaaacagcccaaaaaggctctttgccaccagggggcgtggtaggacacgttgccagtggtctggataggggagcagaaattttgaattttaaaaattaaaaaaaagaaatgtcatctaagccccagtgaacctcctgggaggagagctagccctggccagctgtctccaaagtgactggatgctacagaagaactgggactgtcttctgcacactcgtgcctcctggagttgtcagaacactgagcagtctcctagttctgcgtccgtctagccatggggtctgccatgaaagcctgtggatctgctattgggttggtattttaaactttcacttgggtgaaacttgttcatcattttaaataaagcaacatgatttggagttgtg

SEQ ID NO: 429566 - DNA, 1185 bp, Homo sapiens
aagacggcggccgcttgcccaacccgaggctcgggaggtggctggggagtgaattttctggaaggcgactttaaaggcgccgggactgagcgaagggcgtttgggtactgccgtcgccgccgcccaggccggggaggggtgcgttagtgtcaggaagcgggctgcgccgaggtcgtagcggaaccagctggcgaccccgcagaatgaaccacaagagcaagaagcgcatccgcgaggccaagcggagtgcgcggccggagctcaaggactcgctggattggacccggcacaactactacgagagcttctcgctgagcccggcggccgtggcggataacgtggaaagggcagatgctttacagctgtctgtggaagaatttgtggagcggtatgaaagaccttacaagcccgtggttttgttgaatgcgcaagagggctggtctgcgcaggagaaatggactctggagcgcctaaaaaggaaatatcggaaccagaagttcaagtgtggtgaggataacgatggctactcagtgaagatgaagatgaaatactacatcgagtacatggagagcactcgagatgatagtcccctttacatctttgacagcagctatggtgaacaccctaaaagaaggaaacttttggaagactacaaggtgccaaagtttttcactgatgaccttttccagtatgctggggagaagcgcaggcccccttacaggtggtttgtgatggggccaccacgctccggaactgggattcacatcgaccctctgggaaccagtgcctggaatgccttagttcagggccacaagcgctggtgcctgtttcctaccagcactcccagggaactcatcaaagtgacccgagacgaaggagggaaccagcaagacgaagctattacctggtttaatgttatttatccccggacacagcttccaacctggccacctgaattcaaacccctggaaatcttacaaaaaccaggagagactgtctttgtaccaggaggctggtggcatgttgtcctcaatctcgacactactatcgccatcacccaaaattttgccagcagcaccaacttccctgtggtatggcacaagacggtaagagggagaccaaagttatcaaggaaatggtatagaaaatcctttacattatttaataaaaattgaatccattttc

SEQ ID NO: 429567 - DNA, 536 bp, Homo sapiens
taatgactgctttgcatttgggagaaagtgaccaatatctgtgctgtctcccgaggtcagaggtttgtttaatgaagaagtgggttgcatccaggttgactccttgttttctgtcctcctgtgtccagtgcgagtctggatccgagggcgatgggacagtgcaccgcaggaagaagaggaggacgtgcagcatggtgggaaacggggacaccacctcccaggacgactgtgtcagcaaagagcgcagctcctccaggtgacccagcaaggctgttgtctgtatggaaggacacgctcgcggcaagggcagggcctggggagggtggcctgtccagtcctgcagacaaggggaggcctgacagagcccaagaatgaggacaccctcggcacgggaacccattcacttagcgtttgctccagtagctttccctctgctaccaatgcagataaacgcggcttgttttactcaggcaagagaatgtgaatagtgccaagaaaatcctttacattatttaataaaaattgaatccattttc

SEQ ID NO: 429568 - DNA, 5304 bp, Homo sapiens
  misc_feature (3433)..(3433): n is a, c, g, or t
aagacggcggccgcttgcccaacccgaggctcgggaggtggctggggagtgaattttctggaaggcgactttaaaggcgccgggactgagcgaagggcgtttgggtactgccgtcgccgccgcccaggccggggaggggtgcgttagtgtcaggaagcgggctgcgccgaggtcgtagcggaaccagctggcgaccccgcagaatgaaccacaagagcaagaagcgcatccgcgaggccaagcggagtgcgcggccggagctcaaggactcgctggattggacccggcacaactactacgagagcttctcgctgagcccggcggccgtggcggataacgtggaaagggcagatgctttacagctgtctgtggaagaatttgtggagcggtatgaaagaccttacaagcccgtggttttgttgaatgcgcaagagggctggtctgcgcaggagaaatggactctggagcgcctaaaaaggaaatatcggaaccagaagttcaagtgtggtgaggataacgatggctactcagtgaagatgaagatgaaatactacatcgagtacatggagagcactcgagatgatagtcccctttacatctttgacagcagctatggtgaacaccctaaaagaaggaaacttttggaagactacaaggtgccaaagtttttcactgatgaccttttccagtatgctggggagaagcgcaggcccccttacaggtggtttgtgatggggccaccacgctccggaactgggattcacatcgaccctctgggaaccagtgcctggaatgccttagttcagggccacaagcgctggtgcctgtttcctaccagcactcccagggaactcatcaaagtgacccgagacgaaggagggaaccagcaagacgaagctattacctggtttaatgttatttatccccggacacagcttccaacctggccacctgaattcaaacccctggaaatcttacaaaaaccaggagagactgtctttgtaccaggaggctggtggcatgttgtcctcaatctcgacactactatcgccatcacccaaaattttgccagcagcaccaacttccctgtggtatggcacaagacggtaagagggagaccaaagttatcaaggaaatggtataggattttgaagcaagagcaccccgagttggcagtcctcgcagactcggttgaccttcaggagtccacagggatagcttccgacagctccagcgactcttccagctcctccagctccagttcgtcagactccgactcagagtgcgagtctggatccgagggcgatgggacagtgcaccgcaggaagaagaggaggacgtgcagcatggtgggaaacggggacaccacctcccaggacgactgtgtcagcaaagagcgcagctcctccaggattagggacacttgtggaggccgggctcacccctgagcagataaagagactctccctgaggtgctttcagcgtaagcttttggcagccacccaactcagttctcgcatcttctgctcctaccttctcctctgtcttctttgaatttggatattccttccctggtccaagctcctatcttcggtcaaatgctgtttttactgcttcctaaggatagattatcaagaaatttaacagctcggccagctcagtgaaacactgaagctaatgggatgttgggtaagaaggttctgtgctgtctcattgaaaaccgagccagtcaaccacaaggctggcagggtgtgatccttgtaacgtcttgtgtctgttacctcacggatgtcggtaaggagtttccacagagccagctgtgtaccacagagactgagagtggtgagtggactttgtgagccaattatgtgtcggaaggacttggagtctgcccttcttcctgtatgtcatcatcagcccacaaatgcattcagtggcagtgacccagcaccatcaccatcacccactgctcagtctgtcttaggattccttatctttttctccatcatcatagagactgaaatttcaggggtgtttttgtacagtgtatttttttgtgggggggtgatacattggggttttttgtttgcatagagtgggaacggtgtgcaatgtgctcttaccacagaacttaaagtatgaataggctccattcttccgcaccatgggatccataagaagtgctcactttgcgaggtactctgagattagcgttccccatttgtttgacctacagacgttaagtgggtgacttgtgttacacacggggagtaaattcagagatggcacctgtagtctttgcagtctgttgatacttctaaataactaactggatgactttttggggattgaccagcagatgccatctcttgccctcttgattcacctgcttgccttaatttgtccctaaattcaactaaacttcaataagaggggttgtcaaggccatggggcgcacttggaagcactgcctgggctggagcgttggaggcattggcaggcaggtgggaaggagctctcactgcagtgttcacaggcagggaggctgtgtgtggatgtgttagaattgtgtgctgttgcctctcaaaatatccactagaaacaggtgtaaccaggaaaatacaggtctctgctcactgttattaacagactgtcatttcctgacattgggtcatgtggctttactctaggaggctggttctctatttttgtcttagttcaattttctgcatcctcaaatgccaaccccagtatgtggctgggtaggtagaactgtgctgcctgcctgccatgggggctgctctccctccttacccccacgcccacagcccccttggttctgtggtgggcacaggatgtgtttgggtgtgagtaaagtcaaactctgaatgtataatctcttggtagtaatatctgagtggtgttgctactcctgctttttaaaaagacttttcttgccatctataaaaagcttttttctttttcccagcattgctcctgtgctgccacgcttgccctttttccttaccttcctttcagttttctatcaacaactcctctaaacttcagtttaaaataaaaaacagcccaaaaaggctctttgccaccagggggcgtggtaggacacgttgccagtggtctggataggggagcagaaattttgaattttaaaaattagccaccaaggccaggtgcagtggctcacacctgtaatcccagcactttgggaagctgaggcagggggattgcttgagtccaggagttcaagaccagtctgggcaacatagtgagatcccatctctcaaaaaaataataatctagaaaataaagattagccacccagttttctttctccagatgctaaagttgattcctgtttgataacagtattccagaaatgaggggaataacatatctgataggcccaagtcanctctggatagtacagtgtctggatagtacagattctgtgctcctgggacatgctttgtttattcctgccaggccagggattcagcagccctattccccaacccccgttactgtctctgtgggctagccaggctgtccgttatgtaagcacaacaggggcaaggtggggaaaccgtgtgtggaaaaggagtggagtggtggcgggtggccaaggtagactaggaagagtgggtacccagagaccacttgttcagaagttaactcctcttcccatctggcgtgagctactccattgaatggtgccaacaacagtaaagtgaaggagataatgttagattattttcagggatgattctccaagatgacagcagatcttaaaaccaaagagctgggtcctggaagaagggatcttggattattaacttctgatggaaggaccagagtgggagagagaagagttggggacctagaacatcaggaggaccctgggtctttggggatgaggcttcaccatcagctggaagaatccatgcttcacacacatgcctctgccattagtggtactgggatgtttagggtgacatccttgaggggagagccactgaaaagagggacattcacattttgctgtattcttgcagctgtccgtgtcttaataattcaagcgttcaataggtgtttgagggccaggcactgctcttgaggtgctggagataacggtgacaagcccaggtccctgacaagctccacaagcttaatggacagtgaatgtgcggctgttgcggctgttcacagggccgctggtgagggcaggtagaagaaagtgcagaccttcttaaatgcaggtgtaacggatctacatgaaagagcataattaacaccaatgtatacttaaggtagtaacagcttcttcataaagtagcaaaactaaggatctgtgggaaggttgctggtgcaaatgctttataagcttactagagactgagccttggatttaggactttagacgagtataggatggaacaaaatttttgcagtaaatgtaaaaaatgctgtgtaggaggaaggcgtataaggatgccccagctgtaggttctttagattgtctgtagtatttccacgagtaagttgtttttgatgtgtgtactggtattgctggtagatttgaagtggagtctggcggcttcttccacactcccctcccactagcttgtgtcaagatgtgacatcctatgcagcaaaactaggtgagcttgcacccccaggcggtggctctcaactttgtctcattgttcagaaatttcggccaggcgccgtagctcacccctgtaatcccagcactttgggaggccatggcaggtggatcacttgaggtcaggagttcaagaccagcctggccaacacggtgaaaccccgtctctactaaaaatacaaaaattagccaggtgtggtggcacatgcctgtagtcccagctacttggtcaactcaggcaggagaatcacttgaacccaggaggcagaggttgcagtgagctgagatcaagccactccagcctgggtgacagaccgagactctgtctttaaaaaaaaagaaatgtcatctaagccccagtgaacctcctgggaggagagctagccctggccagctgtctccaaagtgactggatgctacagaagaactgggactgtcttctgcacactcgtgcctcctggagttgtcagaacactgagcagtctcctagttctgcgtccgtctagccatggggtctgccatgaaagcctgtggatctgctattgggttggtattttaaactttcacttgggtgaaacttgttcatcattttaaataaagcaacatgatttggagttgtg

SEQ ID NO: 429569 - DNA, 1780 bp, Homo sapiens
aagacggcggccgcttgcccaacccgaggctcgggaggtggctggggagtgaattttctggaaggcgactttaaaggcgccgggactgagcgaagggcgtttgggtactgccgtcgccgccgcccaggccggggaggggtgcgttagtgtcaggaagcgggctgcgccgaggtcgtagcggaaccagctggcgaccccgcagaatgaaccacaagagcaagaagcgcatccgcgaggccaagcggagtgcgcggccggagctcaaggactcgctggattggacccggcacaactactacgagagcttctcgctgagcccggcggccgtggcggataacgtggaaagggcagatgctttacagctgtctgtggaagaatttgtggagcggtatgaaagaccttacaagcccgtggttttgttgaatgcgcaagagggctggtctgcgcaggagaaatggactctggagcgcctaaaaaggaaatatcggaaccagaagttcaagtgtggtgaggataacgatggctactcagtgaagatgaagatgaaatactacatcgagtacatggagagcactcgagatgatagtcccctttacatctttgacagcagctatggtgaacaccctaaaagaaggaaacttttggaagactacaaggtgccaaagtttttcactgatgaccttttccagtatgctggggagaagcgcaggcccccttacaggtggtttgtgatggggccaccacgctccggaactgggattcacatcgaccctctgggaaccagtgcctggaatgccttagttcagggccacaagcgctggtgcctgtttcctaccagcactcccagggaactcatcaaagtgacccgagacgaaggagggaaccagcaagacgaagctattacctggtttaatgttatttatccccggacacagcttccaacctggccacctgaattcaaacccctggaaatcttacaaaaaccaggagagactgtctttgtaccaggaggctggtggcatgttgtcctcaatctcgacactactatcgccatcacccaaaattttgccagcagcaccaacttccctgtggtatggcacaagacggtaagagggagaccaaagttatcaaggaaatggtatagatacagcacgggcagcggcagtgcaagccacccacagccaccccgtgccactgtgtcccaaccctgacctggagggaccagctctcggggattttgaagcaagagcaccccgagttggcagtcctcgcagactcggttgaccttcaggagtccacagggatagcttccgacagctccagcgactcttccagctcctccagctccagttcgtcagactccgactcagagtgcgagtctggatccgagggcgatgggacagtgcaccgcaggaagaagaggaggacgtgcagcatggtgggaaacggggacaccacctcccaggacgactgtgtcagcaaagagcgcagctcctccaggtgacccagcaaggctgttgtctgtatggaaggacacgctcgcggcaagggcagggcctggggagggtggcctgtccagtcctgcagacaaggggaggcctgacagagcccaagaatgaggacaccctcggcacgggaacccattcacttagcgtttgctccagtagctttccctctgctaccaatgcagataaacgcggcttgttttactcaggcaagagaatgtgaatagtgccaagaaaatcctttacattatttaataaaaattgaatccattttc

SEQ ID NO: 429570 - DNA, 2452 bp, Homo sapiens
aagacggcggccgcttgcccaacccgaggctcgggaggtggctggggagtgaattttctggaaggcgactttaaaggcgccgggactgagcgaagggcgtttgggtactgccgtcgccgccgcccaggccggggaggggtgcgttagtgtcaggaagcgggctgcgccgaggtcgtagcggaaccagctggcgaccccgcagaatgaaccacaagagcaagaagcgcatccgcgaggccaagcggagtgcgcggccggagctcaaggactcgctggattggacccggcacaactactacgagagcttctcgctgagcccggcggccgtggcggataacgtggaaagggcagatgctttacagctgtctgtggaagaatttgtggagcggtatgaaagaccttacaagcccgtggttttgttgaatgcgcaagagggctggtctgcgcaggagaaatggactctggagcgcctaaaaaggaaatatcggaaccagaagttcaagtgtggtgaggataacgatggctactcagtgaagatgaagatgaaatactacatcgagtacatggagagcactcgagatgatagtcccctttacatctttgacagcagctatggtgaacaccctaaaagaaggaaacttttggaagactacaaggtgccaaagtttttcactgatgaccttttccagtatgctggggagaagcgcaggcccccttacaggtggtttgtgatggggccaccacgctccggaactgggattcacatcgaccctctgggaaccagtgcctggaatgccttagttcagggccacaagcgctggtgcctgtttcctaccagcactcccagggaactcatcaaagtgacccgagacgaaggagggaaccagcaagacgaagctattacctggtttaatgttatttatccccggacacagcttccaacctggccacctgaattcaaacccctggaaatcttacaaaaaccaggagagactgtctttgtaccaggaggctggtggcatgttgtcctcaatctcgacactactatcgccatcacccaaaattttgccagcagcaccaacttccctgtggtatggcacaagacggtaagagggagaccaaagttatcaaggaaatggtatagtaggtgagagtcatttttttcttatttctgcttggtttcaatttcgaccccagagataaaatggctagtccactgctgcgatgatgtgtgctgatcgtacacaggcctgggcaaagctggggctgccgaccctctgggtagaggagagaggggccaaggtcagggcaagtcctcagggtgttcgccagcctcgaggtggcagggtgagactctgcatgttgaatccaagccactcagtcaagacgtcataattgggattgtttctcgttttgttttgtattttgtttttcaaagctagcgctagctaaaatcattttatttgggttttatttgggttgtttctttttcttacctagaagcattattcccatttgaacttaataccttcagttcttgtgagtgaggtgactgccctggagacttagctcctctgtttatccacagaacagatacagcacgggcagcggcagtgcaagccacccacagccaccccgtgccactgtgtcccaaccctgacctggagggaccagctctcggggtaagagagggattctggcttgttccatgctcagcctccctgctgagagggccagtaagggtggtggcttctgttctccctggactcttgggcatctgaggcccacttaccccgccccgtaggccactgcgtgctgtgatttggtcacaccgcaggccttatgatacaacaggtcttttgtcactggatacagtggatgccagataaggtttctgaaggggagggctgctgctcttcagttcagttttacgctcccagtgaggggggaccatctctgttatttgacacctcgtatttcttacaaatctaattgtttctactcttagaaatagaatctaaccaatgcaactctgatcattatgtgctgtgctgtggaaaggaaagatttttttaaaaatcaactgggaaggaggaggacgtgcagcatggtgggaaacggggacaccacctcccaggacgactgtgtcagcaaagagcgcagctcctccaggtgacccagcaaggctgttgtctgtatggaaggacacgctcgcggcaagggcagggcctggggagggtggcctgtccagtcctgcagacaaggggaggcctgacagagcccaagaatgaggacaccctcggcacgggaacccattcacttagcgtttgctccagtagctttccctctgctaccaatgcagataaacgcggcttgttttactcaggcaagagaatgtgaatagtgccaagaaaatcctttacattatttaataaaaattgaatccattttc

SEQ ID NO: 429571 - DNA, 692 bp, Homo sapiens
cctcaccattgtacagtatccattctgaacggacacacctggcattcccaggtgtttctgagagacacaggcctcgactctgagtgagtctttgtgagtgggtatggctgtcagtgcactgagaacaacacttcttgcctctcaggattttgaagcaagagcaccccgagttggcagtcctcgcagactcggttgaccttcaggagtccacagggatagcttccgacagctccagcgactcttccagctcctccagctccagttcgtcagactccgactcagagtgcgagtctggatccgagggcgatgggacagtgcaccgcaggaagaagaggaggacgtgcagcatggtgggaaacggggacaccacctcccaggacgactgtgtcagcaaagagcgcagctcctccaggtgacccagcaaggctgttgtctgtatggaaggacacgctcgcggcaagggcagggcctggggagggtggcctgtccagtcctgcagacaaggggaggcctgacagagcccaagaatgaggacaccctcggcacgggaacccattcacttagcgtttgctccagtagctttccctctgctaccaatgcagataaacgcggcttgttttactcaggcaagagaatgtgaatagtgccaagaaaatcctttacattatttaataaaaattgaatccattttc

SEQ ID NO: 429572 - DNA, 768 bp, Homo sapiens
ctattaggatacagaacaatctaagagtaagcttgatagacatgatgtgacttcacttaaatggagtagagtgaataatgtaaggacactcacctctgttgaaattggtgatttctgcattttgtagacctttgccctctaagtttatcatcatattatctgttgaatctgaacagcatttgaagtcctctcaaagagtttgagctttcaggattaggttcccctgtgagtctttcacttgtgtaatggtaagtcaacattgatgatctttctaaggaaatcagatttacaaaatgctgagccgcttgatgtctaagtgttggtggtttttgctgttgctttgctgttccatgaaagcgctccctggctgcttggagggctgtgcttttccaggtcagtgccagcttggctgtcccaggccgtgcacagtgcccattgctatagctgggcccagtcctggccacgccggagcctcggcgggggcagctgggttgtcacggcagcacagtgcacatgcagagaggaccaggccatgtttttcctgtgctgagaaactcttgggttatttaatttttccaatgtgttttcataactcatgattatttgaaatacacttgtgttagtaactgcttctataattaagtggtcactgtaaaaaggcgaataacctatttttatatcagaatgtccaaaactcatgggtttgctttgttatagaaaaatgtgccattcatttgttgggtagaataaagttgtcttgtaattgta

SEQ ID NO: 429573 - DNA, 2515 bp, Homo sapiens
tgagcctgcgcttcggaagcatggatgtgcgcctgcgctgcgctagggcgcggcgggcggtttgaattttgcttacagagtcccgtctcaccatcctgggcttccaacggagactgcggtatccgcggctggagacccagcggcgagtagccttttgctcccggacggacttgagaggcttaaaggatggcctcgtcagatctggaacaattatgctctcatgttaatgaaaagattggcaatattaagaaaaccttatcattaagaaactgtggccaggaacctaccttgaaaactgtattaaataaaataggagatgagatcattgtaataaatgaacttctaaataaattggaattggaaattcagtatcaagaacaaaccaacaattcactcaaggaactctgtgaatctcttgaagaagattacaaagacatagaacatcttaaagaaaacattccttcccatttgcctcaagtaacagtaacccagagctgtgttaagggatcagatcttgatcctgaagaaccaatcaaagttgaagaacctgaacccgtaaagaagcctcccaaagagcaaagaagtattaaggaaatgccatttataacttgtgatgagttcaatggtgttccttcgtacatgaaatcccgcttaacctataatcaaattaatgatgttattaaagaaatcaacaaggcagtaattagtaaatataaaatcctacatcagccaaaaaagtctatgaattctgtgaccagaaatctctatcacagatttattgatgaagaaacgaaggataccaaaggtcgttattttatagtggaagctgacataaaggagttcacaactttgaaagctgacaagaagtttcacgtgttactgaatattttacgacactgccggaggctatcagaggtccgagggggaggacttactcgttatgttataacctgagtcccttgtgaacttttgaacataccaacagggtatagagtatagaggctatttctataattttcttatatataatttttttaacttttaatcttttttgtttccttttttttttttttggagacaggatcttgctttgtcacccaggggcttgctttgtcacgcaggctagagtgcagtggcgcaaacatggctcactgcagcctcaacctcccaggctcaagtgatcctcccacctcagccccctgaatggctgggactacaagcgtgcgccaccatgcctggctaatttttgtattttttggagagatggggtttcaccatgttgcctaggctggtcttgagctcctgagctcaaacaatccaccctcctcagcctcccaaagtgctgggattacaggcttgagccaccacacctgacctattcttgtttcttataaaaataaaacttttttggataaagcttatttcttgtttttttctttttctttttttttttttgagacagtctcgctctttcacccaggccggactgcagcggcgctatctcggctcactgcaaactctgcctcccaggttcacgccatcctcctgcctcccagctactcaggagaattgcttgaacctgggaggtggaggttgcagtgagccgagatcgtgccactgcactccagtctgggcaacagagcgagactccatctcagaaaaaaagaaaaaaagactgggtacagatgtgatattggaagaaaaagatcaagctgatgaggttaggatacccaggccctttggacttaaagatcactagtgtctaaattccatcgatggcatttcagtctataggtaaacttcctggaagctggatttggagacagtttatcatctgattattgggctttcgtataggtccttagggagcagcttacctgaaatgcatttagtgtacaccagtctgtaaacttcaacctgtaatgaaagtgtaataaatgtacattgagttgatgtgataatgtgatataataagaaatatatatttgatcttcctatctagttccttgttcagagctcctaaaacccttgtaatttccaaagtgatggagtacatcttttgttctagtatttggtctttgaccccagttcctgacacaaagctcctaaattcctttaaatttcccagtgataggagaattttttgttctaatgaggtcactcttgatgggcacctggataactcaggatgggggctgctcacaaagaccacatcatgattggaagtttcaaactttcagtctcccacctccagagaggggagaggggctggagatttgtgtcaataatccatcaggcctatgtcaacaagacataatccgttaactatggagttcagggagcttcagggttggcaaacattttgatgtgccaggaaggtgacgcactccagctttatgaagtcagcaagtcctgtgctcaggatgcttctggaccttgccccaggtaccccttcatgtggctgttgttcatctgtatcctttgtagtagccttaaaataaactgttaaacacaa

SEQ ID NO: 429574 - DNA, 741 bp, Homo sapiens
caggcacctgccaccacgcccagctaattttttgtatttttagtagagatggggtttcaccgtgttagccaggatggtctcgatctcctgacctcatgatccgcccacctcggcctcccaaagtgctgggattacaggcgtgagccaccgcgcccggccaacttatatattttcaagattcacctcctctcaccaaatatttaactacctgctgaatacgcctctgtactaggcacataatggaactaaaaaatgctcatgtccagtttttgtgttgagtgaacaatgctgcagaccctaataagattgggtacagatcggcatgcgcctgtagtcccagctactcaggagaattgcttgaacctgggaggtggaggttgcagtgagccgagatcgtgccactgcactccagtctgggcaacagagcgagactccatctcagaaaaaaagaaaaaaagactgggtacagatgtgatattggaagaaaaagatcaagctgatgaggttaggatacccaggccctttggacttaaagatcactagtgtctaaattccatcgatggcatttcagtctataggtaaacttcctggaagctggatttggagacagtttatcatctgattattgggctttcgtataggtccttagggagcagcttacctgaaatgcatttagtgtacaccagtctgtaaacttcaacctgtaatgaaagtgtaataaatgtacattgagttgatgtg

SEQ ID NO: 429575 - DNA, 916 bp, Homo sapiens
tctcggcctccttaccgatcccaaactgtaaagccccaacccctcacagcacaggaaaaatgattacctgggcccatttctttgacagtgtaacacatttttaaaaaatgtgtccttattttgcgtgtttaaagaaaataccaatgttgtctttatatacaaatagtgcgtttgtcctcctgaatccttaaggaaaggacccaggcttatcctctttcccctggtttgggatccatcgatggcctaaggctctaagacaagtcagtacggtaccgtggttagaaactgaatgttgtagaaatgaaagaaattgctcttgaatttttgtgcttaaccttcaaagacatgtgatttacttgacattgaccattcttggatttcgaaagtgaacagaaatttgtgtggcttttcttgttacgaatatgtttatgtttttttcttcagaggcttaaaggatggcctcgtcagatctggaacaattatgctctcatgttaatgaaaagattggcaatattaagaaaaccttatcattaagaaactgtggtgttctcttgcaactagcaagtgaaggcttgccaaatgacatgaccttggatcttgcttaccttctgccttagcacaacgtgtgagatgctaaccgggcttgaaaagccgccccctctgattaatctctccagctgggaggtattacatagcgtcagattatgccgaggggccatgttcacggacagtgcacccttacaggtgatccaagaataatagaagccaggcatgcacggatgacccagcggctgaactatttcgggaaacgaacgtcagagccgagaccggacctcggcgagggaaggacaaacaccaaaaccgggaaaacgaacacccaacaccgccaacgaccaggcaagcatacaaatccacc

SEQ ID NO: 429576 - DNA, 3126 bp, Homo sapiens
  misc_feature (2957)..(2957): n is a, c, g, or t
  misc_feature (3050)..(3050): n is a, c, g, or t
tgagcctgcgcttcggaagcatggatgtgcgcctgcgctgcgctagggcgcggcgggcggtttgaattttgcttacagagtcccgtctcaccatcctgggcttccaacggagactgcggtatccgcggctggagacccagcggcgagtagccttttgctcccggacggacttgaggttggagtctgtgtgttggggaccctgcctttggaagcgcccgagaggcttaaaggatggcctcgtcagatctggaacaattatgctctcatgttaatgaaaagattggcaatattaagaaaaccttatcattaagaaactgtggccaggaacctaccttgaaaactgtattaaataaaataggagatgagatcattgtaataaatgaacttctaaataaattggaattggaaattcagtatcaagaacaaaccaacaattcactcaaggaactctgtgaatctcttgaagaagattacaaagacatagaacatcttaaagaaaacattccttcccatttgcctcaagtaacagtaacccagagctgtgttaagggatcagatcttgatcctgaagaaccaatcaaagttgaagaacctgaacccgtaaagaagcctcccaaagagcaaagaagtattaaggaaatgccatttataacttgtgatgagttcaatggtgttccttcgtacatgaaatcccgcttaacctataatcaaattaatgatgttattaaagaaatcaacaaggcagtaattagtaaatataaaatcctacatcagccaaaaaagtctatgaattctgtgaccagaaatctctatcacagatttattgatgaagaaacgaaggataccaaaggtcgttattttatagtggaagctgacataaaggagttcacaactttgaaagctgacaagaagtttcacgtgttactgaatattttacgacactgccggaggctatcagaggtccgagggggaggacttactcgttatgttataacctgagtcccttgtgaacttttgaacataccaacagggtatagagtatagaggctatttctataattttcttatatataatttttttaacttttaatcttttttgtttccttttttttttttttggagacaggatcttgctttgtcacccaggggcttgctttgtcacgcaggctagagtgcagtggcgcaaacatggctcactgcagcctcaacctcccaggctcaagtgatcctcccacctcagccccctgaatggctgggactacaagcgtgcgccaccatgcctggctaatttttgtattttttggagagatggggtttcaccatgttgcctaggctggtcttgagctcctgagctcaaacaatccaccctcctcagcctcccaaagtgctgggattacaggcttgagccaccacacctgacctattcttgtttcttataaaaataaaacttttttggataaagcttatttcttgtttttttctttttctttttttttttttgagacagtctcgctctttcacccaggccggactgcagcggcgctatctcggctcactgcaaactctgcctcccaggttcacgccatcctcctgcctcccagctactcaggagaattgcttgaacctgggaggtggaggttgcagtgagccgagatcgtgccactgcactccagtctgggcaacagagcgagactccatctcagaaaaaaagaaaaaaagactgggtacagatgtgatattggaagaaaaagatcaagctgatgaggttaggatacccaggccctttggacttaaagatcactagtgtctaaattccatcgatggcatttcagtctataggtaaacttcctggaagctggatttggagacagtttatcatctgattattgggctttcgtataggtccttagggagcagcttacctgaaatgcatttagtgtacaccagtctgtaaacttcaacctgtaatgaaagtgtaataaatgtacattgagttgatgtgataatgtgatataataagaaatatatatttgatcttcctatctagttccttgttcagagctcctaaaacccttgtaatttccaaagtgatggagtacatcttttgttctagtatttggtctttgaccccagttcctgacacaaagctcctaaattcctttaaatttcccagtgataggagaattttttgttctaatgaggtcactcttgatgggcacctggataactcaggatgggggctgctcacaaagaccacatcatgattggaagtttcaaactttcagtctcccacctccagagaggggagaggggctggagatttgtgtcaataatccatcaggcctatgtcaacaagacataatccgttaactatggagttcagggagcttcagggttggcaaacattttgatgtgccaggaaggtgacgcactccagctttatgaagtcagcaagtcctgtgctcaggatgcttctggaccttgccccaggtaccccttcatgtggctgttgttcatctgtatcctttgtagtagccttaaaataaactgttaaacacaaaaaaaaaaaaaaaaaaaaaaaaaaaaaaaaaaaaaaaaaaaaaaaaaggggggggcgccaccaaaaaggtgcccggggggggaccaaaacctggggggggccccattctgtggacaacaggggcccccataggaggggggccccaaaagaggggtcggcccgtaaaaggggggagtggggaaaacgcgtcgggggacccttggacacgaccacccactgctggaggggagccacacatcggcagaacgcaccaaaggaaaattaacccgcccaaggcagaaacacacacccttgcttaggacagtaacagggagaccacaaacacacagttcacacagcgcagcagctgcgacaccgagcgtctttacccaaatcttccaagtcaccacgcaggagncagcagaactacagcaagccagaaacagtacgaaaccggactggagcccagacatctagcgtagacccagccagaacgagaggaagagcaaanaggaaaagcacaacgacccgcgagaagaagagccagaacatagtccgtgagcacagacgcacgcaggaagcaagtg

SEQ ID NO: 429577 - DNA, 1865 bp, Homo sapiens
  misc_feature (1696)..(1696): n is a, c, g, or t
  misc_feature (1789)..(1789): n is a, c, g, or t
caggcacctgccaccacgcccagctaattttttgtatttttagtagagatggggtttcaccgtgttagccaggatggtctcgatctcctgacctcatgatccgcccacctcggcctcccaaagtgctgggattacaggcgtgagccaccgcgcccggccaacttatatattttcaagattcacctcctctcaccaaatatttaactacctgctgaatacgcctctgtactaggcacataatggaactaaaaaatgctcatgtccagtttttgtgttgagtgaacaatgctgcagaccctaataagattgggtacagatcggcatgcgcctgtagtcccagctactcaggagaattgcttgaacctgggaggtggaggttgcagtgagccgagatcgtgccactgcactccagtctgggcaacagagcgagactccatctcagaaaaaaagaaaaaaagactgggtacagatgtgatattggaagaaaaagatcaagctgatgaggttaggatacccaggccctttggacttaaagatcactagtgtctaaattccatcgatggcatttcagtctataggtaaacttcctggaagctggatttggagacagtttatcatctgattattgggctttcgtataggtccttagggagcagcttacctgaaatgcatttagtgtacaccagtctgtaaacttcaacctgtaatgaaagtgtaataaatgtacattgagttgatgtgataatgtgatataataagaaatatatatttgatcttcctatctagttccttgttcagagctcctaaaacccttgtaatttccaaagtgatggagtacatcttttgttctagtatttggtctttgaccccagttcctgacacaaagctcctaaattcctttaaatttcccagtgataggagaattttttgttctaatgaggtcactcttgatgggcacctggataactcaggatgggggctgctcacaaagaccacatcatgattggaagtttcaaactttcagtctcccacctccagagaggggagaggggctggagatttgtgtcaataatccatcaggcctatgtcaacaagacataatccgttaactatggagttcagggagcttcagggttggcaaacattttgatgtgccaggaaggtgacgcactccagctttatgaagtcagcaagtcctgtgctcaggatgcttctggaccttgccccaggtaccccttcatgtggctgttgttcatctgtatcctttgtagtagccttaaaataaactgttaaacacaaaaaaaaaaaaaaaaaaaaaaaaaaaaaaaaaaaaaaaaaaaaaaaaaggggggggcgccaccaaaaaggtgcccggggggggaccaaaacctggggggggccccattctgtggacaacaggggcccccataggaggggggccccaaaagaggggtcggcccgtaaaaggggggagtggggaaaacgcgtcgggggacccttggacacgaccacccactgctggaggggagccacacatcggcagaacgcaccaaaggaaaattaacccgcccaaggcagaaacacacacccttgcttaggacagtaacagggagaccacaaacacacagttcacacagcgcagcagctgcgacaccgagcgtctttacccaaatcttccaagtcaccacgcaggagncagcagaactacagcaagccagaaacagtacgaaaccggactggagcccagacatctagcgtagacccagccagaacgagaggaagagcaaanaggaaaagcacaacgacccgcgagaagaagagccagaacatagtccgtgagcacagacgcacgcaggaagcaagtg

SEQ ID NO: 429578 - DNA, 2818 bp, Homo sapiens
  misc_feature (2649)..(2649): n is a, c, g, or t
  misc_feature (2742)..(2742): n is a, c, g, or t
tgagcctgcgcttcggaagcatggatgtgcgcctgcgctgcgctagggcgcggcgggcggtttgaattttgcttacagagtcccgtctcaccatcctgggcttccaacggagactgcggtatccgcggctggagacccagcggcgagtagccttttgctcccggacggacttgagaggcttaaaggatggcctcgtcagatctggaacaattatgctctcatgttaatgaaaagattggcaatattaagaaaaccttatcattaagaaactgtggaactctgtgaatctcttgaagaagattacaaagacatagaacatcttaaagaaaacattccttcccatttgcctcaagtaacagtaacccagagctggtacatgaaatcccgcttaacctataatcaaattaatgatgttattaaagaaatcaacaaggcagtaattagtaaatataaaatcctacatcagccaaaaaagtctatgaattctgtgaccagaaatctctatcacagatttattgatgaagaaacgaaggataccaaaggtcgttattttatagtggaagctgacataaaggagttcacaactttgaaagctgacaagaagtttcacgtgttactgaatattttacgacactgccggaggctatcagaggtccgagggggaggacttactcgttatgttataacctgagtcccttgtgaacttttgaacataccaacagggtatagagtatagaggctatttctataattttcttatatataatttttttaacttttaatcttttttgtttccttttttttttttttggagacaggatcttgctttgtcacccaggggcttgctttgtcacgcaggctagagtgcagtggcgcaaacatggctcactgcagcctcaacctcccaggctcaagtgatcctcccacctcagccccctgaatggctgggactacaagcgtgcgccaccatgcctggctaatttttgtattttttggagagatggggtttcaccatgttgcctaggctggtcttgagctcctgagctcaaacaatccaccctcctcagcctcccaaagtgctgggattacaggcttgagccaccacacctgacctattcttgtttcttataaaaataaaacttttttggataaagcttatttcttgtttttttctttttctttttttttttttgagacagtctcgctctttcacccaggccggactgcagcggcgctatctcggctcactgcaaactctgcctcccaggttcacgccatcctcctgcctcccagctactcaggagaattgcttgaacctgggaggtggaggttgcagtgagccgagatcgtgccactgcactccagtctgggcaacagagcgagactccatctcagaaaaaaagaaaaaaagactgggtacagatgtgatattggaagaaaaagatcaagctgatgaggttaggatacccaggccctttggacttaaagatcactagtgtctaaattccatcgatggcatttcagtctataggtaaacttcctggaagctggatttggagacagtttatcatctgattattgggctttcgtataggtccttagggagcagcttacctgaaatgcatttagtgtacaccagtctgtaaacttcaacctgtaatgaaagtgtaataaatgtacattgagttgatgtgataatgtgatataataagaaatatatatttgatcttcctatctagttccttgttcagagctcctaaaacccttgtaatttccaaagtgatggagtacatcttttgttctagtatttggtctttgaccccagttcctgacacaaagctcctaaattcctttaaatttcccagtgataggagaattttttgttctaatgaggtcactcttgatgggcacctggataactcaggatgggggctgctcacaaagaccacatcatgattggaagtttcaaactttcagtctcccacctccagagaggggagaggggctggagatttgtgtcaataatccatcaggcctatgtcaacaagacataatccgttaactatggagttcagggagcttcagggttggcaaacattttgatgtgccaggaaggtgacgcactccagctttatgaagtcagcaagtcctgtgctcaggatgcttctggaccttgccccaggtaccccttcatgtggctgttgttcatctgtatcctttgtagtagccttaaaataaactgttaaacacaaaaaaaaaaaaaaaaaaaaaaaaaaaaaaaaaaaaaaaaaaaaaaaaaggggggggcgccaccaaaaaggtgcccggggggggaccaaaacctggggggggccccattctgtggacaacaggggcccccataggaggggggccccaaaagaggggtcggcccgtaaaaggggggagtggggaaaacgcgtcgggggacccttggacacgaccacccactgctggaggggagccacacatcggcagaacgcaccaaaggaaaattaacccgcccaaggcagaaacacacacccttgcttaggacagtaacagggagaccacaaacacacagttcacacagcgcagcagctgcgacaccgagcgtctttacccaaatcttccaagtcaccacgcaggagncagcagaactacagcaagccagaaacagtacgaaaccggactggagcccagacatctagcgtagacccagccagaacgagaggaagagcaaanaggaaaagcacaacgacccgcgagaagaagagccagaacatagtccgtgagcacagacgcacgcaggaagcaagtg

SEQ ID NO: 429579 - DNA, 3081 bp, Homo sapiens
  misc_feature (2912)..(2912): n is a, c, g, or t
  misc_feature (3005)..(3005): n is a, c, g, or t
tgagcctgcgcttcggaagcatggatgtgcgcctgcgctgcgctagggcgcggcgggcggtttgaattttgcttacagagtcccgtctcaccatcctgggcttccaacggagactgcggtatccgcggctggagacccagcggcgagtagccttttgctcccggacggacttgagaggcttaaaggatggcctcgtcagatctggaacaattatgctctcatgttaatgaaaagattggcaatattaagaaaaccttatcattaagaaactgtggccaggaacctaccttgaaaactgtattaaataaaataggagatgagatcattgtaataaatgaacttctaaataaattggaattggaaattcagtatcaagaacaaaccaacaattcactcaaggaactctgtgaatctcttgaagaagattacaaagacatagaacatcttaaagaaaacattccttcccatttgcctcaagtaacagtaacccagagctgtgttaagggatcagatcttgatcctgaagaaccaatcaaagttgaagaacctgaacccgtaaagaagcctcccaaagagcaaagaagtattaaggaaatgccatttataacttgtgatgagttcaatggtgttccttcgtacatgaaatcccgcttaacctataatcaaattaatgatgttattaaagaaatcaacaaggcagtaattagtaaatataaaatcctacatcagccaaaaaagtctatgaattctgtgaccagaaatctctatcacagatttattgatgaagaaacgaaggataccaaaggtcgttattttatagtggaagctgacataaaggagttcacaactttgaaagctgacaagaagtttcacgtgttactgaatattttacgacactgccggaggctatcagaggtccgagggggaggacttactcgttatgttataacctgagtcccttgtgaacttttgaacataccaacagggtatagagtatagaggctatttctataattttcttatatataatttttttaacttttaatcttttttgtttccttttttttttttttggagacaggatcttgctttgtcacccaggggcttgctttgtcacgcaggctagagtgcagtggcgcaaacatggctcactgcagcctcaacctcccaggctcaagtgatcctcccacctcagccccctgaatggctgggactacaagcgtgcgccaccatgcctggctaatttttgtattttttggagagatggggtttcaccatgttgcctaggctggtcttgagctcctgagctcaaacaatccaccctcctcagcctcccaaagtgctgggattacaggcttgagccaccacacctgacctattcttgtttcttataaaaataaaacttttttggataaagcttatttcttgtttttttctttttctttttttttttttgagacagtctcgctctttcacccaggccggactgcagcggcgctatctcggctcactgcaaactctgcctcccaggttcacgccatcctcctgcctcccagctactcaggagaattgcttgaacctgggaggtggaggttgcagtgagccgagatcgtgccactgcactccagtctgggcaacagagcgagactccatctcagaaaaaaagaaaaaaagactgggtacagatgtgatattggaagaaaaagatcaagctgatgaggttaggatacccaggccctttggacttaaagatcactagtgtctaaattccatcgatggcatttcagtctataggtaaacttcctggaagctggatttggagacagtttatcatctgattattgggctttcgtataggtccttagggagcagcttacctgaaatgcatttagtgtacaccagtctgtaaacttcaacctgtaatgaaagtgtaataaatgtacattgagttgatgtgataatgtgatataataagaaatatatatttgatcttcctatctagttccttgttcagagctcctaaaacccttgtaatttccaaagtgatggagtacatcttttgttctagtatttggtctttgaccccagttcctgacacaaagctcctaaattcctttaaatttcccagtgataggagaattttttgttctaatgaggtcactcttgatgggcacctggataactcaggatgggggctgctcacaaagaccacatcatgattggaagtttcaaactttcagtctcccacctccagagaggggagaggggctggagatttgtgtcaataatccatcaggcctatgtcaacaagacataatccgttaactatggagttcagggagcttcagggttggcaaacattttgatgtgccaggaaggtgacgcactccagctttatgaagtcagcaagtcctgtgctcaggatgcttctggaccttgccccaggtaccccttcatgtggctgttgttcatctgtatcctttgtagtagccttaaaataaactgttaaacacaaaaaaaaaaaaaaaaaaaaaaaaaaaaaaaaaaaaaaaaaaaaaaaaaggggggggcgccaccaaaaaggtgcccggggggggaccaaaacctggggggggccccattctgtggacaacaggggcccccataggaggggggccccaaaagaggggtcggcccgtaaaaggggggagtggggaaaacgcgtcgggggacccttggacacgaccacccactgctggaggggagccacacatcggcagaacgcaccaaaggaaaattaacccgcccaaggcagaaacacacacccttgcttaggacagtaacagggagaccacaaacacacagttcacacagcgcagcagctgcgacaccgagcgtctttacccaaatcttccaagtcaccacgcaggagncagcagaactacagcaagccagaaacagtacgaaaccggactggagcccagacatctagcgtagacccagccagaacgagaggaagagcaaanaggaaaagcacaacgacccgcgagaagaagagccagaacatagtccgtgagcacagacgcacgcaggaagcaagtg

SEQ ID NO: 429580 - DNA, 3001 bp, Homo sapiens
  misc_feature (2832)..(2832): n is a, c, g, or t
  misc_feature (2925)..(2925): n is a, c, g, or t
tgagcctgcgcttcggaagcatggatgtgcgcctgcgctgcgctagggcgcggcgggcggtttgaattttgcttacagagtcccgtctcaccatcctgggcttccaacggagactgcggtatccgcggctggagacccagcggcgagtagccttttgctcccggacggacttgaggttggagtctgtgtgttggggaccctgcctttggaagcgcccgagaggcttaaaggatggcctcgtcagatctggaacaattatgctctcatgttaatgaaaagattggcaatattaagaaaaccttatcattaagaaactgtggaactctgtgaatctcttgaagaagattacaaagacatagaacatcttaaagaaaacattccttcccatttgcctcaagtaacagtaacccagagctgtgttaagggatcagatcttgatcctgaagaaccaatcaaagttgaagaacctgaacccgtaaagaagcctcccaaagagcaaagaagtattaaggaaatgccatttataacttgtgatgagttcaatggtgttccttcgtacatgaaatcccgcttaacctataatcaaattaatgatgttattaaagaaatcaacaaggcagtaattagtaaatataaaatcctacatcagccaaaaaagtctatgaattctgtgaccagaaatctctatcacagatttattgatgaagaaacgaaggataccaaaggtcgttattttatagtggaagctgacataaaggagttcacaactttgaaagctgacaagaagtttcacgtgttactgaatattttacgacactgccggaggctatcagaggtccgagggggaggacttactcgttatgttataacctgagtcccttgtgaacttttgaacataccaacagggtatagagtatagaggctatttctataattttcttatatataatttttttaacttttaatcttttttgtttccttttttttttttttggagacaggatcttgctttgtcacccaggggcttgctttgtcacgcaggctagagtgcagtggcgcaaacatggctcactgcagcctcaacctcccaggctcaagtgatcctcccacctcagccccctgaatggctgggactacaagcgtgcgccaccatgcctggctaatttttgtattttttggagagatggggtttcaccatgttgcctaggctggtcttgagctcctgagctcaaacaatccaccctcctcagcctcccaaagtgctgggattacaggcttgagccaccacacctgacctattcttgtttcttataaaaataaaacttttttggataaagcttatttcttgtttttttctttttctttttttttttttgagacagtctcgctctttcacccaggccggactgcagcggcgctatctcggctcactgcaaactctgcctcccaggttcacgccatcctcctgcctcccagctactcaggagaattgcttgaacctgggaggtggaggttgcagtgagccgagatcgtgccactgcactccagtctgggcaacagagcgagactccatctcagaaaaaaagaaaaaaagactgggtacagatgtgatattggaagaaaaagatcaagctgatgaggttaggatacccaggccctttggacttaaagatcactagtgtctaaattccatcgatggcatttcagtctataggtaaacttcctggaagctggatttggagacagtttatcatctgattattgggctttcgtataggtccttagggagcagcttacctgaaatgcatttagtgtacaccagtctgtaaacttcaacctgtaatgaaagtgtaataaatgtacattgagttgatgtgataatgtgatataataagaaatatatatttgatcttcctatctagttccttgttcagagctcctaaaacccttgtaatttccaaagtgatggagtacatcttttgttctagtatttggtctttgaccccagttcctgacacaaagctcctaaattcctttaaatttcccagtgataggagaattttttgttctaatgaggtcactcttgatgggcacctggataactcaggatgggggctgctcacaaagaccacatcatgattggaagtttcaaactttcagtctcccacctccagagaggggagaggggctggagatttgtgtcaataatccatcaggcctatgtcaacaagacataatccgttaactatggagttcagggagcttcagggttggcaaacattttgatgtgccaggaaggtgacgcactccagctttatgaagtcagcaagtcctgtgctcaggatgcttctggaccttgccccaggtaccccttcatgtggctgttgttcatctgtatcctttgtagtagccttaaaataaactgttaaacacaaaaaaaaaaaaaaaaaaaaaaaaaaaaaaaaaaaaaaaaaaaaaaaaaggggggggcgccaccaaaaaggtgcccggggggggaccaaaacctggggggggccccattctgtggacaacaggggcccccataggaggggggccccaaaagaggggtcggcccgtaaaaggggggagtggggaaaacgcgtcgggggacccttggacacgaccacccactgctggaggggagccacacatcggcagaacgcaccaaaggaaaattaacccgcccaaggcagaaacacacacccttgcttaggacagtaacagggagaccacaaacacacagttcacacagcgcagcagctgcgacaccgagcgtctttacccaaatcttccaagtcaccacgcaggagncagcagaactacagcaagccagaaacagtacgaaaccggactggagcccagacatctagcgtagacccagccagaacgagaggaagagcaaanaggaaaagcacaacgacccgcgagaagaagagccagaacatagtccgtgagcacagacgcacgcaggaagcaagtg

SEQ ID NO: 429581 - DNA, 1140 bp, Homo sapiens
ccaagcgccttctccgcaccagggaagccccacccaccagaagccaagatgtccagcaagcgggccaaagccaagaccaccaagaagcggccacagcgggccacatccaatgtcttcgcaatgtttgaccagtcccagatccaggagtttaaggaggctttcaacatgattgaccagaaccgtgatggcttcattgacaaggaggacctgcacgacatgctggcctcgctggggaagaaccccacagacgaatacctggagggcatgatgagcgaggccccggggcccatcaacttcaccatgttcctcaccatgtttggggagaagctgaacggcacggaccccgaggatgtgattcgcaacgcctttgcctgcttcgacgaggaagcctcaggtttcatccatgaggaccacctccgggagctgctcaccaccatgggtgaccgcttcacagatgaggaagtggacgagatgtaccgggaggcacccattgataagaaaggcaacttcaactacgtggagttcacccgcatcctcaaacatggcgccaaggataaagacgactaggccaccccagccccctgacaccccagcccccgccagtcacccctccccgcacacacccgtccataccagctccctgcccatgaccctcgctcagggatccccctttgaggggttagggtcccagttcccagtggaagaaacaggccaggagaagtgcgtgccgagctgaggcagatgttcccacagtgaccccagagccctgggctatagtctctgacccctccaaggaaagaccaccttctggggacatgggctggagggcaggacctagaggcaccaagggaaggccccattccggggctgttccccgaggaggaagggaaggggctctgtgtgccccccaggaggaagaggccctgagtcctgggatcagacaccccttcacgtgtatccccacacaaatgcaagctcaccaaggtcccctctcagtccccttccctacaccctgaccggccactgccgcacacccacccagagcacgccacccgccatgggagtgtgctcaggagtcgcgggcagcgtggacatctgtcccagagggggcagaatctccaatagaggactgagcactgc

SEQ ID NO: 429582 - DNA, 461 bp, Homo sapiens
  misc_feature (45)..(45): n is a, c, g, or t
  misc_feature (50)..(50): n is a, c, g, or t
agatttaagttaaaaagtggtttggacttgggaacaggactttanacctnttttactgtaacaagtactcattaaaggaaattgaatgaaaaaaaaaaaaaaaaaactcggcaaggaaagaccaccttctggggacatgggctggagggcaggacctagaggcaccaagggaaggccccattccggggctgttccccgaggaggaagggaaggggctctgtgtgccccccaggaggaagaggccctgagtcctgggatcagacaccccttcacgtgtatccccacacaaatgcaagctcaccaaggtcccctctcagtccccttccctacaccctgaccggccactgccgcacacccacccagagcacgccacccgccatgggagtgtgctcaggagtcgcgggcagcgtggacatctgtcccagagggggcagaatctccaatagaggactgagcactgc

SEQ ID NO: 429583 - DNA, 1075 bp, Homo sapiens
ctcaaactccagagcccatcttggcctcccaaagtactgggattacaggtgtgagctaccacgcctggccaactccagggttcttatctggggctttcccagcttcgtggaaggactgaggcctggtgagagaaggggctggccttaagtaccccagtgtcctggcgtcacagctcctcttgggcctcagcttccatggccatcccagggggacacagcagggtatgtgaggctcagggacatgaaaacttcctatttccaaggccacaccctgcacccaggcccctgaacccctgagacttcatgacagccctgggtgtccacccagaaaaacatgcactgtgtttgtagctcatatccgtgggtctgcaggtgagtcacacccttatcttcaagttaaaaacaagagcagcaaatataataataagaagaagccctgcaggtattatcttaaatctcaaagcaatcctattgaacagatacaattattcccactttacaaacaaggaaactgaggctcagagaggttaagtaatttacccaaggtcacacagctaccaagtagtggggctgcaatagaaacccagcagttgattccagtccataggcctgtgccagtcattgttatgagccttttgcaactactgtcttcacaattcccctaagagatggggaaaaccaaggtgcacagctgggatccaaacccaggcctgtctgacagcaaagcactgtgtctggactttggagttaggctgcctgggttcaaatgccaggtctactcaagtctcctccttacttgctgtctgaccctggacaagtcacctggcctctctgtgcctcaggttccatacctgtgaagtgggtaagaatgctgacttcacagggtggtgaaagttaaatgcaataaggcacgtggtcgaccagccacagcgagcagtctgcagagggttgttcttattacactttagtgagcactgccggctgctgacatccaggccacaggaggaaactggtgggagcagccagggactccgggcgcccactgctgtggctgcgctagagccatgctttccag

SEQ ID NO: 429584 - DNA, 1180 bp, Homo sapiens
cagacccgacggccggcccagttccacgcacccagcgagcccaagcgccttctccgcaccagggaagccccacccaccagaagccaagatgtccagcaagcgggccaaagccaagaccaccaagaagcggccacagcgggccacatccaatgtcttcgcaatgtttgaccagtcccagatccaggagtttaaggaggctttcaacatgattgaccagaaccgtgatggcttcattgacaaggaggacctgcacgacatgctggcctcgctggggaagaaccccacagacgaatacctggagggcatgatgagcgaggccccggggcccatcaacttcaccatgttcctcaccatgtttggggagaagctgaacggcacggaccccgaggatgtgattcgcaacgcctttgcctgcttcgacgaggaagcctcaggtttcatccatgaggaccacctccgggagctgctcaccaccatgggtgaccgcttcacagatgaggaagtggacgagatgtaccgggaggcacccattgataagaaaggcaacttcaactacgtggagttcacccgcatcctcaaacatggcgccaaggataaagacgactaggccaccccagccccctgacaccccagcccccgccagtcacccctccccgcacacacccgtccataccagctccctgcccatgaccctcgctcagggatccccctttgaggggttagggtcccagttcccagtggaagaaacaggccaggagaagtgcgtgccgagctgaggcagatgttcccacagtgaccccagagccctgggctatagtctctgacccctccaaggaaagaccaccttctggggacatgggctggagggcaggacctagaggcaccaagggaaggccccattccggggctgttccccgaggaggaagggaaggggctctgtgtgccccccaggaggaagaggccctgagtcctgggatcagacaccccttcacgtgtatccccacacaaatgcaagctcaccaaggtcccctctcagtccccttccctacaccctgaccggccactgccgcacacccacccagagcacgccacccgccatgggagtgtgctcaggagtcgcgggcagcgtggacatctgtcccagagggggcagaatctccaatagaggactgagcactgc

SEQ ID NO: 429585 - DNA, 1150 bp, Homo sapiens
tgtgagccatccttgcgccttctccgcaccagggaagccccacccaccagaagccaagatgtccagcaagcgggccaaagccaagaccaccaagaagcggccacagcgggccacatccaatgtcttcgcaatgtttgaccagtcccagatccaggagtttaaggaggctttcaacatgattgaccagaaccgtgatggcttcattgacaaggaggacctgcacgacatgctggcctcgctggggaagaaccccacagacgaatacctggagggcatgatgagcgaggccccggggcccatcaacttcaccatgttcctcaccatgtttggggagaagctgaacggcacggaccccgaggatgtgattcgcaacgcctttgcctgcttcgacgaggaagcctcaggtttcatccatgaggaccacctccgggagctgctcaccaccatgggtgaccgcttcacagatgaggaagtggacgagatgtaccgggaggcacccattgataagaaaggcaacttcaactacgtggagttcacccgcatcctcaaacatggcgccaaggataaagacgactaggccaccccagccccctgacaccccagcccccgccagtcacccctccccgcacacacccgtccataccagctccctgcccatgaccctcgctcagggatccccctttgaggggttagggtcccagttcccagtggaagaaacaggccaggagaagtgcgtgccgagctgaggcagatgttcccacagtgaccccagagccctgggctatagtctctgacccctccaaggaaagaccaccttctggggacatgggctggagggcaggacctagaggcaccaagggaaggccccattccggggctgttccccgaggaggaagggaaggggctctgtgtgccccccaggaggaagaggccctgagtcctgggatcagacaccccttcacgtgtatccccacacaaatgcaagctcaccaaggtcccctctcagtccccttccctacaccctgaccggccactgccgcacacccacccagagcacgccacccgccatgggagtgtgctcaggagtcgcgggcagcgtggacatctgtcccagagggggcagaatctccaatagaggactgagcactgc

SEQ ID NO: 429586 - DNA, 1930 bp, Homo sapiens
ccaagcgccttctccgcaccagggaagccccacccaccagaagccaagatgtccagcaagcgggccaaagccaagaccaccaagaagcggccacagcgggccacatccaatgtcttcgcaatgtttgaccagtcccagatccaggagtttaaggaggctttcaacatgattgaccagaaccgtgatggcttcattgacaaggaggacctgcacgacatgctggcctcgctggggaagaaccccacagacgaatacctggagggcatgatgagcgaggccccggggcccatcaacttcaccatgttcctcaccatgtttggggagaagctgaacggcacggaccccgaggatgtgattcgcaacgcctttgcctgcttcgacgaggaagcctcaggtttcatccatgaggaccacctccgggagctgctcaccaccatgggtgaccgcttcacagatgaggaagtggacgagatgtaccgggaggcacccattgataagaaaggcaacttcaactacgtggagttcacccgcatcctcaaacatggcgccaaggataaagacgactaggccaccccagccccctgacaccccagcccccgccagtcacccctccccgcacacacccgtccataccagctccctgcccatgaccctcgctcagggatccccctttgaggggttagggtcccagttcccagtggaagaaacaggccaggagaagtgcgtgccgagctgaggcagatgttcccacagtgaccccagagccctgggctatagtctctgacccctccaaggaaagaccaccttctggggacatgggctggagggcaggacctagaggcaccaagggaaggccccattccggggctgttccccgaggaggaagggaaggggctctgtgtgccccccaggaggaagaggccctgagtcctgggatcagacaccccttcacgtgtatccccacacaaatgcaagctcaccaaggtcccctctcagtccccttccctacaccctgaccggccactgccgcacacccacccagagcacgccacccgccatgggagtgtgctcaggagtcgcgggcagcgtggacatctgtcccagagggggcagaatctccaatagaggactgagcactgcaaaaaaaaaaaaaaaaaaaaaaaaaaaaaaaaaaaaaaaaaaaaaaaaacaacacacacacaaaaaaacaaaaaaaaacaaaaaaaaaaaaaaaaaaaaaaacaacacaaccaacaaaaaaaaacagaacaaaaacagagagagggggggggcgacggacgacgagacaaaggcacagggacggacaggcggcagggaccagggagatgacaagaagagagggaggagagccacggggaagaaaaagagagcaaggaggcagggcggcacacagcgcgagggaggaggcgggaaaggcaggggagagcggcgaagcagggacgagagacagcacgagaggcggagcgagaacacgaacacagagagcccacaccgcaagacaaccaggaccagaaaccaccgcagcccggaaggacccaacaccacaccgccgccggagcgcaagcaacggaaaccaacaccagaaagagccggcggagagccaaacgcggagccgagacgacaacgaagaacataaccacgacggccgagcagcgcaccacagcgccgcagccgggggcaaggcggccgcgcccccgacgccgcgacgaggcgcagcgcccgcgcgggcgcgggcggggacgcggccgggcgggggacgagggcgcaccgggaccgggaagaaagggcggacgggagagggggcgagagaggcgcggggcgggcgacagcacgccaagcgcacggcggaccggcggggcgcggcagagacacgaccggaccgaggcaagaacggagacgacatcgacac

SEQ ID NO: 429587 - DNA, 1593 bp, Homo sapiens
ccaagcgccttctccgcaccagggaagccccacccaccagaagccaagatgtccagcaagcgggccaaagccaagaccaccaagaagcggccacagcgggccacatccaatgtcttcgcaatgtttgaccagtcccagatccaggagtttaaggaggctttcaacatgattgaccagaaccgtgatggcttcattgacaaggaggacctgcacgacatgctggcctcgctggggaagaaccccacagacgaatacctggagggcatgatgagcgaggccccggggcccatcaacttcaccatgttcctcaccatgtttggggagaagctgaacggcacggaccccgaggatgtgattcgcaacgcctttgcctgcttcgacgaggaagcctcaggtttcatccatgaggaccacctccgggagctgctcaccaccatgggtgaccgcttcacagatgaggaagtggacgagatgtaccgggaggcacccattgataagaaaggcaacttcaactacgtggagttcacccgcatcctcaaacatggcgccaaggataaagacgactaggccaccccagccccctgacaccccagcccccgccagtcacccctccccgcacacacccgtccataccagctccctgcccatgaccctcgctcagggatccccctttgaggggttagggtcccagttcccagtggaagaaacaggccaggagaagtgcgtgccgagctgaggcagatgttcccacagtgaccccagagccctgggctatagtctctgacccctccaaggaaagaccaccttctggggacatgggctggagggcaggacctagaggcaccaagggaaggccccattccggggctgttccccgaggaggaagggaaggggctctgtgtgccccccaggaggaagaggccctgagtcctgggatcagacaccccttcacgtgtatccccacacaaatgcaagctcaccaaggtcccctctcagtccccttccctacaccctgaccggccactgccgcacacccacccagagcacgccacccgccatgggagtgtgctcaggagtcgcgggcagcgtggacatctgtcccagagggggcagaatctccaatagaggactgagcactgcaaagaagagaaagatgggataaaccaaccctccgcgggtgctttatttccgtggtgcgggacaaaagcgtacagttgcacgggcggatgggcaaatggggtcctccgggatggccagacttttgctgtgcccacaggggggcgacaaatcagggcgggtggccaccggatatacggcacgcatactcattctccaacagtgcccgttgaccctggtcttaaggtgcccggcacgaagttccttgtcgccccatggggaccaccatgaccgtgagtacccagatgagtacacgacaaggggggaacaagctggacaggccacgaatcgtggtgcaggaatggctgagaggcacaaaggcagcgcaggatacgatgtggaccgcgctgaagctcctgtagggcatcccctggacccgcctgtgcacgccgtatcaatgggtctcaatttcagaca

SEQ ID NO: 429588 - DNA, 1424 bp, Homo sapiens
ccaagcgccttctccgcaccagggaagccccacccaccagaagccaagatgtccagcaagcgggccaaagccaagaccaccaagaagcggccacagcgggccacatccaatgtcttcgcaatgtttgaccagtcccagatccaggagtttaaggaggctttcaacatgattgaccagaaccgtgatggcttcattgacaaggaggacctgcacgacatgctggcctcgctggggaagaaccccacagacgaatacctggagggcatgatgagcgaggccccggggcccatcaacttcaccatgttcctcaccatgtttggggagaagctgaacggcacggaccccgaggatgtgattcgcaacgcctttgcctgcttcgacgaggaagcctcaggtttcatccatgaggaccacctccgggagctgctcaccaccatgggtgaccgcttcacagatgaggaagtggacgagatgtaccgggaggcacccattgataagaaaggcaacttcaactacgtggagttcacccgcatcctcaaacatggcgccaaggataaagacgactaggccaccccagccccctgacaccccagcccccgccagtcacccctccccgcacacacccgtccataccagctccctgcccatgaccctcgctcagggatccccctttgaggggttagggtcccagttcccagtggaagaaacaggccaggagaagtgcgtgccgagctgaggcagatgttcccacagtgaccccagagccctgggctatagtctctgacccctccaaggaaagaccaccttctggggacatgggctggagggcaggacctagaggcaccaagggaaggccccattccggggctgttccccgaggaggaagggaaggggctctgtgtgccccccaggaggaagaggccctgagtcctgggatcagacaccccttcacgtgtatccccacacaaatgcaagctcaccaaggtcccctctcagtccccttccctacaccctgaccggccactgccgcacacccacccagagcacgccacccgccatgggagtgtgctcaggagtcgcgggcagcgtggacatctgtcccagagggggcagaatctccaatagaggactgagcactgcgcttctggtctgtgtgtctgtggctggggtgaagtaaggggaccccgggcctgaaaccctctcccaccttctcctgccatctccagttactgccctgctcctcccaccctggcccagggaaggactgggtgtcctccggccatatggtccctgaagcctctagggaccagagtccctagtaagtgggctctgtgctcagctgagaccagcaggggacaggggacggagggaatgggcctcatggccttctcagggcttgtgggaaagggaggaccatgggaatc

SEQ ID NO: 429589 - DNA, 1083 bp, Homo sapiens
ccaagcgccttctccgcaccagggaagccccacccaccagaagccaagatgtccagcaagcgggccaaagccaagaccaccaagaagcggccacagcgggccacatccaatgtcttcgcaatgtttgaccagtcccagatccaggagtttaaggaggctttcaacatgattgaccagaaccgtgatggcttcattgacaaggaggacctgcacgacatgctggcctcgctggggaagaaccccacagacgaatacctggagggcatgatgagcgaggccccggggcccatcaacttcaccatgttcctcaccatgtttggggagaagctgaacggcacggaccccgaggatgtgattcgcaacgcctttgcctgcttcgacgaggaagcctcaggtttcatccatgaggaccacctccgggagctgctcaccaccatgggtgaccgcttcacagatgaggaagtggacgagatgtaccgggaggcacccattgataagaaaggcaacttcaactacgtggagttcacccgcatcctcaaacatggcgccaaggataaagacgactaggccaccccagccccctgacaccccagcccccgccagtcacccctccccgcacacacccgtccataccagctccctgcccatgaccctcgctcagggatccccctttgaggggttagggtcccagttcccagtggaagaaacaggccaggagaagtgcgtgccgagctgaggcagatgttcccacagtgaccccagagccctgggctatagtctctgacccctccaaggaaagaccaccttctggggacatgggctggagggcaggacctagaggcaccaagggaaggccccattccggggctgttccccgaggaggaagggaaggggctctgtgtgccccccaggaggaagaggccctgagtcctgggatcagacaccccttcacgtgtatccccacacaaatgcaagctcaccaaggtcccctctggggtcactgtgggaacatctgcctcagctcggcacgcgcttctcctggctgtccacctcctctgtctgtccctcctctggctgccccct

SEQ ID NO: 429590 - DNA, 1018 bp, Homo sapiens
cagacccgacggccggcccagttccacgcacccagcgagcccaagcgccttctccgcaccagggaagccccacccaccagaagccaagatgtccagcaagcgggccaaagccaagaccaccaagaagcggccacagcgggccacatccaatgtcttcgcaatgtttgaccagtcccagatccaggagtttaaggaggctttcaacatgattgaccagaaccgtgatggcttcattgacaaggaggacctgcacgacatgctggcctcgctgggtttcatccatgaggaccacctccgggagctgctcaccaccatgggtgaccgcttcacagatgaggaagtggacgagatgtaccgggaggcacccattgataagaaaggcaacttcaactacgtggagttcacccgcatcctcaaacatggcgccaaggataaagacgactaggccaccccagccccctgacaccccagcccccgccagtcacccctccccgcacacacccgtccataccagctccctgcccatgaccctcgctcagggatccccctttgaggggttagggtcccagttcccagtggaagaaacaggccaggagaagtgcgtgccgagctgaggcagatgttcccacagtgaccccagagccctgggctatagtctctgacccctccaaggaaagaccaccttctggggacatgggctggagggcaggacctagaggcaccaagggaaggccccattccggggctgttccccgaggaggaagggaaggggctctgtgtgccccccaggaggaagaggccctgagtcctgggatcagacaccccttcacgtgtatccccacacaaatgcaagctcaccaaggtcccctctcagtccccttccctacaccctgaccggccactgccgcacacccacccagagcacgccacccgccatgggagtgtgctcaggagtcgcgggcagcgtggacatctgtcccagagggggcagaatctccaatagaggactgagcactgc

SEQ ID NO: 429591 - DNA, 896 bp, Homo sapiens
caggtagttgcgtttcttctcaggtagttgcgtttcttctgtcataagataggctttatctccatcagtaggaggctttcaacatgattgaccagaaccgtgatggcttcattgacaaggaggacctgcacgacatgctggcctcgctgggtttcatccatgaggaccacctccgggagctgctcaccaccatgggtgaccgcttcacagatgaggaagtggacgagatgtaccgggaggcacccattgataagaaaggcaacttcaactacgtggagttcacccgcatcctcaaacatggcgccaaggataaagacgactaggccaccccagccccctgacaccccagcccccgccagtcacccctccccgcacacacccgtccataccagctccctgcccatgaccctcgctcagggatccccctttgaggggttagggtcccagttcccagtggaagaaacaggccaggagaagtgcgtgccgagctgaggcagatgttcccacagtgaccccagagccctgggctatagtctctgacccctccaaggaaagaccaccttctggggacatgggctggagggcaggacctagaggcaccaagggaaggccccattccggggctgttccccgaggaggaagggaaggggctctgtgtgccccccaggaggaagaggccctgagtcctgggatcagacaccccttcacgtgtatccccacacaaatgcaagctcaccaaggtcccctctcagtccccttccctacaccctgaccggccactgccgcacacccacccagagcacgccacccgccatgggagtgtgctcaggagtcgcgggcagcgtggacatctgtcccagagggggcagaatctccaatagaggactgagcactgc

SEQ ID NO: 429592 - DNA, 995 bp, Homo sapiens
ccaagcgccttctccgcaccagggaagccccacccaccagaagccaagatgtccagcaagcgggccaaagccaagaccaccaagaagcggccacagcgggccacatccaatgtcttcgcaatgtttgaccagtcccagatccaggagtttaaggaggctttcaacatgattgaccagaaccgtgatggcttcattgacaaggaggacctgcacgacatgctggcctcgctggggaagaaccccacagacgaatacctggagggcatgatgagcgaggccccggggcccatcaacttcaccatgttcctcaccatgtttggggagaagctgaacggcacggaccccgaggatgtgattcgcaacgcctttgcctgcttcgacgaggaagcctcaggtttcatccatgaggaccacctccgggagctgctcaccaccatgggtgaccgcttcacagatgaggaagtggacgagatgtaccgggaggcacccattgataagaaaggcaacttcaactacgtggagttcacccgcatcctcaaacatggcgccaaggataaagacgactaggccaccccagccccctgacaccccagcccccgccagtcacccctccccgcacacacccgtccataccagctccctgcccatgaccctcgctcagggatccccctttgaggggttagggtcccagttcccagtggaagaaacaggccaggagaagtgcgtgccgagctgaggcagatgttcccacagtgaccccagagccctgggctatagtctctgacccctccaaggaaagaccaccttctggggacatgggctggagggcaggacctagcgcgggtgccgctagaggcctgaagaagagcgtcccacaggacaggggttggaggcagcatgaaggcctggagaggagcgtcccacaggacaggggttggaggcagcatgaaggcctgtatcgggagcgcggcctctagcggcaccgggtaccgagc

SEQ ID NO: 429593 - DNA, 1442 bp, Homo sapiens
ccaagcgccttctccgcaccagggaagccccacccaccagaagccaagatgtccagcaagcgggccaaagccaagaccaccaagaagcggccacagcgggccacatccaatgtcttcgcaatgtttgaccagtcccagatccaggagtttaaggaggctttcaacatgattgaccagaaccgtgatggcttcattgacaaggaggacctgcacgacatgctggcctcgctggggaagaaccccacagacgaatacctggagggcatgatgagcgaggccccggggcccatcaacttcaccatgttcctcaccatgtttggggagaagctgaacggcacggaccccgaggatgtgattcgcaacgcctttgcctgcttcgacgaggaagcctcaggtttcatccatgaggaccacctccgggagctgctcaccaccatgggtgaccgcttcacagatgaggaagtggacgagatgtaccgggaggcacccattgataagaaaggcaacttcaactacgtggagttcacccgcatcctcaaacatggcgccaaggataaagacgactaggccaccccagccccctgacaccccagcccccgccagtcacccctccccgcacacacccgtccataccagctccaaggaaagaccaccttctggggacatgggctggagggcaggacctagaggcaccaagggaaggccccattccggggctgttccccgaggaggaagggaaggggctctgtgtgccccccaggaggaagaggccctgagtcctgggatcagacaccccttcacgtgtatccccacacaaatgcaagctcaccaaggtcccctctcagtccccttccctacaccctgaccggccactgccgcacacccacccagagcacgccacccgccatgggagtgtgctcaggagtcgcgggcagcgtggacatctgtcccagagggggcagaatctccaatagaggactgagcactgcaaagaagagaaagatgggataaaccaaccctccgcgggtgctttatttccgtggtgcgggacaaaagcgtacagttgcacgggcggatgggcaaatggggtcctccgggatggccagacttttgctgtgcccacaggggggcgacaaatcagggcgggtggccaccggatatacggcacgcatactcattctccaacagtgcccgttgaccctggtcttaaggtgcccggcacgaagttccttgtcgccccatggggaccaccatgaccgtgagtacccagatgagtacacgacaaggggggaacaagctggacaggccacgaatcgtggtgcaggaatggctgagaggcacaaaggcagcgcaggatacgatgtggaccgcgctgaagctcctgtagggcatcccctggacccgcctgtgcacgccgtatcaatgggtctcaatttcagaca

SEQ ID NO: 429594 - DNA, 712 bp, Homo sapiens
ccaagcgccttctccgcaccagggaagccccacccaccagaagccaagatgtccagcaagcgggccaaagccaagaccaccaagaagcggccacagcgggccacatccaatgtcttcgcaatgtttgaccagtcccagatccaggagtttaaggaggctttcaacatgattgaccagaaccgtgatggcttcattgacaaggaggacctgcacgacatgctggcctcgctggggaagaaccccacagacgaatacctggagggcatgatgagcgaggccccggggcccatcaacttcaccatgttcctcaccatgtttggggagaagctgaacggcacggaccccgaggatgtgattcgcaacgcctttgcctgcttcgacgaggaagcctcaggtttcatccatgaggaccacctccgggagctgctcaccaccatgggtgaccgcttcacagatgaggaagtggacgagatgtaccgggaggcacccattgataagaaaggcaacttcaactacgtggagttcacccgcatcctcaaacatggcgccaaggataaagacgactaggccaccccagccccctgacaccccgccactgccgcacacccacccagagcacgccacccgccatgggagtgtgctcaggagtcgcgggcagcgtggacatctgtcccagagggggcagaatctccaatagaggactgagcactgc

SEQ ID NO: 429595 - DNA, 771 bp, Homo sapiens
ccaagcgccttctccgcaccagggaagccccacccaccagaagccaagatgtccagcaagcgggccaaagccaagaccaccaagaagcggccacagcgggccacatccaatgtcttcgcaatgtttgaccagtcccagatccaggagtttaaggaggctttcaacatgattgaccagaaccgtgatggcttcattgacaaggaggacctgcacgacatgctggcctcgctggggaagaaccccacagacgaatacctggagggcatgatgagcgaggccccggggcccatcaacttcaccatgttcctcaccatgtttggggagaagctgaacggcacggaccccgaggatgtgattcgcaacgcctttgcctgcttcgacgaggaagcctcaggtttcatccatgaggaccacctccgggagctgctcaccaccatgggtgaccgcttcacagatgaggaagtggacgagatgtaccgggaggcacccattgataagaaaggcaacttcaactacgtggagttcacccgcatcctcaaacatggcgccaaggataaagacgactaggccaccccagccccctgacacccctcagagatgatagatgctagactactacaactggaaacccagggaaatcaaagttgctacaactatctgtataggatgaaagctctggatgacattcgtaacctctgagatcccatgagcattctgaaggccggcatccccgattccttaatgggcaagaatttccgctcctacctgctg

SEQ ID NO: 429596 - DNA, 970 bp, Homo sapiens
cagacccgacggccggcccagttccacgcacccagcgagcccaagcgccttctccgcaccagggaagccccacccaccagaagccaagatgtccagcaagcgggccaaagccaagaccaccaagaagcggccacagcgggccacatccaatgtcttcgcaatgtttgaccagtcccagatccaggagtttaaggaggctttcaacatgattgaccagaaccgtgatggcttcattgacaaggaggacctgcacgacatgctggcctcgctgggtttcatccatgaggaccacctccgggagctgctcaccaccatgggtgaccgcttcacagatgaggaagtggacgagatgtaccgggaggcacccattgataagaaaggcaacttcaactacgtggagttcacccgcatcctcaaacatggcgccaaggataaagacgactaggccaccccagccccctgacacccccctgcccatgaccctcgctcagggatccccctttgaggggttagggtcccagttcccagtggaagaaacaggccaggagaagtgcgtgccgagctgaggcagatgttcccacagtgaccccagagccctgggctatagtctctgacccctccaaggaaagaccaccttctggggacatgggctggagggcaggacctagaggcaccaagggaaggccccattccggggctgttccccgaggaggaagggaaggggctctgtgtgccccccaggaggaagaggccctgagtcctgggatcagacaccccttcacgtgtatccccacacaaatgcaagctcaccaaggtcccctctcagtccccttccctacaccctgaccggccactgccgcacacccacccagagcacgccacccgccatgggagtgtgctcaggagtcgcgggcagcgtggacatctgtcccagagggggcagaatctccaatagaggactgagcactgc

SEQ ID NO: 429597 - DNA, 614 bp, Homo sapiens
gaggtggacaggcgggggtttgactgcccagagcctcctagaacctcaggcgggcagcagagggatggagtgggagagtgaggaacggcaggaatgcaggaatgctgatccagctccttcctgcagggccagggagcctggatggcagcccaggagagccctcactgactcccacgagtggacccaccttgtcacttggaaagagagagggacagtgtaaatgctattaaggattaaaggagataaagcatggtaatggttggcaccaagcccaatcctaagtgttttacccaaacagtcacagccaaaatagctgattccatgcccggcactgttccaggagctctcgggcactgagtcagttaatccctactgctgggcactcctcatgtctccagtcccagatgaagactctcgggctcagagaggtagaggaagttgttcagaatcacacagccacacttgtctgcttttgtgaagaactgggtggtgggagccccaaatccgtgggcagccttgaatgccaggccgaagtgctaaaagccagtctgggggaggcaggaagattccctggcccagagtcacagggccacccaacccccaccccttcctgc

SEQ ID NO: 429598 - DNA, 619 bp, Homo sapiens
tacactttagtgagcactgccggctgctgacatccaggccacaggaggaaactggtgggagcagccagggactccgggcgcccactgctgtggctgcgctagagccatgctttccagttcacaaaacccactacctcccgtctcacacggagcggtgaagggcaggggtgggggacgggggtgcaagttgtcccagctggggacagagggcccaggaccacaggctggaacaccccacctgccacagggaagaaccccacagacgaatacctggagggcatgatgagcgaggccccggggcccatcaacttcaccatgttcctcaccatgtttggggagaagctgaacggcacggaccccgaggatgtgattcgcaacgcctttgcctgcttcgacgaggaagcctcaggtccgtggcgccccctaccaccactctgcatgcaagtggaacagggcccaggcattcagtgcctctgcccctaagggccagaacagacatcacccatctcccaggttctgtcaccagaactataaaagccaggccacctccttattgtcgccgcaaaggctaggccagaacagcccatgccccaagactcctgccttcgtgatctccccc

SEQ ID NO: 429599 - DNA, 603 bp, Homo sapiens
tgtgagccatccttgcgccttctccgcaccagggaagccccacccaccagaagccaagatgtccagcaagcgggccaaagccaagaccaccaagaagcggccacagcgggccacatccaatgtcttcgcaatgtttgaccagtcccagatccaggagtttaaggaggctttcaacatgattgaccagaaccgtgatggcttcattgacaaggaggacctgcacgacatgctggcctcgctgggtgagctgggacagggacaggggtgagatggatgaggccaggcaggctctgccaatcatttacagggcacctcctgtgtagtgagacgcgtggtgtccaccttagagaatagttgccattaacttagtccattcaacagggaaactgggccgggcgcggtggctcacgcctgtaatcccagcactttgggaggccaaggcgggcggatcaataggtcaggagatcgagaccatcctggctaacacggtgaaaccctgactctgctaaaaataccaaaaattagccgagcgtggtggcgggcgcctgtagtcccagctacttgggaggctgaggcaggagaatggcgtgaacccggaaagcg

SEQ ID NO: 429600 - DNA, 1268 bp, Homo sapiens
cagacccgacggccggcccagttccacgcacccagcgagcccaagcgccttctccgcaccaggagctctcgggcactgagtcagttaatccctactgctgggcactcctcatgtctccagtcccagatgaagactctcgggctcagagagggaagccccacccaccagaagccaagatgtccagcaagcgggccaaagccaagaccaccaagaagcggccacagcgggccacatccaatgtcttcgcaatgtttgaccagtcccagatccaggagtttaaggaggctttcaacatgattgaccagaaccgtgatggcttcattgacaaggaggacctgcacgacatgctggcctcgctggggaagaaccccacagacgaatacctggagggcatgatgagcgaggccccggggcccatcaacttcaccatgttcctcaccatgtttggggagaagctgaacggcacggaccccgaggatgtgattcgcaacgcctttgcctgcttcgacgaggaagcctcaggtttcatccatgaggaccacctccgggagctgctcaccaccatgggtgaccgcttcacagatgaggaagtggacgagatgtaccgggaggcacccattgataagaaaggcaacttcaactacgtggagttcacccgcatcctcaaacatggcgccaaggataaagacgactaggccaccccagccccctgacaccccagcccccgccagtcacccctccccgcacacacccgtccataccagctccctgcccatgaccctcgctcagggatccccctttgaggggttagggtcccagttcccagtggaagaaacaggccaggagaagtgcgtgccgagctgaggcagatgttcccacagtgaccccagagccctgggctatagtctctgacccctccaaggaaagaccaccttctggggacatgggctggagggcaggacctagaggcaccaagggaaggccccattccggggctgttccccgaggaggaagggaaggggctctgtgtgccccccaggaggaagaggccctgagtcctgggatcagacaccccttcacgtgtatccccacacaaatgcaagctcaccaaggtcccctctcagtccccttccctacaccctgaccggccactgccgcacacccacccagagcacgccacccgccatgggagtgtgctcaggagtcgcgggcagcgtggacatctgtcccagagggggcagaatctccaatagaggactgagcactgc

SEQ ID NO: 429601 - DNA, 1752 bp, Homo sapiens
ccaagcgccttctccgcaccagggaagccccacccaccagaagccaagatgtccagcaagcgggccaaagccaagaccaccaagaagcggccacagcgggccacatccaatgtcttcgcaatgtttgaccagtcccagatccaggagtttaaggaggctttcaacatgattgaccagaaccgtgatggcttcattgacaaggaggacctgcacgacatgctggcctcgctggggaagaaccccacagacgaatacctggagggcatgatgagcgaggccccggggcccatcaacttcaccatgttcctcaccatgtttggggagaagctgaacggcacggaccccgaggatgtgattcgcaacgcctttgcctgcttcgacgaggaagcctcaggtttcatccatgaggaccacctccgggagctgctcaccaccatgggtgaccgcttcacagatgaggaagtggacgagatgtaccgggaggcacccattgataagaaaggcaacttcaactacgtggagttcacccgcatcctcaaacatggcgccaaggataaagacgactaggccaccccagccccctgacaccccagcccccgccagtcacccctccccgcacacacccgtccataccagctccctgcccatgaccctcgctcagggatccccctttgaggggttagggtcccagttcccagtggaagaaacaggccaggagaagtgcgtgccgagctgaggcagatgttcccacagtgaccccagagccctgggctatagtctctgacccctccaaggaaagaccaccttctggggacatgggctggagggcaggacctagaggcaccaagggaaggccccattccggggctgttccccgaggaggaagggaaggggctctgtgtgccccccaggaggaagaggccctgagtcctgggatcagacaccccttcacgtgtatccccacacaaatgcaagctcaccaaggtcccctctcagtccccttccctacaccctgaccggccactgccgcacacccacccagagcacgccacccgccatgggagtgtgctcaggagtcgcgggcagcgtggacatctgtcccagagggggcagaatctccaatagaggactgagcactgcaaaaaaaaaaaaaaaaaaaaaaaaaaaaaaaaaaaaaaaaaaaaaaaaacaagaggggggggccacgcactaatgaagatatctccccgccgaggaggggcgccacgagcttcatacgcggatcagccaagcttctgctgggagaacaagcggggcgcccactataataggaggaggtcctaattataatcgaacgatagagcgacgtgggcgcgcgcgaggtataatcacaaacgggttgagacacgggggcgaaaacaaggcgtgcgcccacgctgaggggccacccacttggggggtgaacgagagacaacactctatgaactccgagtgggggggcgcgagcaccaaatagcggtggggcaccccaaaatgactacctctcttgagacgaagagatattttaacagcgcctcttcatctgagggggaatacaatctatatacaccaattttctagacacaggatgggattattatctgcgtgtgggtcaatacaccaccagttgcgctggcgataattatgggtgctgggtggcctgaccttatgaaacatgatttgggctctactgccggggacattgcgtgtctttgttgtccaaacacattttct

SEQ ID NO: 429602 - DNA, 1281 bp, Homo sapiens
ccaagcgccttctccgcaccagggaagccccacccaccagaagccaagatgtccagcaagcgggccaaagccaagaccaccaagaagcggccacagcgggccacatccaatgtcttcgcaatgtttgaccagtcccagatccaggagtttaaggaggctttcaacatgattgaccagaaccgtgatggcttcattgacaaggaggacctgcacgacatgctggcctcgctggggaagaaccccacagacgaatacctggagggcatgatgagcgaggccccggggcccatcaacttcaccatgttcctcaccatgtttggggagaagctgaacggcacggaccccgaggatgtgattcgcaacgcctttgcctgcttcgacgaggaagcctcaggtttcatccatgaggaccacctccgggagctgctcaccaccatgggtgaccgcttcacagatgaggaagtggacgagatgtaccgggaggcacccattgataagaaaggcaacttcaactacgtggagttcacccgcatcctcaaacatggcgccaaggataaagacgactaggccaccccagccccctgacaccccagcccccgccagtcacccctccccgcacacacccgtccataccagctccctgcccatgaccctcgctcagggatccccctttgaggggttagggtcccagttcccagtggaagaaacaggccaggagaagtgcgtgccgagctgaggcagatgttcccacagtgaccccagagccctgggctatagtctctgacccctccaaggaaagaccaccttctggggacatgggctggagggcaggacctagaggcaccaagggaaggccccattccggggctgttccccgaggaggaagggaaggggctctgtgtgccccccaggaggaagaggccctgagtcctgggatcagacaccccttcacgtgtatccccacacaaatgcaagctcaccaaggtcccctctcagtccccttccctacaccctgaccggccactgccgcacacccacccagagcacgccacccgccatgggagtgtgctcaggagtcgcgggcagcgtggacatctgtcccagagggggcagaatctccaatagaggactgagcactgccactaaaaataaacatacgccaaaaatcatttaacatatctatatattttgggggtaaattttacccttttttccacaacagtttttttagtactattccgagaaagccctctactttactaagaactaaccccctatctt

SEQ ID NO: 429603 - DNA, 1123 bp, Homo sapiens
cagacccgacggccggcccagttccacgcacccagcgagcccaagcgccttctccgcaccagggaagccccacccaccagaagccaagatgtccagcaagcgggccaaagccaagaccaccaagaagcggccacagcgggccacatccaatgtcttcgcaatgtttgaccagtcccagatccaggagtttaaggaggctttcaacatgattgaccagaaccgtgatggcttcattgacaaggaggacatgatgagcgaggccccggggcccatcaacttcaccatgttcctcaccatgtttggggagaagctgaacggcacggaccccgaggatgtgattcgcaacgcctttgcctgcttcgacgaggaagcctcaggtttcatccatgaggaccacctccgggagctgctcaccaccatgggtgaccgcttcacagatgaggaagtggacgagatgtaccgggaggcacccattgataagaaaggcaacttcaactacgtggagttcacccgcatcctcaaacatggcgccaaggataaagacgactaggccaccccagccccctgacaccccagcccccgccagtcacccctccccgcacacacccgtccataccagctccctgcccatgaccctcgctcagggatccccctttgaggggttagggtcccagttcccagtggaagaaacaggccaggagaagtgcgtgccgagctgaggcagatgttcccacagtgaccccagagccctgggctatagtctctgacccctccaaggaaagaccaccttctggggacatgggctggagggcaggacctagaggcaccaagggaaggccccattccggggctgttccccgaggaggaagggaaggggctctgtgtgccccccaggaggaagaggccctgagtcctgggatcagacaccccttcacgtgtatccccacacaaatgcaagctcaccaaggtcccctctcagtccccttccctacaccctgaccggccactgccgcacacccacccagagcacgccacccgccatgggagtgtgctcaggagtcgcgggcagcgtggacatctgtcccagagggggcagaatctccaatagaggactgagcactgc

SEQ ID NO: 429604 - DNA, 1374 bp, Homo sapiens
ccaagcgccttctccgcaccagggaagccccacccaccagaagccaagatgtccagcaagcgggccaaagccaagaccaccaagaagcggccacagcgggccacatccaatgtcttcgcaatgtttgaccagtcccagatccaggagtttaaggaggctttcaacatgattgaccagaaccgtgatggcttcattgacaaggaggacctgcacgacatgctggcctcgctggggaagaaccccacagacgaatacctggagggcatgatgagcgaggccccggggcccatcaacttcaccatgttcctcaccatgtttggggagaagctgaacggcacggaccccgaggatgtgattcgcaacgcctttgcctgcttcgacgaggaagcctcaggtttcatccatgaggaccacctccgggagctgctcaccaccatgggtgaccgcttcacagatgaggaagtggacgagatgtaccgggaggcacccattgataagaaaggcaacttcaactacgtggagttcacccgcatcctcaaacatggcgccaaggataaagacgactaggccaccccagccccctgacaccccagcccccgccagtcacccctccccgcacacacccgtccataccagctccctgcccatgaccctcgctcagggatccccctttgaggggttagggtcccagttcccagtggaagaaacaggccaggagaagtgcgtgccgagctgaggcagatgttcccacagtgaccccagagccctgggctatagtctctgacccctccaaggaaagaccaccttctggggacatgggctggagggcaggacctagaggcaccaagggaaggccccattccggggctgttccccgaggaggaagggaaggggctctgtgtgccccccaggaggaagaggccctgagtcctgggatcagacacagtccccttccctacaccctgaccggccactgccgcacacccacccagagcacgccacccgccatgggagtgtgctcaggagtcgcgggcagcgtggacatctgtcccagagggggcagaatctccaatagaggactgagcactgcgcttctggtctgtgtgtctgtggctggggtgaagtaaggggaccccgggcctgaaaccctctcccaccttctcctgccatctccagttactgccctgctcctcccaccctggcccagggaaggactgggtgtcctccggccatatggtccctgaagcctctagggaccagagtccctagtaagtgggctctgtgctcagctgagaccagcaggggacaggggacggagggaatgggcctcatggccttctcagggcttgtgggaaagggaggaccatgggaatc

SEQ ID NO: 429605 - DNA, 1847 bp, Homo sapiens
ccaagcgccttctccgcaccagggaagccccacccaccagaagccaagatgtccagcaagcgggccaaagccaagaccaccaagaagcggccacagcgggccacatccaatgtcttcgcaatgtttgaccagtcccagatccaggagtttaaggaggctttcaacatgattgaccagaaccgtgatggcttcattgacaaggaggacctgcacgacatgctggcctcgctggggaagaaccccacagacgaatacctggagggcatgatgagcgaggccccggggcccatcaacttcaccatgttcctcaccatgtttggggagaagctgaacggcacggaccccgaggatgtgattcgcaacgcctttgcctgcttcgacgaggaagcctcaggtttcatccatgaggaccacctccgggagctgctcaccaccatgggtgaccgcttcacagatgaggaagtggacgagatgtaccgggaggcacccattgataagaaaggcaacttcaactacgtggagttcacccgcatcctcaaacatggcgccaaggataaagacgactaggccaccccagccccctgacaccccagcccccgccagtcacccctccccgcacacacccgtccataccagctccctgcccatgaccctcgctcagggatccccctttgaggggttagggtcccagttcccagtggaagaaacaggccaggagaagtgcgtgccgagctgaggcagatgttcccacagtgaggcaccaagggaaggccccattccggggctgttccccgaggaggaagggaaggggctctgtgtgccccccaggaggaagaggccctgagtcctgggatcagacaccccttcacgtgtatccccacacaaatgcaagctcaccaaggtcccctctcagtccccttccctacaccctgaccggccactgccgcacacccacccagagcacgccacccgccatgggagtgtgctcaggagtcgcgggcagcgtggacatctgtcccagagggggcagaatctccaatagaggactgagcactgcaaaaaaaaaaaaaaaaaaaaaaaaaaaaaaaaaaaaaaaaaaaaaaaaacaacacacacacaaaaaaacaaaaaaaaacaaaaaaaaaaaaaaaaaaaaaaacaacacaaccaacaaaaaaaaacagaacaaaaacagagagagggggggggcgacggacgacgagacaaaggcacagggacggacaggcggcagggaccagggagatgacaagaagagagggaggagagccacggggaagaaaaagagagcaaggaggcagggcggcacacagcgcgagggaggaggcgggaaaggcaggggagagcggcgaagcagggacgagagacagcacgagaggcggagcgagaacacgaacacagagagcccacaccgcaagacaaccaggaccagaaaccaccgcagcccggaaggacccaacaccacaccgccgccggagcgcaagcaacggaaaccaacaccagaaagagccggcggagagccaaacgcggagccgagacgacaacgaagaacataaccacgacggccgagcagcgcaccacagcgccgcagccgggggcaaggcggccgcgcccccgacgccgcgacgaggcgcagcgcccgcgcgggcgcgggcggggacgcggccgggcgggggacgagggcgcaccgggaccgggaagaaagggcggacgggagagggggcgagagaggcgcggggcgggcgacagcacgccaagcgcacggcggaccggcggggcgcggcagagacacgaccggaccgaggcaagaacggagacgacatcgacac

SEQ ID NO: 429606 - DNA, 968 bp, Homo sapiens
ccaagcgccttctccgcaccagggaagccccacccaccagaagccaagatgtccagcaagcgggccaaagccaagaccaccaagaagcggccacagcgggccacatccaatgtcttcgcaatgtttgaccagtcccagatccaggagtttaaggaggctttcaacatgattgaccagaaccgtgatggcttcattgacaaggaggacctgcacgacatgctggcctcgctggggaagaaccccacagacgaatacctggagggcatgatgagcgaggccccggggcccatcaacttcaccatgttcctcaccatgtttggggagaagctgaacggcacggaccccgaggatgtgattcgcaacgcctttgcctgcttcgacgaggaagcctcaggtttcatccatgaggaccacctccgggagctgctcaccaccatgggtgaccgcttcacagatgaggaagtggacgagatgtaccgggaggcacccattgataagaaaggcaacttcaactacgtggagttcacccgcatcctcaaacatggcgccaaggataaagacgactaggccaccccagccccctgacacccccctgcccatgaccctcgctcagggatccccctttgaggggttagggtcccagttcccagtggaagaaacaggccaggagaagtgcgtgccgagctgaggcagatgttcccacagtgaccccagagccctgggctatagtctctgacccctcgaagaggccctgagtcctgggatcagacaccccttcacgtgtatccccacacaaatgcaagctcaccaaggtcccctctcagtccccttccctacaccctgaccggccactgccgcacacccacccagagcacgccacccgccatgggagtgtgctcaggagtcgcgggcagcgtggacatctgtcccagagggggcagaatctccaatagaggactgagcactgc

SEQ ID NO: 429607 - DNA, 1064 bp, Homo sapiens
cagacccgacggccggcccagttccacgcacccagcgagcccaagcgccttctccgcaccagggaagccccacccaccagaagccaagatgtccagcaagcgggccaaagccaagaccaccaagaagcggccacagcgggccacatccaatgtcttcgcaatgtttgaccagtcccagatccaggagtttaaggaggctttcaacatgattgaccagaaccgtgatggcttcattgacaaggaggacctgcacgacatgctggcctcgctggggaagaaccccacagacgaatacctggagggcatgatgagcgaggccccggggcccatcaacttcaccatgttcctcaccatgtttggggagaagctgaacggcacggaccccgaggatgtgattcgcaacgcctttgcctgcttcgacgaggaagcctcaggtttcatccatgaggaccacctccgggagctgctcaccaccatgggtgaccgcttcacagatgaggaagtggacgagatgtaccgggaggcacccattgataagaaaggcaacttcaactacgtggagttcacccgcatcctcaaacatggcgccaaggataaagacgactaggccaccccagccccctgacaccccagcccccgccagtcacccctccccgcacacacccgtccataccagctcaccccagagccctgggctatagtctctgacccctccaaggaaagaccaccttctggggacatgggctggagggcaggacctagaggcaccaagggaaggccccattccggggctgttccccgaggaggaagggaaggggctctgtgtgccccccaggaggaagaggccctgagtcctgggatcagacaccccttcacgtgtatccccacacaaatgcaagctcaccaaggtcccctctcagtccccttccctacaccctgaccggccactgccgcacacccacccagagcacgccacccgccatgggagtgtgctcaggagtcgcgggcagcgtggacatctgtcccagagggggcagaatctccaatagaggactgagcactgc

SEQ ID NO: 429608 - DNA, 1372 bp, Homo sapiens
ccaagcgccttctccgcaccagggaagccccacccaccagaagccaagatgtccagcaagcgggccaaagccaagaccaccaagaagcggccacagcgggccacatccaatgtcttcgcaatgtttgaccagtcccagatccaggagtttaaggaggctttcaacatgattgaccagaaccgtgatggcttcattgacaaggaggacctgcacgacatgctggcctcgctggcaaggaaagaccaccttctggggacatgggctggagggcaggacctagaggcaccaagggaaggccccattccggggctgttccccgaggaggaagggaaggggctctgtgtgccccccaggaggaagaggccctgagtcctgggatcagacaccccttcacgtgtatccccacacaaatgcaagctcaccaaggtcccctctcagtccccttccctacaccctgaccggccactgccgcacacccacccagagcacgccacccgccatgggagtgtgctcaggagtcgcgggcagcgtggacatctgtcccagagggggcagaatctccaatagaggactgagcactgcaaaaaaaaaaaaaaaaaaaaaaaaaaaaaaaaaaaaaaaaaaaaaaaaacaacacacacacaaaaaaacaaaaaaaaacaaaaaaaaaaaaaaaaaaaaaaacaacacaaccaacaaaaaaaaacagaacaaaaacagagagagggggggggcgacggacgacgagacaaaggcacagggacggacaggcggcagggaccagggagatgacaagaagagagggaggagagccacggggaagaaaaagagagcaaggaggcagggcggcacacagcgcgagggaggaggcgggaaaggcaggggagagcggcgaagcagggacgagagacagcacgagaggcggagcgagaacacgaacacagagagcccacaccgcaagacaaccaggaccagaaaccaccgcagcccggaaggacccaacaccacaccgccgccggagcgcaagcaacggaaaccaacaccagaaagagccggcggagagccaaacgcggagccgagacgacaacgaagaacataaccacgacggccgagcagcgcaccacagcgccgcagccgggggcaaggcggccgcgcccccgacgccgcgacgaggcgcagcgcccgcgcgggcgcgggcggggacgcggccgggcgggggacgagggcgcaccgggaccgggaagaaagggcggacgggagagggggcgagagaggcgcggggcgggcgacagcacgccaagcgcacggcggaccggcggggcgcggcagagacacgaccggaccgaggcaagaacggagacgacatcgacac

SEQ ID NO: 429609 - DNA, 950 bp, Homo sapiens
  misc_feature (97)..(97): n is a, c, g, or t
  misc_feature (161)..(161): n is a, c, g, or t
aaccccccctccccggaggcttttatagacgaaaagaattcccccccccctctcaaaggaggccaagcccctattcctgcaaagcggcggggtcacnaagtgtaggtatccttttcatgagatctgtgaggaggctggggccggtccaaaaaaagggtggncagcagaatctgttttccaatttgagaggaggtgttttaagcaaacgaagacaataggtgggcccatgtcatgtgcgccgttgcggtcccagaagttcgattcactaatgtcccagaaaggacacaaatagatgtaggcagaatacctttacagaggttaaaattgaaatgcatcttctgcagacaccgggttaagagggtctctggagcctgcatccagtgttcctacggtcgctgcccggcctccttccatgtcacttgtgcccatgctgctggggtactgatggagcctgatgattggccttatgtggtgaacattacatgctttcgacataaggtcaaccccaacgtgttcacagcacagagtaagcactcaaaaaatgaaagttgtattgctactactacttctgctgctgctgctggtgctacaatcttatgtgaactgggccacaagtccaaggcttgcgagaaggtcatttccgtgggtcaaacggtcatcacgaagcatcggaacacccggtattacagttgcagagtgatggctgtgacatcgcagaccttctatgaggtcatgtttgatgatggctcctttagcagagacacatttcctgaggatatcgtgagccgagactgtctgaagctgggcccacctgctgagggagaagtcgtccaagtcaagtggcccgatggcaaactctatggagcaaaatattttggatcaaatattgcccacatgtaccaggttgagtttgaagatggatcccagatagcaataaatacggatcggcc

SEQ ID NO: 429610 - DNA, 4250 bp, Homo sapiens
  misc_feature (3415)..(3415): n is a, c, g, or t
gggtcctgtgcgcgtgcgcagcgaacagctgtcacctagtgcggaacaagtctcccaaatttcccaaatctccctgggccggaggccactgtcttctcttcctcctccaccgagtcgtgctctcgccccaacccgcgcgccagacactgccctaaccatcatggaggtggccgaggtggaaagtcctctgaaccccagctgtaagataatgaccttcagaccctccatggaggagttccgggagttcaacaaataccttgcatacatggagtctaaaggagcccatcgtgcgggtcttgcaaaggtgattcctcctaaggagtggaagccaagacagtgctatgatgacattgataatttgctcattccagcaccaattcagcagatggtcacagggcagtcaggactgttcactcagtacaacatccagaaaaaagcgatgactgtgaaggagttcaggcagctggccaacagtggcaaatattgtactccaagatacttggattacgaagatttggagcgcaagtactggaagaacttaacttttgtggcacctatctatggtgcagatattaatgggagcatatatgatgagggtgtggatgaatggaacatagctcgcctcaatacagtcttggatgtggttgaagaagagtgtggcatttctattgagggtgtaaataccccatatctctattttggcatgtggaagaccacgtttgcatggcacaccgaagacatggacctctatagcattaattatctccactttggagagcccaagtcttggtatgctatacctccggagcatggaaaacgacttgaaagactagctcaaggttttttcccaagcagctcccaagggtgtgatgcatttcttcgccacaagatgacattgatttctccatcagtattgaagaaatatggtattccctttgacaagataacccaggaggctggagaattcatgatcactttcccatatggctaccatgctggttttaatcatggtttcaactgtgcagaatctacaaattttgctactgtcagatggattgactatggaaaagttgccaaattgtgcacttgcaggaaagacatggtgaagatttcaatggatatctttgtgaggaaatttcagccagacagatatcagctttggaaacaaggaaaggatatatacaccattgatcacacgaagcctactccagcatccacccctgaagtaaaagcatggctgcagaggaggaggaaagtaagaaaagcatcccgaagcttccagtgtgctaggtctacctctaaaaggcctaaggctgatgaggaagaggaagtgtcagatgaagtcgatggggcagaggtccctaaccccgactcagtcacagatgacctcaaggtcagtgaaaagtcagaagcagcagtgaagctgaggaacacagaagcatcttcagaagaagagtcatctgctagcaggatgcaggtggagcagaatttatcagatcatatcaaactctcaggaaacagctgcttaagtacatctgtaacagaagacataaaaactgaggatgacaaagcttatgcatatagaagtgtaccttctatatccagtgaggctgatgattccattccattgtctagtggctatgagaagcccgagaaatcagacccatccgagctttcatggccaaagtcacctgagtcatgctcatcagtggcagagagtaatggtgtgttaacagagggagaagagagtgatgtggagagccatgggaatggccttgaacctggggaaatcccagcggtccccagtggagagagaaatagcttcaaagtccccagtatagcagagggagagaacaaaacctctaagagttggcgccatccacttagcaggcctccagcaagatctccgatgactcttgtgaagcagcaggcgccaagtgatgaagaattgcctgaggttctgtccattgaggaggaagtggaagaaacagagtcttgggcgaaacctctcatccacctttggcagacgaagtcccctaacttcgcagctgagcaagagtataatgcaacagtggccaggatgaagccacactgtgccatctgcactctgctcatgccgtaccacaagccagatagcagcaatgaagaaaatgatgctagatgggagacaaaattagatgaagtcgttacatcggagggaaagactaagcccctcataccagagatgtgttttatttatagtgaagaaaatatagaatattctccacccaatgccttccttgaagaggatggaacaagtctccttatttcctgtgcaaagtgctgcgtacgggttcatgcaagttgttatggtattccttctcatgagatctgtgatggatggctgtgtgcccggtgcaaaagaaatgcgtggacagcagaatgctgtctctgcaatttgagaggaggtgctcttaagcaaacgaagaacaataggtgggcccatgtcatgtgcgccgttgcggtcccagaagttcgattcactaatgtcccagaaaggacacaaatagatgtaggcagaatacctttacagaggttaaaattgaaatgcatcttctgcagacaccgggttaagagggtctctggagcctgcatccagtgttcctacggtcgctgcccggcctccttccatgtcacttgtgcccatgctgctggggtactgatggagcctgatgattggccttatgtggtgaacattacatgctttcgacataaggtcaaccccaacgtgaagtccaaggcttgcgagaaggtcatttccgtgggtcaaacggtcatcacgaagcatcggaacacccggtattacagttgcagagtgatggctgtgacatcgcagaccttctatgaggtcatgtttgatgatggctcctttagcagagacacatttcctgaggatatcgtgagccgagactgtctgaagctgggcccacctgctgagggagaagtcgtccaagtcaagtggcccgatggcaaactctatggagcaaaatattttggatcaaatattgcccacatgtaccaggttgagtttgaagatggatcccagatagcaatgaagagagaggacatctacactttagatgaagagttacccaagagagtgaaagctcgattttccacagcctctgacatgcgatttgaagacacgttttatggagcagacattatccaaggggagagaaagagacaaagagtgctgagctccaggtttaagaatgaatatgtggccgaccctgtataccgcacttttttgaagagctctttccagaagaagtgccagaagagacagtagtctgcatacatcgctgcaggccacagagcagcttgggttggaagagagaagatgaagggacatccttggggctgtgccgtgagntttgctggcataggtgacagggtgtgtctctgacagtggtaaatcgggtttccagagtttggtcaccaaaaatacaaaatacacccaatgaattggacgcagcaatctgaaatcatctctagtcttgctttcacttgtgagcagttgtcttctatgatcccaaagaagttttctaagtgaaaggaaatactagtgaatcacccacaaggaaaagccactgccacagaggaggcgggtccccttgtgcggcttagggccctgtcaggaaacacacggggacctctctctctagctccagcaggtggcacctcggtacccagcgggtagggcgataatttatatattttccacagtcagggaaggactctcacttatttgtttcaaattgcagtttttataaaacatttttaaaacacaaatggcatgtatgctaatgagatttacccgtgtgctatctgtatttcccttgtacagaacttttacatttttgaatattcctattacttttgattgtgtctgatgggaactgagttgttggcctttgtgaaatgaaatttttggctcttgagaaagaattcttatgaattgttatgcgaattttatatatttaaagagggagatctggggctgttatttttaaacactttttttcataatacatattccgagtagatatttataaaatatatgtttctttcattatgtgtttgtaaaattagagtttaaataaatatgctttgatgcatagttttgaactaatgtaacatgatttttcttttttaaaacagcctgaaaatgtactagtgtttaaaaataaagatttccattttctcca

SEQ ID NO: 429611 - DNA, 4185 bp, Homo sapiens
gggtcctgtgcgcgtgcgcagcgaacagctgtcacctagtgcggaacaagtctcccaaatttcccaaatctccctgggccggaggccactgtcttctcttcctcctccaccgagtcgtgctctcgccccaacccgcgcgccagacactgccctaaccatcatggaggtggccgaggtggaaagtcctctgaaccccagctgtaagataatgaccttcagaccctccatggaggagttccgggagttcaacaaataccttgcatacatggagtctaaaggagcccatcgtgcgggtcttgcaaaggtgattcctcctaaggagtggaagccaagacagtgctatgatgacattgataatttgctcattccagcaccaattcagcagatggtcacagggcagtcaggactgttcactcagtacaacatccagaaaaaagcgatgactgtgaaggagttcaggcagctggccaacagtggcaaatattgtactccaagatacttggattacgaagatttggagcgcaagtactggaagaacttaacttttgtggcacctatctatggtgcagatattaatgggagcatatatgatgagggtgtggatgaatggaacatagctcgcctcaatacagtcttggatgtggttgaagaagagtgtggcatttctattgagggtgtaaataccccatatctctattttggcatgtggaagaccacgtttgcatggcacaccgaagacatggacctctatagcattaattatctccactttggagagcccaagtcttggtatgctatacctccggagcatggaaaacgacttgaaagactagctcaaggttttttcccaagcagctcccaagggtgtgatgcatttcttcgccacaagatgacattgatttctccatcagtattgaagaaatatggtattccctttgacaagataacccaggaggctggagaattcatgatcactttcccatatggctaccatgctggttttaatcatggtttcaactgtgcagaatctacaaattttgctactgtcagatggattgactatggaaaagttgccaaattgtgcacttgcaggaaagacatggtgaagatttcaatggatatctttgtgaggaaatttcagccagacagatatcagctttggaaacaaggaaaggatatatacaccattgatcacacgaagcctactccagcatccacccctgaagtaaaagcatggctgcagaggaggaggaaagtaagaaaagcatcccgaagcttccagtgtgctaggtctacctctaaaaggcctaaggctgatgaggaagaggaagtgtcagatgaagtcgatggggcagaggtccctaaccccgactcagtcacagatgacctcaaggtcagtgaaaagtcagaagcagcagtgaagctgaggaacacagaagcatcttcagaagaagagtcatctgctagcaggatgcaggtggagcagaatttatcagatcatatcaaactctcaggaaacagctgcttaagtacatctgtaacagaagacataaaaactgaggatgacaaagcttatgcatatagaagtgtaccttctatatccagtgaggctgatgattccattccattgtctagtggctatgagaagcccgagaaatcagacccatccgagctttcatggccaaagtcacctgagtcatgctcatcagtggcagagagtaatggtgtgttaacagagggagaagagagtgatgtggagagccatgggaatggccttgaacctggggaaatcccagcggtccccagtggagagagaaatagcttcaaagtccccagtatagcagagggagagaacaaaacctctaagagttggcgccatccacttagcaggcctccagcaagatctccgatgactcttgtgaagcagcaggcgccaagtgatgaagaattgcctgaggttctgtccattgaggaggaagtggaagaaacagagtcttgggcgaaacctctcatccacctttggcagacgaagtcccctaacttcgcagctgagcaagagtataatgcaacagtggccaggatgaagccacactgtgccatctgcactctgctcatgccgtaccacaagccagatagcagcaatgaagaaaatgatgctagatgggagacaaaattagatgaagtcgttacatcggagggaaagactaagcccctcataccagagatgtgttttatttatagtgaagaaaatatagaatattctccacccaatgccttccttgaagaggatggaacaagtctccttatttcctgtgcaaagtgctgcgtacgggttcatgcaagttgttatggtattccttctcatgagatctgtgatggatggctgtgtgcccggtgcaaaagaaatgcgtggacagcagaatgctgtctctgcaatttgagaggaggtgctcttaagcaaacgaagaacaataggtgggcccatgtcatgtgcgccgttgcggtcccagaagttcgattcactaatgtcccagaaaggacacaaatagatgtaggcagaatacctttacagaggttaaaattgaaatgcatcttctgcagacaccgggttaagagggtctctggagcctgcatccagtgttcctacggtcgctgcccggcctccttccatgtcacttgtgcccatgctgctggggtactgatggagcctgatgattggccttatgtggtgaacattacatgctttcgacataaggtcaaccccaacgtgaagtccaaggcttgcgagaaggtcatttccgtgggtcaaacggtcatcacgaagcatcggaacacccggtattacagttgcagagtgatggctgtgacatcgcagaccttctatgaggtcatgtttgatgatggctcctttagcagagacacatttcctgaggatatcgtgagccgagactgtctgaagctgggcccacctgctgagggagaagtcgtccaagtcaagtggcccgatggcaaactctatggagcaaaatattttggatcaaatattgcccacatgtaccaggttgagtttgaagatggatcccagatagcaatgaagagagaggacatctacactttagatgaagagttacccaagagagtgaaagctcgatttgtaagtgctggcagatgccacttggggacctgccaagtgaattccttgtcctcacctcatgtttcccaagcccagcaggaaacatacttgggcttttggattaattctaaaaaaagccaatgcaacattttccttagtggaacctattgaatgcaaacttcaaattcaaccaaaatcggggaaattaatgcatgtgctttacttttcttctaatgaagtcacatgatgcttctttgtgttgacatttattggtgcacaaaaatacttactgaatgtgtgctctgtgtaaaacaccaggagcaaacaaagataccatcaaggcatttgcaatcttgttagtagaagcaacattaaaagtattcaggagtagatcaaaggggactcggcataattgaatgtctgtctattcttttataggtttttcatggattgactaccttctgtctcagaaagttactgatgtttgtgtcagttcatcattaagctaaactctgactttcataataaaagggataaacaaagcctaaatgctagttgtgggaatactaaagcagttttttaaaaaggaaatagtagtttcatgccctcacataccattaaaagatgaacaaacatggacaaatattcaaaactgcagtcattgaaaaatataattcacaataatttagacttcatattattgtatcataaaatattcagtggaccctgaaatgaagtcagttttattcatttagaattatatctattgtgtctgtgaaatgataaatcctaaatagagaaatttgaatggatggggtttttctgactaaaatgaaattttttttctgaataattcagtttagtgagtgcttatgatatacttgtctgcagtgatagagtcactatagattatttggttattttggaaaaaccaagggttttcttaaatcagggatgtccaatctttttgcatccctgggccatacttgaagaagaagaattgtctttggcctcacataaactacactaacaatagctgatgagctactaaa

SEQ ID NO: 429612 - DNA, 847 bp, Homo sapiens
  misc_feature (25)..(25): n is a, c, g, or t
  misc_feature (27)..(27): n is a, c, g, or t
ctcacaagatatttaatgaagggcngngtgcccggggcaaaaaaaatgggtgtacagcagaatgctgtctctgcaatttgagaggaggtgctcttaagcaaacgaagaacaataggtgggcccatgtcatgtgcgccgttgcggtcccagaagttcgattcactaatgtcccagaaaggacacaaatagatgtaggcagaatacctttacagaggttaaaattgaaatgcatcttctgcagacaccgggttaagagggtctctggagcctgcatccagtgttcctacggtcgctgcccggcctccttccatgtcacttgtgcccatgctgctggggtactgatggagcctgatgattggccttatgtggtgaacattacatgctttcgacataaggtcaaccccaacgtgttcacagcacagagtaagcactcaaaaaatgaaagttgtattgctactactacttctgctgctgctgctggtgctacaatcttatgtgaactgggccacaagtccaaggcttgcgagaaggtcatttccgtgggtcaaacggtcatcacgaagcatcggaacacccggtattacagttgcagagtgatggctgtgacatcgcagaccttctatgaggtcatgtttgatgatggctcctttagcagagacacatttcctgaggatatcgtgagccgagactgtctgaagctgggcccacctgctgagggagaagtcgtccaagtcaagtggcccgatggcaaactctatggagcaaaatattttggatcaaatattgcccacatgtaccaggttgagtttgaagatggatcccagatagcaataaatacggatcggcc

SEQ ID NO: 429613 - DNA, 1503 bp, Homo sapiens
cagtctatgaaactgtacactgtggtcttgggctgttattttatctcctttagaagaaacaaagagcagcagcacagtaaaggaagagaagtccaaggcttgcgagaaggtcatttccgtgggtcaaacggtcatcacgaagcatcggaacacccggtattacagttgcagagtgatggctgtgacatcgcagaccttctatgaggtcatgtttgatgatggctcctttagcagagacacatttcctgaggatatcgtgagccgagactgtctgaagctgggcccacctgctgagggagaagtcgtccaagtcaagtggcccgatggcaaactctatggagcaaaatattttggatcaaatattgcccacatgtaccaggttgagtttgaagatggatcccagatagcaatgaagagagaggacatctacactttagatgaagagttacccaagagagtgaaagctcgatttgtaagtgctggcagatgccacttggggacctgccaagtgaattccttgtcctcacctcatgtttcccaagcccagcaggaaacatacttgggcttttggattaattctaaaaaaagccaatgcaacattttccttagtggaacctattgaatgcaaacttcaaattcaaccaaaatcggggaaattaatgcatgtgctttacttttcttctaatgaagtcacatgatgcttctttgtgttgacatttattggtgcacaaaaatacttactgaatgtgtgctctgtgtaaaacaccaggagcaaacaaagataccatcaaggcatttgcaatcttgttagtagaagcaacattaaaagtattcaggagtagatcaaaggggactcggcataattgaatgtctgtctattcttttataggtttttcatggattgactaccttctgtctcagaaagttactgatgtttgtgtcagttcatcattaagctaaactctgactttcataataaaagggataaacaaagcctaaatgctagttgtgggaatactaaagcagttttttaaaaaggaaatagtagtttcatgccctcacataccattaaaagatgaacaaacatggacaaatattcaaaactgcagtcattgaaaaatataattcacaataatttagacttcatattattgtatcataaaatattcagtggaccctgaaatgaagtcagttttattcatttagaattatatctattgtgtctgtgaaatgataaatcctaaatagagaaatttgaatggatggggtttttctgactaaaatgaaattttttttctgaataattcagtttagtgagtgcttatgatatacttgtctgcagtgatagagtcactatagattatttggttattttggaaaaaccaagggttttcttaaatcagggatgtccaatctttttgcatccctgggccatacttgaagaagaagaattgtctttggcctcacataaactacactaacaatagctgatgagctactaaa

SEQ ID NO: 429614 - DNA, 157 bp, Homo sapiens
tgaatttttccattaatgcacacattcccaaggtatattttctcctagctttcttttatttttctacccttattttcctttagcctaaatttatttattcttacaaattcttttcctgttatattgtaagtttgcatataaccttcctcaatttctg

SEQ ID NO: 429615 - DNA, 1112 bp, Homo sapiens
tgcaacgactctcttaatcttccaccgctacagccagatagcagcaatgaagaaaatgatgctagatgggagacaaaattagatgaagtcgttacatcggagggaaagactaagcccctcataccagagatgtgttttatttatagtgaagaaaatatagaatattctccacccaatgccttccttgaagaggatggaacaagtctccttatttcctgtgcaaagtgctgcgtacgggttcatgcaagttgttatggtattccttctcatgagatctgtgatggatggctgtgtgcccggtgcaaaagaaatgcgtggacagcagaatgctgtctctgcaatttgagaggaggtgctcttaagcaaacgaagaacaataggtgggcccatgtcatgtgcgccgttgcggtcccagaagttcgattcactaatgtcccagaaaggacacaaatagatgtaggcagaatacctttacagaggttaaaattgaaatgcatcttctgcagacaccgggttaagagggtctctggagcctgcatccagtgttcctacggtcgctgcccggcctccttccatgtcacttgtgcccatgctgctggggtactgatggagcctgatgattggccttatgtggtgaacattacatgctttcgacataaggtcaaccccaacgtgttcacagcacagagtaagcactcaaaaaatgaaagttgtattgctactactacttctgctgctgctgctggtgctacaatcttatgtgaactgggccacaagtccaaggcttgcgagaaggtcatttccgtgggtcaaacggtcatcacgaagcatcggaacacccggtattacagttgcagagtgatggctgtgacatcgcagaccttctatgaggtcatgtttgatgatggctcctttagcagagacacatttcctgaggatatcgtgagccgagactgtctgaagctgggcccacctgctgagggagaagtcgtccaagtcaagtggcccgatggcaaactctatggagcaaaatattttggatcaaatattgcccacatgtaccaggttgagtttgaagatggatcccagatagcaataaatacggatcggcc

SEQ ID NO: 429616 - DNA, 3207 bp, Homo sapiens
gggtcctgtgcgcgtgcgcagcgaacagctgtcacctagtgcggaacaagtctcccaaatttcccaaatctccctgggccggaggccactgtcttctcttcctcctccaccgagtcgtgctctcgccccaacccgcgcgccagacactgccctaaccatcatggaggtggccgaggtggaaagtcctctgaaccccagctgtaagataatgaccttcagaccctccatggaggagttccgggagttcaacaaataccttgcatacatggagtctaaaggagcccatcgtgcgggtcttgcaaaggtgattcctcctaaggagtggaagccaagacagtgctatgatgacattgataatttgctcattccagcaccaattcagcagatggtcacagggcagtcaggactgttcactcagtacaacatccagaaaaaagcgatgactgtgaaggagttcaggcagctggccaacagtggcaaatattgtactccaagatacttggattacgaagatttggagcgcaagtactggaagaacttaacttttgtggcacctatctatggtgcagatattaatgggagcatatatgatgagggtgtggatgaatggaacatagctcgcctcaatacagtcttggatgtggttgaagaagagtgtggcatttctattgagggtgtaaataccccatatctctattttggcatgtggaagaccacgtttgcatggcacaccgaagacatggacctctatagcattaattatctccactttggagagcccaagtcttggtatgctatacctccggagcatggaaaacgacttgaaagactagctcaaggttttttcccaagcagctcccaagggtgtgatgcatttcttcgccacaagatgacattgatttctccatcagtattgaagaaatatggtattccctttgacaagataacccaggaggctggagaattcatgatcactttcccatatggctaccatgctggttttaatcatggtttcaactgtgcagaatctacaaattttgctactgtcagatggattgactatggaaaagttgccaaattgtgcacttgcaggaaagacatggtgaagatttcaatggatatctttgtgaggaaatttcagccagacagatatcagctttggaaacaaggaaaggatatatacaccattgatcacacgaagcctactccagcatccacccctgaagtaaaagcatggctgcagaggaggaggaaagtaagaaaagcatcccgaagcttccagtgtgctaggtctacctctaaaaggcctaaggctgatgaggaagaggaagtgtcagatgaagtcgatggggcagaggtccctaaccccgactcagtcacagatgacctcaaggtcagtgaaaagtcagaagcagcagtgaagctgaggaacacagaagcatcttcagaagaagagtcatctgctagcaggatgcaggtggagcagaatttatcagatcatatcaaactctcaggaaacagctgcttaagtacatctgtaacagaagacataaaaactgaggatgacaaagcttatgcatatagaagtgtaccttctatatccagtgaggctgatgattccattccattgtctagtggctatgagaagcccgagaaatcagacccatccgagctttcatggccaaagtcacctgagtcatgctcatcagtggcagagagtaatggtgtgttaacagagggagaagagagtgatgtggagagccatgggaatggccttgaacctggggaaatcccagcggtccccagtggagagagaaatagcttcaaagtccccagtatagcagagggagagaacaaaacctctaagagttggcgccatccacttagcaggcctccagcaagatctccgatgactcttgtgaagcagcaggcgccaagtgatgaagaattgcctgaggttctgtccattgaggaggaagtggaagaaacagagtcttgggcgaaacctctcatccacctttggcagacgaagtcccctaacttcgcagctgagcaagagtataatgcaacagtggccaggatgaagccacactgtgccatctgcactctgctcatgccgtaccacaagccagatagcagcaatgaagaaaatgatgctagatgggagacaaaattagatgaagtcgttacatcggagggaaagactaagcccctcataccagagatgtgttttatttatagtgaagaaaatatagaatattctccacccaatgccttccttgaagaggatggaacaagtctccttatttcctgtgcaaagtgctgcgtacgggttcatgcaagttgttatggtattccttctcatgagatctgtgatggatggctgtgtgcccggtgcaaaagaaatgcgtggacagcagaatgctgtctctgcaatttgagaggaggtgctcttaagcaaacgaagaacaataggtgggcccatgtcatgtgcgccgttgcggtcccagaagttcgattcactaatgtcccagaaaggacacaaatagatgtaggcagaatacctttacagaggttaaaattgaaatgcatcttctgcagacaccgggttaagagggtctctggagcctgcatccagtgttcctacggtcgctgcccggcctccttccatgtcacttgtgcccatgctgctggggtactgatggagcctgatgattggccttatgtggtgaacattacatgctttcgacataaggtcaaccccaacgtgttcacagcacagagtaagcactcaaaaaatgaaagttgtattgctactactacttctgctgctgctgctggtgctacaatcttatgtgaactgggccacaagtccaaggcttgcgagaaggtcatttccgtgggtcaaacggtcatcacgaagcatcggaacacccggtattacagttgcagagtgatggctgtgacatcgcagaccttctatgaggtcatgtttgatgatggctcctttagcagagacacatttcctgaggatatcgtgagccgagactgtctgaagctgggcccacctgctgagggagaagtcgtccaagtcaagtggcccgatggcaaactctatggagcaaaatattttggatcaaatattgcccacatgtaccaggttgagtttgaagatggatcccagatagcaataaatacggatcggcc

SEQ ID NO: 429617 - DNA, 1117 bp, Homo sapiens
  misc_feature (21)..(21): n is a, c, g, or t
gtcatcatgagacactctctnaattctcaccgctacagccagatagcagcaatgaagaaaatgatgctagatgggagacaaaattagatgaagtcgttacatcggagggaaagactaagcccctcataccagagatgtgttttatttatagtgaagaaaatatagaatattctccacccaatgccttccttgaagaggatggaacaagtctccttatttcctgtgcaaagtgctgcgtacgggttcatgcaagttgttatggtattccttctcatgagatctgtgatggatggctgtgtgcccggtgcaaaagaaatgcgtggacagcagaatgctgtctctgcaatttgagaggaggtgctcttaagcaaacgaagaacaataggtgggcccatgtcatgtgcgccgttgcggtcccagaagttcgattcactaatgtcccagaaaggacacaaatagatgtaggcagaatacctttacagaggttaaaattgaaatgcatcttctgcagacaccgggttaagagggtctctggagcctgcatccagtgttcctacggtcgctgcccggcctccttccatgtcacttgtgcccatgctgctggggtactgatggagcctgatgattggccttatgtggtgaacattacatgctttcgacataaggtcaaccccaacgtgttcacagcacagagtaagcactcaaaaaatgaaagttgtattgctactactacttctgctgctgctgctggtgctacaatcttatgtgaactgggccacaagtccaaggcttgcgagaaggtcatttccgtgggtcaaacggtcatcacgaagcatcggaacacccggtattacagttgcagagtgatggctgtgacatcgcagaccttctatgaggtcatgtttgatgatggctcctttagcagagacacatttcctgaggatatcgtgagccgagactgtctgaagctgggcccacctgctgagggagaagtcgtccaagtcaagtggcccgatggcaaactctatggagcaaaatattttggatcaaatattgcccacatgtaccaggttgagtttgaagatggatcccagatagcaataaatacggatcggcc

SEQ ID NO: 429618 - DNA, 1119 bp, Homo sapiens
  misc_feature (2)..(2): n is a, c, g, or t
  misc_feature (24)..(24): n is a, c, g, or t
  misc_feature (29)..(29): n is a, c, g, or t
cnctaagcgtgactgactctcttncttanccaccgctcagccagatagcagcaatgaagaaaatgatgctagatgggagacaaaattagatgaagtcgttacatcggagggaaagactaagcccctcataccagagatgtgttttatttatagtgaagaaaatatagaatattctccacccaatgccttccttgaagaggatggaacaagtctccttatttcctgtgcaaagtgctgcgtacgggttcatgcaagttgttatggtattccttctcatgagatctgtgatggatggctgtgtgcccggtgcaaaagaaatgcgtggacagcagaatgctgtctctgcaatttgagaggaggtgctcttaagcaaacgaagaacaataggtgggcccatgtcatgtgcgccgttgcggtcccagaagttcgattcactaatgtcccagaaaggacacaaatagatgtaggcagaatacctttacagaggttaaaattgaaatgcatcttctgcagacaccgggttaagagggtctctggagcctgcatccagtgttcctacggtcgctgcccggcctccttccatgtcacttgtgcccatgctgctggggtactgatggagcctgatgattggccttatgtggtgaacattacatgctttcgacataaggtcaaccccaacgtgttcacagcacagagtaagcactcaaaaaatgaaagttgtattgctactactacttctgctgctgctgctggtgctacaatcttatgtgaactgggccacaagtccaaggcttgcgagaaggtcatttccgtgggtcaaacggtcatcacgaagcatcggaacacccggtattacagttgcagagtgatggctgtgacatcgcagaccttctatgaggtcatgtttgatgatggctcctttagcagagacacatttcctgaggatatcgtgagccgagactgtctgaagctgggcccacctgctgagggagaagtcgtccaagtcaagtggcccgatggcaaactctatggagcaaaatattttggatcaaatattgcccacatgtaccaggttgagtttgaagatggatcccagatagcaataaatacggatcggcc

SEQ ID NO: 429619 - DNA, 2254 bp, Homo sapiens
  misc_feature (1419)..(1419): n is a, c, g, or t
tgcaacgactctcttaatcttccaccgctacagccagatagcagcaatgaagaaaatgatgctagatgggagacaaaattagatgaagtcgttacatcggagggaaagactaagcccctcataccagagatgtgttttatttatagtgaagaaaatatagaatattctccacccaatgccttccttgaagaggatggaacaagtctccttatttcctgtgcaaagtgctgcgtacgggttcatgcaagttgttatggtattccttctcatgagatctgtgatggatggctgtgtgcccggtgcaaaagaaatgcgtggacagcagaatgctgtctctgcaatttgagaggaggtgctcttaagcaaacgaagaacaataggtgggcccatgtcatgtgcgccgttgcggtcccagaagttcgattcactaatgtcccagaaaggacacaaatagatgtaggcagaatacctttacagaggttaaaattgaaatgcatcttctgcagacaccgggttaagagggtctctggagcctgcatccagtgttcctacggtcgctgcccggcctccttccatgtcacttgtgcccatgctgctggggtactgatggagcctgatgattggccttatgtggtgaacattacatgctttcgacataaggtcaaccccaacgtgttcacagcacagagtaagcactcaaaaaatgaaagttgtattgctactactacttctgctgctgctgctggtgctacaatcttatgtgaactgggccacaagtccaaggcttgcgagaaggtcatttccgtgggtcaaacggtcatcacgaagcatcggaacacccggtattacagttgcagagtgatggctgtgacatcgcagaccttctatgaggtcatgtttgatgatggctcctttagcagagacacatttcctgaggatatcgtgagccgagactgtctgaagctgggcccacctgctgagggagaagtcgtccaagtcaagtggcccgatggcaaactctatggagcaaaatattttggatcaaatattgcccacatgtaccaggttgagtttgaagatggatcccagatagcaatgaagagagaggacatctacactttagatgaagagttacccaagagagtgaaagctcgattttccacagcctctgacatgcgatttgaagacacgttttatggagcagacattatccaaggggagagaaagagacaaagagtgctgagctccaggtttaagaatgaatatgtggccgaccctgtataccgcacttttttgaagagctctttccagaagaagtgccagaagagacagtagtctgcatacatcgctgcaggccacagagcagcttgggttggaagagagaagatgaagggacatccttggggctgtgccgtgagntttgctggcataggtgacagggtgtgtctctgacagtggtaaatcgggtttccagagtttggtcaccaaaaatacaaaatacacccaatgaattggacgcagcaatctgaaatcatctctagtcttgctttcacttgtgagcagttgtcttctatgatcccaaagaagttttctaagtgaaaggaaatactagtgaatcacccacaaggaaaagccactgccacagaggaggcgggtccccttgtgcggcttagggccctgtcaggaaacacacggggacctctctctctagctccagcaggtggcacctcggtacccagcgggtagggcgataatttatatattttccacagtcagggaaggactctcacttatttgtttcaaattgcagtttttataaaacatttttaaaacacaaatggcatgtatgctaatgagatttacccgtgtgctatctgtatttcccttgtacagaacttttacatttttgaatattcctattacttttgattgtgtctgatgggaactgagttgttggcctttgtgaaatgaaatttttggctcttgagaaagaattcttatgaattgttatgcgaattttatatatttaaagagggagatctggggctgttatttttaaacactttttttcataatacatattccgagtagatatttataaaatatatgtttctttcattatgtgtttgtaaaattagagtttaaataaatatgctttgatgcatagttttgaactaatgtaacatgatttttcttttttaaaacagcctgaaaatgtactagtgtttaaaaataaagatttccattttctcca

SEQ ID NO: 429620 - DNA, 1168 bp, Homo sapiens
  misc_feature (1108)..(1108): n is a, c, g, or t
  misc_feature (1112)..(1112): n is a, c, g, or t
tgcaacgactctcttaatcttccaccgctacagccagatagcagcaatgaagaaaatgatgctagatgggagacaaaattagatgaagtcgttacatcggagggaaagactaagcccctcataccagagatgtgttttatttatagtgaagaaaatatagaatattctccacccaatgccttccttgaagaggatggaacaagtctccttatttcctgtgcaaagtgctgcgtacgggttcatgcaagttgttatggtattccttctcatgagatctgtgatggatggctgtgtgcccggtgcaaaagaaatgcgtggacagcagaatgctgtctctgcaatttgagaggaggtgctcttaagcaaacgaagaacaataggtgggcccatgtcatgtgcgccgttgcggtcccagaagttcgattcactaatgtcccagaaaggacacaaatagatgtaggcagaatacctttacagaggttaaaattgaaatgcatcttctgcagacaccgggttaagagggtctctggagcctgcatccagtgttcctacggtcgctgcccggcctccttccatgtcacttgtgcccatgctgctggggtactgatggagcctgatgattggccttatgtggtgaacattacatgctttcgacataaggtcaaccccaacgtgttcacagcacagagtaagcactcaaaaaatgaaagttgtattgctactactacttctgctgctgctgctggtgctacaatcttatgtgaactgggccacaagtccaaggcttgcgagaaggtcatttccgtgggtcaaacggtcatcacgaagcatcggaacacccggtattacagttgcagagtgatggctgtgacatcgcagaccttctatgaggtcatgtttgatgatggctcctttagcagagacacatttcctgaggatatcgtgagccgagactgtctgaagctgggcccacctgctgagggagaagtcgtccaagtcaagtggcccgatggcaaactctatggagcaaaatattttggatcaaatattgcccacatgtaccaggttgagtttgaagatggatcccagatagcaataaatacggtangcgngccagaggttcacacttcccaagttcatgcacaccagactgtcctacagcagaata

SEQ ID NO: 429621 - DNA, 2189 bp, Homo sapiens
tgcaacgactctcttaatcttccaccgctacagccagatagcagcaatgaagaaaatgatgctagatgggagacaaaattagatgaagtcgttacatcggagggaaagactaagcccctcataccagagatgtgttttatttatagtgaagaaaatatagaatattctccacccaatgccttccttgaagaggatggaacaagtctccttatttcctgtgcaaagtgctgcgtacgggttcatgcaagttgttatggtattccttctcatgagatctgtgatggatggctgtgtgcccggtgcaaaagaaatgcgtggacagcagaatgctgtctctgcaatttgagaggaggtgctcttaagcaaacgaagaacaataggtgggcccatgtcatgtgcgccgttgcggtcccagaagttcgattcactaatgtcccagaaaggacacaaatagatgtaggcagaatacctttacagaggttaaaattgaaatgcatcttctgcagacaccgggttaagagggtctctggagcctgcatccagtgttcctacggtcgctgcccggcctccttccatgtcacttgtgcccatgctgctggggtactgatggagcctgatgattggccttatgtggtgaacattacatgctttcgacataaggtcaaccccaacgtgttcacagcacagagtaagcactcaaaaaatgaaagttgtattgctactactacttctgctgctgctgctggtgctacaatcttatgtgaactgggccacaagtccaaggcttgcgagaaggtcatttccgtgggtcaaacggtcatcacgaagcatcggaacacccggtattacagttgcagagtgatggctgtgacatcgcagaccttctatgaggtcatgtttgatgatggctcctttagcagagacacatttcctgaggatatcgtgagccgagactgtctgaagctgggcccacctgctgagggagaagtcgtccaagtcaagtggcccgatggcaaactctatggagcaaaatattttggatcaaatattgcccacatgtaccaggttgagtttgaagatggatcccagatagcaatgaagagagaggacatctacactttagatgaagagttacccaagagagtgaaagctcgatttgtaagtgctggcagatgccacttggggacctgccaagtgaattccttgtcctcacctcatgtttcccaagcccagcaggaaacatacttgggcttttggattaattctaaaaaaagccaatgcaacattttccttagtggaacctattgaatgcaaacttcaaattcaaccaaaatcggggaaattaatgcatgtgctttacttttcttctaatgaagtcacatgatgcttctttgtgttgacatttattggtgcacaaaaatacttactgaatgtgtgctctgtgtaaaacaccaggagcaaacaaagataccatcaaggcatttgcaatcttgttagtagaagcaacattaaaagtattcaggagtagatcaaaggggactcggcataattgaatgtctgtctattcttttataggtttttcatggattgactaccttctgtctcagaaagttactgatgtttgtgtcagttcatcattaagctaaactctgactttcataataaaagggataaacaaagcctaaatgctagttgtgggaatactaaagcagttttttaaaaaggaaatagtagtttcatgccctcacataccattaaaagatgaacaaacatggacaaatattcaaaactgcagtcattgaaaaatataattcacaataatttagacttcatattattgtatcataaaatattcagtggaccctgaaatgaagtcagttttattcatttagaattatatctattgtgtctgtgaaatgataaatcctaaatagagaaatttgaatggatggggtttttctgactaaaatgaaattttttttctgaataattcagtttagtgagtgcttatgatatacttgtctgcagtgatagagtcactatagattatttggttattttggaaaaaccaagggttttcttaaatcagggatgtccaatctttttgcatccctgggccatacttgaagaagaagaattgtctttggcctcacataaactacactaacaatagctgatgagctactaaa

SEQ ID NO: 429622 - DNA, 3168 bp, Homo sapiens
gggtcctgtgcgcgtgcgcagcgaacagctgtcacctagtgcggaacaagtctcccaaatttcccaaatctccctgggccggaggccactgtcttctcttcctcctccaccgagtcgtgctctcgccccaacccgcgcgccagacactgccctaaccatcatggaggtggccgaggtggaaagtcctctgaaccccagctgtaagataatgaccttcagaccctccatggaggagttccgggagttcaacaaataccttgcatacatggagtctaaaggagcccatcgtgcgggtcttgcaaaggtgattcctcctaaggagtggaagccaagacagtgctatgatgacattgataatttgctcattccagcaccaattcagcagatggtcacagggcagtcaggactgttcactcagtacaacatccagaaaaaagcgatgactgtgaaggagttcaggcagctggccaacagtggcaaatattgtactccaagatacttggattacgaagatttggagcgcaagtactggaagaacttaacttttgtggcacctatctatggtgcagatattaatgggagcatatatgatgagggtgtggatgaatggaacatagctcgcctcaatacagtcttggatgtggttgaagaagagtgtggcatttctattgagggtgtaaataccccatatctctattttggcatgtggaagaccacgtttgcatggcacaccgaagacatggacctctatagcattaattatctccactttggagagcccaagtcttggtatgctatacctccggagcatggaaaacgacttgaaagactagctcaaggttttttcccaagcagctcccaagggtgtgatgcatttcttcgccacaagatgacattgatttctccatcagtattgaagaaatatggtattccctttgacaagataacccaggaggctggagaattcatgatcactttcccatatggctaccatgctggttttaatcatggtttcaactgtgcagaatctacaaattttgctactgtcagatggattgactatggaaaagttgccaaattgtgcacttgcaggaaagacatggtgaagatttcaatggatatctttgtgaggaaatttcagccagacagatatcagctttggaaacaaggaaaggatatatacaccattgatcacacgaagcctactccagcatccacccctgaagtaaaagcatggctgcagaggaggaggaaagtaagaaaagcatcccgaagcttccagtgtgctaggtctacctctaaaaggcctaaggctgatgaggaagaggaagtgtcagatgaagtcgatggggcagaggtccctaaccccgactcagtcacagatgacctcaaggtcagtgaaaagtcagaagcagcagtgaagctgaggaacacagaagcatcttcagaagaagagtcatctgctagcaggatgcaggtggagcagaatttatcagatcatatcaaactctcaggaaacagctgcttaagtacatctgtaacagaagacataaaaactgaggatgacaaagcttatgcatatagaagtgtaccttctatatccagtgaggctgatgattccattccattgtctagtggctatgagaagcccgagaaatcagacccatccgagctttcatggccaaagtcacctgagtcatgctcatcagtggcagagagtaatggtgtgttaacagagggagaagagagtgatgtggagagccatgggaatggccttgaacctggggaaatcccagcggtccccagtggagagagaaatagcttcaaagtccccagtatagcagagggagagaacaaaacctctaagagttggcgccatccacttagcaggcctccagcaagatctccgatgactcttgtgaagcagcaggcgccaagtgatgaagaattgcctgaggttctgtccattgaggaggaagtggaagaaacagagtcttgggcgaaacctctcatccacctttggcagacgaagtcccctaacttcgcagctgagcaagagtataatgcaacagtggccaggatgaagccacactgtgccatctgcactctgctcatgccgtaccacaagccagatagcagcaatgaagaaaatgatgctagatgggagacaaaattagatgaagtcgttacatcggagggaaagactaagcccctcatatttatagtgaagaaaatatagaatattctccacccaatgccttccttgaagaggatggaacaagtctccttatttcctgtgcaaagttgttatggtattccttctcatgagatctgtgatggatggctgtgtgcccggtgcaaaagaaatgcgtggacagcagaatgctgtctctgcaatttgagaggaggtgctcttaagcaaacgaagaacaataggtgggcccatgtcatgtgcgccgttgcggtcccagaagttcgattcactaatgtcccagaaaggacacaaatagatgtaggcagaatacctttacagaggttaaaattgaaatgcatcttctgcagacaccgggttaagagggtctctggagcctgcatccagtgttcctacggtcgctgcccggcctccttccatgtcacttgtgcccatgctgctggggtactgatggagcctgatgattggccttatgtggtgaacattacatgctttcgacataaggtcaaccccaacgtgttcacagcacagagtaagcactcaaaaaatgaaagttgtattgctactactacttctgctgctgctgctggtgctacaatcttatgtgaactgggccacaagtccaaggcttgcgagaaggtcatttccgtgggtcaaacggtcatcacgaagcatcggaacacccggtattacagttgcagagtgatggctgtgacatcgcagaccttctatgaggtcatgtttgatgatggctcctttagcagagacacatttcctgaggatatcgtgagccgagactgtctgaagctgggcccacctgctgagggagaagtcgtccaagtcaagtggcccgatggcaaactctatggagcaaaatattttggatcaaatattgcccacatgtaccaggttgagtttgaagatggatcccagatagcaataaatacggatcggcc

SEQ ID NO: 429623 - DNA, 4271 bp, Homo sapiens
  misc_feature (3436)..(3436): n is a, c, g, or t
gggtcctgtgcgcgtgcgcagcgaacagctgtcacctagtgcggaacaagtctcccaaatttcccaaatctccctgggccggaggccactgtcttctcttcctcctccaccgagtcgtgctctcgccccaacccgcgcgccagacactgccctaaccatcatggaggtggccgaggtggaaagtcctctgaaccccagctgtaagataatgaccttcagaccctccatggaggagttccgggagttcaacaaataccttgcatacatggagtctaaaggagcccatcgtgcgggtcttgcaaaggtgattcctcctaaggagtggaagccaagacagtgctatgatgacattgataatttgctcattccagcaccaattcagcagatggtcacagggcagtcaggactgttcactcagtacaacatccagaaaaaagcgatgactgtgaaggagttcaggcagctggccaacagtggcaaatattgtactccaagatacttggattacgaagatttggagcgcaagtactggaagaacttaacttttgtggcacctatctatggtgcagatattaatgggagcatatatgatgagggtgtggatgaatggaacatagctcgcctcaatacagtcttggatgtggttgaagaagagtgtggcatttctattgagggtgtaaataccccatatctctattttggcatgtggaagaccacgtttgcatggcacaccgaagacatggacctctatagcattaattatctccactttggagagcccaagtcttggtatgctatacctccggagcatggaaaacgacttgaaagactagctcaaggttttttcccaagcagctcccaagggtgtgatgcatttcttcgccacaagatgacattgatttctccatcagtattgaagaaatatggtattccctttgacaagataacccaggaggctggagaattcatgatcactttcccatatggctaccatgctggttttaatcatggtttcaactgtgcagaatctacaaattttgctactgtcagatggattgactatggaaaagttgccaaattgtgcacttgcaggaaagacatggtgaagatttcaatggatatctttgtgaggaaatttcagccagacagatatcagctttggaaacaaggaaaggatatatacaccattgatcacacgaagcctactccagcatccacccctgaagtaaaagcatggctgcagaggaggaggaaagtaagaaaagcatcccgaagcttccagtgtgctaggtctacctctaaaaggcctaaggctgatgaggaagaggaagtgtcagatgaagtcgatggggcagaggtccctaaccccgactcagtcacagatgacctcaaggtcagtgaaaagtcagaagcagcagtgaagctgaggaacacagaagcatcttcagaagaagagtcatctgctagcaggatgcaggtggagcagaatttatcagatcatatcaaactctcaggaaacagctgcttaagtacatctgtaacagaagacataaaaactgaggatgacaaagcttatgcatatagaagtgtaccttctatatccagtgaggctgatgattccattccattgtctagtggctatgagaagcccgagaaatcagacccatccgagctttcatggccaaagtcacctgagtcatgctcatcagtggcagagagtaatggtgtgttaacagagggagaagagagtgatgtggagagccatgggaatggccttgaacctggggaaatcccagcggtccccagtggagagagaaatagcttcaaagtccccagtatagcagagggagagaacaaaacctctaagagttggcgccatccacttagcaggcctccagcaagatctccgatgactcttgtgaagcagcaggcgccaagtgatgaagaattgcctgaggttctgtccattgaggaggaagtggaagaaacagagtcttgggcgaaacctctcatccacctttggcagacgaagtcccctaacttcgcagctgagcaagagtataatgcaacagtggccaggatgaagccacactgtgccatctgcactctgctcatgccgtaccacaagccagatagcagcaatgaagaaaatgatgctagatgggagacaaaattagatgaagtcgttacatcggagggaaagactaagcccctcatatttatagtgaagaaaatatagaatattctccacccaatgccttccttgaagaggatggaacaagtctccttatttcctgtgcaaagttgttatggtattccttctcatgagatctgtgatggatggctgtgtgcccggtgcaaaagaaatgcgtggacagcagaatgctgtctctgcaatttgagaggaggtgctcttaagcaaacgaagaacaataggtgggcccatgtcatgtgcgccgttgcggtcccagaaccagaaaggacacaaatagatgtaggcagaatacctttacagaggttaaaattgaaatgcatcttctgcagacaccgggttaagagggtctctggaggtcgctgcccggcctccttccatgtcacttgtgcccatgctgctggggtactgatggagcctgatgattggccttatgtggtgaacattacatgctttcgacataaggtcaaccccaacgtgttcacagcacagagtaagcactcaaaaaatgaaagttgtattgctactactacttctgctgctgctgctggtgctacaatcttatgtgaactgggccacaagtccaaggcttgcgagaaggtcatttccgtgggtcaaacggtcatcacgaagcatcggaacacccggtattacagttgcagagtgatggctgtgacatcgcagaccttctatgaggtcatgtttgatgatggctcctttagcagagacacatttcctgaggatatcgtgagccgagactgtctgaagctgggcccacctgctgagggagaagtcgtccaagtcaagtggcccgatggcaaactctatggagcaaaatattttggatcaaatattgcccacatgtaccaggttgagtttgaagatggatcccagatagcaatgaagagagaggacatctacactttagatgaagagttacccaagagagtgaaagctcgattttccacagcctctgacatgcgatttgaagacacgttttatggagcagacattatccaaggggagagaaagagacaaagagtgctgagctccaggtttaagaatgaatatgtggccgaccctgtataccgcacttttttgaagagctctttccagaagaagtgccagaagagacagtagtctgcatacatcgctgcaggccacagagcagcttgggttggaagagagaagatgaagggacatccttggggctgtgccgtgagntttgctggcataggtgacagggtgtgtctctgacagtggtaaatcgggtttccagagtttggtcaccaaaaatacaaaatacacccaatgaattggacgcagcaatctgaaatcatctctagtcttgctttcacttgtgagcagttgtcttctatgatcccaaagaagttttctaagtgaaaggaaatactagtgaatcacccacaaggaaaagccactgccacagaggaggcgggtccccttgtgcggcttagggccctgtcaggaaacacacggggacctctctctctagctccagcaggtggcacctcggtacccagcgggtagggcgataatttatatattttccacagtcagggaaggactctcacttatttgtttcaaattgcagtttttataaaacatttttaaaacacaaatggcatgtatgctaatgagatttacccgtgtgctatctgtatttcccttgtacagaacttttacatttttgaatattcctattacttttgattgtgtctgatgggaactgagttgttggcctttgtgaaatgaaatttttggctcttgagaaagaattcttatgaattgttatgcgaattttatatatttaaagagggagatctggggctgttatttttaaacactttttttcataatacatattccgagtagatatttataaaatatatgtttctttcattatgtgtttgtaaaattagagtttaaataaatatgctttgatgcatagttttgaactaatgtaacatgatttttcttttttaaaacagcctgaaaatgtactagtgtttaaaaataaagatttccattttctcca

SEQ ID NO: 429624 - DNA, 2748 bp, Homo sapiens
gggtcctgtgcgcgtgcgcagcgaacagctgtcacctagtgcggaacaagtctcccaaatttcccaaatctccctgggccggaggccactgtcttctcttcctcctccaccgagtcgtgctctcgccccaacccgcgcgccagacactgccctaaccatcatggaggtggccgaggtggaaagtcctctgaaccccagctgtaagataatgaccttcagaccctccatggaggagttccgggagttcaacaaataccttgcatacatggagtctaaaggagcccatcgtgcgggtcttgcaaaggtgattcctcctaaggagtggaagccaagacagtgctatgatgacattgataatttgctcattccagcaccaattcagcagatggtcacagggcagtcaggactgttcactcagtacaacatccagaaaaaagcgatgactgtgaaggagttcaggcagctggccaacagtggcaaatattgtactccaagatacttggattacgaagatttggagcgcaagtactggaagaacttaacttttgtggcacctatctatggtgcagatattaatgggagcatatatgatgagggtgtggatgaatggaacatagctcgcctcaatacagtcttggatgtggttgaagaagagtgtggcatttctattgagggtgtaaataccccatatctctattttggcatgtggaagaccacgtttgcatggcacaccgaagacatggacctctatagcattaattatctccactttggagagcccaagtcttggtatgctatacctccggagcatggaaaacgacttgaaagactagctcaaggttttttcccaagcagctcccaagggtgtgatgcatttcttcgccacaagatgacattgatttctccatcagtattgaagaaatatggtattccctttgacaagataacccaggaggctggagaattcatgatcactttcccatatggctaccatgctggttttaatcatggtttcaactgtgcagaatctacaaattttgctactgtcagatggattgactatggaaaagttgccaaattgtgcacttgcaggaaagacatggtgaagatttcaatggatatctttgtgaggaaatttcagccagacagatatcagctttggaaacaaggaaaggatatatacaccattgatcacacgaagcctactccagcatccacccctgaagtaaaagcatggctgcagaggaggaggaaagtaagaaaagcatcccgaagcttccagtgtgctaggtctacctctaaaaggcctaaggctgatgaggaagaggaagtgtcagatgaagtcgatggggcagaggtccctaaccccgactcagtcacagatgacctcaaggtcagtgaaaagtcagaagcagcagtgaagctgaggaacacagaagcatcttcagaagaagagtcatctgctagcaggatgcaggtggagcagaatttatcagatcatatcaaactctcaggaaacagctgcttaagtacatctgtaacagaagacataaaaactgaggatgacaaagcttatgcatatagaagtgtaccttctatatccagtgaggctgatgattccattccattgtctagtggctatgagaagcccgagaaatcagacccatccgagctttcatggccaaagtcacctgagtcatgctcatcagtggcagagagtaatggtgtgttaacagagggagaagagagtgatgtggagagccatgggaatggccttgaacctggggaaatcccagcggtccccagtggagagagaaatagcttcaaagtccccagtatagcagagggagagaacaaaacctctaagagttggcgccatccacttagcaggcctccagcaagatctccgatgactcttgtgaagcagcaggcgccaagtgatgaagaattgcctgaggttctgtccattgaggaggaagtggaagaaacagagtcttgggcgaaacctctcatccacctttggcagacgaagtcccctaacttcgcagctgagcaagagtataatgcaacagtggccaggatgaagccacactgtgccatctgcactctgctcatgccgtaccacaagccagatagcagcaatgaagaaaatgatgctagatgggagacaaaattagatgaagtcgttacatcggagggaaagactaagcccctcataccagagatgtgttttatttatagtgaagaaaatatagaatattctccacccaatgccttccttgaagaggatggaacaagtctccttatttcctgtgcaaagtgctgcgtacgggttcatgcaagtaaatggatctataattcatcaatcactggcttttcagcatttcacatcatctttatttctcacttttttggaacctgtcagatctgttgcatggactattggcattcttaatggttatatcattctttttcatatttctgctggtaaaagtatgagttggtatattcatccttttttcaccactttcatgtagtatccgtggagagcaggtctggttttttttgttggtttgtttgtttggggtccagttgaggagtcatgatggggttcctttcacatgtttggattttacttactttaagatctagtttataaaaacttaatttgaaagtctgatactgattgatgactgcttttctttgtgacttttaaaagagaaatgaatgttcctttggttgttctga

SEQ ID NO: 429625 - DNA, 2115 bp, Homo sapiens
gggtcctgtgcgcgtgcgcagcgaacagctgtcacctagtgcggaacaagtctcccaaatttcccaaatctccctgggccggaggccactgtcttctcttcctcctccaccgagtcgtgctctcgccccaacccgcgcgccagacactgccctaaccatcatggaggtggccgaggtggaaagtcctctgaaccccagctgtaagataatgaccttcagaccctccatggaggagttccgggagttcaacaaataccttgcatacatggagtctaaaggagcccatcgtgcgggtcttgcaaaggtgattcctcctaaggagtggaagccaagacagtgctatgatgacattgataatttgctcattccagcaccaattcagcagatggtcacagggcagtcaggactgttcactcagtacaacatccagaaaaaagcgatgactgtgaaggagttcaggcagctggccaacagtggcaaatattgtactccaagatacttggattacgaagatttggagcgcaagtactggaagaacttaacttttgtggcacctatctatggtgcagatattaatgggagcatatatgatgagggtgtggatgaatggaacatagctcgcctcaatacagtcttggatgtggttgaagaagagtgtggcatttctattgagggtgtaaataccccatatctctattttggcatgtggaagaccacgtttgcatggcacaccgaagacatggacctctatagcattaattatctccactttggagagcccaagtcttggtatgctatacctccggagcatggaaaacgacttgaaagactagctcaaggttttttcccaagcagctcccaagggtgtgatgcatttcttcgccacaagatgacattgatttctccatcagtattgaagaaatatggtattccctttgacaagataacccaggaggctggagaattcatgatcactttcccatatggctaccatgctggttttaatcatggtttcaactgtgcagaatctacaaattttgctactgtcagatggattgactatggaaaagttgccaaattgtgcacttgcaggaaagacatggtgaagatttcaatggatatctttgtgaggaaatttcagccagacagatatcagctttggaaacaaggaaaggatatatacaccattgatcacacgaagcctactccagcatccacccctgaagtaaaagcatggctgcagaggaggaggaaagtaagaaaagcatcccgaagcttccagtgtgctaggtctacctctaaaaggcctaaggctgatgaggaagaggaagtgtcagatgaagtcgatggggcagaggtccctaaccccgactcagtcacagatgacctcaaggtcagtgaaaagtcagaagcagcagtgaagctgaggaacacagaagcatcttcagaagaagagtcatctgctagcaggatgcaggtggagcagaatttatcagatcatatcaaactctcaggaaacagctgcttaagtacatctgtaacagaagacataaaaactgaggatgacaaagcttatgcatatagaagtgtaccttctatatccagtgaggctgatgattccattccattgtctagtggctatgagaagcccgagaaatcagacccatccgagctttcatggccaaagtcacctgagtcatgctcatcagtggcagagagtaatggtgtgttaacagagggagaagagagtgatgtggagagccatgggaatggccttgaacctggggaaatcccagcggtccccagtggagagagaaatagcttcaaagtccccagtgtatgtggcaatatccattttttaccatattcattatatggtgagagcacattttgaaaacaacatgctgtgcactgaaatcctcctttagggcacagataaataacattttacatttatgggtcttaatcatattcattcaataactgggaggtaagcctcctgtgagctgtggctcacatagtgataatttagcacatggagcttatggccacgtgtcgatgcttgattttcttttttttgttaaaaaattaaactctttactttgaggtaattgt

SEQ ID NO: 429626 - DNA, 1002 bp, Homo sapiens
gggtcctgtgcgcgtgcgcagcgaacagctgtcacctagtgcggaacaagtctcccaaatttcccaaatctccctgggccggaggccactgtcttctcttcctcctccaccgagtcgtgctctcgccccaacccgcgcgccagacactgccctaaccatcatggaggtggccgaggtggaaagtcctctgaaccccagctgtaagataatgaccttcagaccctccatggaggagttccgggagttcaacaaataccttgcatacatggagtctaaaggagcccatcgtgcgggtcttgcaaaggtgattcctcctaaggagtggaagccaagacagtgctatgatgacattgataatttgctcattccagcaccaattcagcagatggtcacagggcagtcaggactgttcactcagtacaacatccagaaaaaagcgatgactgtgaaggagttcaggcagctggccaacagtggcaaatattgtactccaagatacttggattacgaagatttggagcgcaagtactggaagaacttaacttttgtggcacctatctatggtgcagatattaatgggagcatatatgatgagggtacattcatatttacagtgagttttgtaaagatcattggatgtgacagttttgttaccatttaagcagtttagaagtgttcttttgttgtgcttttgggtgatccataattcctcaaaggacaacaggaaatattcatcagtaggatttctgctgctggtatttttcaaactgaagctagataatcgtacaaatacctgaaattgttcagtagtaacatggtatgtggttatctggctgatcttttcattacattaaaactttttaaagcaaaaatacattataaaaatgtttggaaaacaggaaatatgatgcatcatactgacaccttaaagcagaagcagtattttagatatatttttccagtactttccctcaatcattaaaaaaatgttatatttgaaca

SEQ ID NO: 429627 - DNA, 391 bp, Homo sapiens
gcctcccacccaccccctcgacgggagggtgaggcgcggcgcagtgatcgggcggccggggtcctgtgcgcgtgcgcagcgaacagctgtcacctagtgcggaacaagtctcccaaatttcccaaatctccctgggccggaggccactgtcttctcttcctcctccaccgagtcgtgctctcgccccaacccgcgcgccaggtaaccgcttttccggagtctgggggccagggcggggggagggtccggagaggtcttcccggcactgcccccctccgcgtggggcacgggggtgcgggcgtccgggcgagcggcgacgctggggcagagacgctccgtccgtgactgcagcgactgtcaagctggggagggagcggccggccgcggccgc

SEQ ID NO: 429628 - DNA, 321 bp, Homo sapiens
tggcatcaccaagttgaagtatgtaagtttagggaacttttgtttatgtttaatgtctcctttcctgtaggtgggcccatgtcatgtgcgccgttgcggtcccagaagttcgattcactaatgtcccagaaaggacacaaatagatgtaggcagaatacctttacagaggttaaaattggtgagtggcaaagcttcttttttacctcataaattagtgttaatttcaagttctgaatttttccattaatgcacacattcccaaggtatattttctcctagctttcttttatttttctacccttattttcctttagcctaaa

SEQ ID NO: 429629 - DNA, 1155 bp, Homo sapiens
ttggtgattgtgaggggttgcagacgggagagagggcgtttagctgcacgactctcttaatcctccacggctacagccagatagcagcaatgaagaaaatgatgctagatgggagacaaaattagatgaagtcgttacatcggagggaaagactaagcccctcataccagagatgtgttttatttatagtgaagaaaatatagaatattctccacccaatgccttccttgaagaggatggaacaagtctccttatttcctgtgcaaagtgctgcgtacgggttcatgcaagttgttatggtattccttctcatgagatctgtgatggatggctgtgtgcccggtgcaaaagaaatgcgtggacagcagaatgctgtctctgcaatttgagaggaggtgctcttaagcaaacgaagaacaataggtgggcccatgtcatgtgcgccgttgcggtcccagaagttcgattcactaatgtcccagaaaggacacaaatagatgtaggcagaatacctttacagaggttaaaattgaaatgcatcttctgcagacaccgggttaagagggtctctggagcctgcatccagtgttcctacggtcgctgcccggcctccttccatgtcacttgtgcccatgctgctggggtactgatggagcctgatgattggccttatgtggtgaacattacatgctttcgacataaggtcaaccccaacgtgttcacagcacagagtaagcactcaaaaaatgaaagttgtattgctactactacttctgctgctgctgctggtgctacaatcttatgtgaactgggccacaagtccaaggcttgcgagaaggtcatttccgtgggtcaaacggtcatcacgaagcatcggaacacccggtattacagttgcagagtgatggctgtgacatcgcagaccttctatgaggtcatgtttgatgatggctcctttagcagagacacatttcctgaggatatcgtgagccgagactgtctgaagctgggcccacctgctgagggagaagtcgtccaagtcaagtggcccgatggcaaactctatggagcaaaatattttggatcaaatattgcccacatgtaccaggttgagtttgaagatggatcccagatagcaataaatacggatcggcc

SEQ ID NO: 429630 - DNA, 2654 bp, Homo sapiens
ccccacacgacctgtatcacccacctgagcatatataatgagggtgtggatgaatggaacatagctcgcctcaatacagtcttggatgtggttgaagaagagtgtggcatttctattgagggtgtaaataccccatatctctattttggcatgtggaagaccacgtttgcatggcacaccgaagacatggacctctatagcattaattatctccactttggagagcccaagtcttggtatgctatacctccggagcatggaaaacgacttgaaagactagctcaaggttttttcccaagcagctcccaagggtgtgatgcatttcttcgccacaagatgacattgatttctccatcagtattgaagaaatatggtattccctttgacaagataacccaggaggctggagaattcatgatcactttcccatatggctaccatgctggttttaatcatggtttcaactgtgcagaatctacaaattttgctactgtcagatggattgactatggaaaagttgccaaattgtgcacttgcaggaaagacatggtgaagatttcaatggatatctttgtgaggaaatttcagccagacagatatcagctttggaaacaaggaaaggatatatacaccattgatcacacgaagcctactccagcatccacccctgaagtaaaagcatggctgcagaggaggaggaaagtaagaaaagcatcccgaagcttccagtgtgctaggtctacctctaaaaggcctaaggctgatgaggaagaggaagtgtcagatgaagtcgatggggcagaggtccctaaccccgactcagtcacagatgacctcaaggtcagtgaaaagtcagaagcagcagtgaagctgaggaacacagaagcatcttcagaagaagagtcatctgctagcaggatgcaggtggagcagaatttatcagatcatatcaaactctcaggaaacagctgcttaagtacatctgtaacagaagacataaaaactgaggatgacaaagcttatgcatatagaagtgtaccttctatatccagtgaggctgatgattccattccattgtctagtggctatgagaagcccgagaaatcagacccatccgagctttcatggccaaagtcacctgagtcatgctcatcagtggcagagagtaatggtgtgttaacagagggagaagagagtgatgtggagagccatgggaatggccttgaacctggggaaatcccagcggtccccagtggagagagaaatagcttcaaagtccccagtatagcagagggagagaacaaaacctctaagagttggcgccatccacttagcaggcctccagcaagatctccgatgactcttgtgaagcagcaggcgccaagtgatgaagaattgcctgaggttctgtccattgaggaggaagtggaagaaacagagtcttgggcgaaacctctcatccacctttggcagacgaagtcccctaacttcgcagctgagcaagagtataatgcaacagtggccaggatgaagccacactgtgccatctgcactctgctcatgccgtaccacaagccagatagcagcaatgaagaaaatgatgctagatgggagacaaaattagatgaagtcgttacatcggagggaaagactaagcccctcataccagagatgtgttttatttatagtgaagaaaatatagaatattctccacccaatgccttccttgaagaggatggaacaagtctccttatttcctgtgcaaagtgctgcgtacgggttcatgcaagttgttatggtattccttctcatgagatctgtgatggatggctgtgtgcccggtgcaaaagaaatgcgtggacagcagaatgctgtctctgcaatttgagaggaggtgctcttaagcaaacgaagaacaataggtgggcccatgtcatgtgcgccgttgcggtcccagaagttcgattcactaatgtcccagaaaggacacaaatagatgtaggcagaatacctttacagaggttaaaattgaaatgcatcttctgcagacaccgggttaagagggtctctggagcctgcatccagtgttcctacggtcgctgcccggcctccttccatgtcacttgtgcccatgctgctggggtactgatggagcctgatgattggccttatgtggtgaacattacatgctttcgacataaggtcaaccccaacgtgttcacagcacagagtaagcactcaaaaaatgaaagttgtattgctactactacttctgctgctgctgctggtgctacaatcttatgtgaactgggccacaagtccaaggcttgcgagaaggtcatttccgtgggtcaaacggtcatcacgaagcatcggaacacccggtattacagttgcagagtgatggctgtgacatcgcagaccttctatgaggtcatgtttgatgatggctcctttagcagagacacatttcctgaggatatcgtgagccgagactgtctgaagctgggcccacctgctgagggagaagtcgtccaagtcaagtggcccgatggcaaactctatggagcaaaatattttggatcaaatattgcccacatgtaccaggttgagtttgaagatggatcccagatagcaataaatacggatcggcc
